United States Patent Application Publication US 2006/0134663 A1 - sequence listing, part 31

SEQ ID NO: 55385 - DNA, 580 bp, Homo Sapiens
cccgggattaaaagatcagtagtctctattcaaacttttaaaatgtcgtggtattgtaacaatatatttgatgaaagaaggttacagactcccctgaagaaccagctttcctacgctttttatttttctaacttgtctaacctgattttaaaatgactgcaattccagactaaaaacatgcttcagccctgtttcaagacattatgcttcttttaacagtccaaattagtagttttatttttcttctaaatctttgtttcacacttgtaaaatcttgggaaggaggttcttaaaactttgccaggaattgttacccatttccaaaaacagtttattatgttcaaaaaccaccatatctttgagggactgtttgaaaggggagagggcaacgcgggaaataattcactctgcgcaccggaactattgtagttcaggacttccagctactgtatttagatgttgggtttgaatatacagatttcttttcaatacctgtaaatatggctatattcttgtatttgtacgggagtgtacaaaatgacactgaaaagtaataaatatgttttgactatattgtgca

SEQ ID NO: 55386 - DNA, 868 bp, Homo Sapiens
cccaaatggaatgttgcccccttaaacaccattttccctccaggaccaccttggtttctaggcactgtggttcttggcaggggctgtcttaggtaaaagggtagttgtggagctacagtctgaagaacatagcttgggctcaagttcaaatgagccatctttttcctttgcgtttttcttgactgaaggtgagatgttatttgtggcatgtgaactgtggcaggtgggaataatcctgcccttgagagaaaggatctccagcctcccagaagcctgctgtgctttcgtcccacagctttctgcccattgtttcttactagtttcttgaattgttcttgtggacttttcctcagggatacattggcctgcaggtcccagttcacatgtagtcccctgctcaccattggagaatcagctcactgctctctagaaacgtggcgttggtgaacggaccatgcttccgtagctctgacctgggcagcttggacctggtcatcctctactgccatacctttccctgggggcttgaacacagaacagggagatggacaaccacttcaaagaaagacccaccgaatgcagtttctgcttgactgactgggcctgcagctcccttctcctgggacttagaggtggccagatttaaggcccctctactcatccaactccctcttcactggtactcccaatcaatcaaagaacctcaaaatttaaactgatgtggatgggaatatgggaattagggtgggggtgggggatgaagggaagaaatcactgtgctttgttcggcctggtgtgcaaggatggttggtggttttcctgcattgtatcttttcttactgtttctttaataaatgggatgagaggg

SEQ ID NO: 55387 - DNA, 565 bp, Homo Sapiens
gtctggcctgatctgtgcatctgctcggagacgctcctgacaagtcgggaatttctctatttctccactggtgcaaagagcggatttctccctgcttctcttctgtcacccccgctcctctcccccaggaggctccttgatttatggtagctttggacttgcttccccgtctgactgtccttgacttctagaatggaagaagctgagctggtgaagggaagactccaggccatcacagataaaagaaaaatacaggaagaaatctcacagaagcgtctgaaaatagaggaagacaaactaaagcaccagcatttgaagaaaaaggccttgagggagaaatggcttctagatggaatcagcagcggaaaagaacaggaagagatgaagaagcaaaatcaacaagaccagcaccagatccaggttctagaacaaagtatcctcaggcttgagaaagagatccaagatcttgaaaaagctgaactgcaaatctcaacgaaggaagaggccattttaaagaaactaaagtcaattgagcggacaacagaagacattataagatctgtga

SEQ ID NO: 55388 - DNA, 643 bp, Homo Sapiens
gaggaaaggtctaaatcacaaggatagacatttatcaaagaagttaaaatggtgtggcaggtcattaggattaggcagaatctctcagagctgctggacaaggaggtctacttattttgtgtggatggtaattatggcatgcacgctgaatgcagttctgagcatggcagcggcccctgagggtcagatcagaattgcccacaatgtgttttttaactaggaccaggtgcagcatgctagtcttgattggaaagatttgacaggatgctaattactgaacagtgggttttgtcaacgccctggtttcagaatatgaactgaggagtcaaacagttggaaacagcacattgctgatttacactggatcttgccttagaaaccattgtctgcctgcctaaccagcctttcataaaatttaaacaaaactctttctacgtagtgatcctcaagcaatatttttgatacagcaagtgtcaaacttgctatagcataaaagccggggctcctgatttccaggtttctaaaaaggaactgaggtaaaacagatgcctgaccgttttaaaggatcttttttaatgttttatgactgcctgtctgtttgaatactggcaaagggataaataataaattgacatcaaaaagt

SEQ ID NO: 55389 - DNA, 876 bp, Homo Sapiens
gggaggagaaatgcctgccgccggaccgcctttgctgctgctcggtacaccaggatctggaaaaacagcgctgctatttgctgcggccctagaggcggcgggggagggccaaggcccagtcctcttcctgacacgaaggcctcttcaaagcatgccccgcgggaccggaacgactctagacccaatgcgactccagaagatccgcttccagtacccaccctcaacccgagagcttttccggctcctgtgctctgcccatgaggccccggggccagccccctcccttctgctgctcgacggcctagaagagtacctagcggaagacccagagccccaggaagccgcctacctcattgccttacttctagacacagctgcccacttcagccaccggcttgggcctggccgggattgtgggctcatggtggccctccagacccaggaggaagcaggtagtggggacgtcctgcacctggcactgctccagcggtattttcctgcccagtgctggctgcagccagatgcaccaggtccaggagagcacggcctccgagcctgcctggagccaggcgggctgggccccagaacagagtggtgggtgactttccgatcagatggagaaatgatgatcgctccgtggcccacccaggctggtgaccccagctcaggcaagggttcaagctctggaggccagccctgagctttggtgggtgactacctctctgtgcttcagtttcccatggctggaatacttacctcagggacatatgcagatccaaagacctaaacaatgtaaagtgctttttctctttttaaaagtataggcattatcttggaatatatttttaccccaatcaattatggtgggtttaatat

SEQ ID NO: 55390 - DNA, 619 bp, Homo Sapiens
cccaaatcactgaattggccctgtggacaccaactctccccaaaaagccgacctctacggatggacctggccaagacgctccaggagctgagagtgcaggagaacccggggaggaggcccaggctctgctggagggcttcgagggtgagatggacatgaggcctggagatgaagatgcagacgtcctccgggaagagagccgggagtatgaccaggaggagttccgctatgacatggatgagggaaacattaattctgaagaagaagaaactagacagtcagacctccaggactaagatgaagtgagccgagaggagatcgtatcataagaatgcttctgtcgttagccgggtgcagtgctgtgtgtatctagttccagctacttgagaggctgaggcaggaggattgcttgagtccagaaagtggcagttgcagtgagtggagatcgcgccactgctctccagcctgggtggcagagcgagaccctgtctcaaaaaataaacaaaaacaaaatgcttctgtcagttaacaatctttattagagggtttttagtctttctttctcagctgtatgttaagttgattgacaaatgcaaataaacgtctttattatccaaaa

SEQ ID NO: 55391 - DNA, 603 bp, Homo Sapiens
tttctttacagtatcagagtccaagaacaggatgtcaccatagataaaagcctcatacaaaggcagaactacactccaaatttaatgtgtttaaattggtggggcaccagcagaaaatacttctagctcagctttactcttcttccacactaggctgggcccagcaatacaggagaggatgaagggaggagctccaggaggcgagggaagagccctagcagggcggccatcacaaccactcactgagagttgcccttcttaaaaatgtattttattttagccagtgggtcccttcctttctcctttcctctctactgctcaagaacagatttgaggccaggtgcggtgcctcacatctgtaatcccaacactttgggaggctgagatgggtggattgcttgagcccaggagttcaagaccagcctgggcaacacagcgagaccccatctcttaaaaaataacagacttgaggaacccctctcccttccataattcccctcatccaccgcccactccaggcactcactcaaacttgctcttcaactctgtatacaagcagaagcaataaaccaatctgattttcttttcaaaaaaaaaaaaaaa

SEQ ID NO: 55392 - DNA, 825 bp, Homo Sapiens
  misc_feature (35)..(35): n is a, c, g, or t
ggcagttattgcatatctttacaaaattgtaaccntttggagaattacagtatttcatcaagaaattagagtttttacataatcaagagcatattctatggaattaacatttagtggactagaattacataagcaggccatcagtgatcacaaggcatatgagtttgtatttatttcctggaacatgagagctaatttggagtacagacagacaccctgctgagtagaatataaaagttaatgtaaagttctgaactataaagagtagtccttttaaatagatgcattgatttgtatatctttgaaaaagttgattatgattaaatgtgtgggtagttaattacaatttagggtaacaaccaggatgtatggattcttgaggttttggcttcttgagctttctcttgagtacttgatactgttttctgaatattttgaggtttctaattaatggtatgctagtttctactgttttatataaaaatttatctagtgttgtataaggactttagtattgtggatgatggggagtggctttttgtggcatatggctgttttaattgaaatatttttttcagtttatttacagtgttgaaaaaacactcaaaaactctgggatttgttttattttccttttttgcctgcgattatggttaacaacatttcccttccccgcgggtttaagattggagtccatttttattctccattttacttgggaaaatggcgccaacctggataaaaaaaacgggatttgggcgtagggaacaatggggcttcttaactttccataatataaatatcaccggctgggcctaatggccc

SEQ ID NO: 55393 - DNA, 705 bp, Homo Sapiens
ttgtcaaatgaaacgacttcaggcaagtctcttttataatggtttttcaagtgccatttattctagtttatcatgttttgcatgtttgaaagtatgaatgtgctctttcctaaaacatggcaaatgaatagatgtagagaataacaatattacttacaagatgaaatgattagattagaagtgtccctttattaaactttgtcagcctgactgggtacaattctttgttaatttgcagtgtggtttgtatacacatatacgtgttatcaataataagattttgcaactggatgacacaagattttacttgaacagtgaaggacaaaaatcatgattgtggaagatatttttaaaatctgattttgcagcgatcacttttaaaccctgtagtgatgtaagactaaaatataattgctaagattttgtggttaatgtaaagatatgacttttctgcactgtactctcttcataggattgtaaaggtgttctaatccaattgcatgatgtagtaagcctcttaaatatgtgtgttaaatatattgagtttggattaaaatgttgacatgatttcacatttgaaaataaactcatctctcattttgaagttacctatctgtagtatgatggaggatgaattaatcgcaaatgacagttgtagaaactatgtaaagttgttgtgtgctaacattatgatttgtagtgtat

SEQ ID NO: 55394 - DNA, 864 bp, Homo Sapiens
ggacgcgtgggtttgcaaagaatgaaaagggaccccatatgtagcaaaaatcagggctgggggagagccgggttcattccctgtcctcattggtcgtccctatgaattgtacgtttcagagaaattttttttcctatgtgcaacacgaagcttccagaaccataaaatatcccgtcgataaggaaagaaaatgtcgttgttgttgtttttctggaaactgcttgaaatcttgctgtactatagagctcagaaggacacagcccgtcctcccctgcctgcctgattccatggctgttgtgctgattccaatgctttcacgttggttcctggcgtgggaactgctctcctttgcagccccatttcccaagctctgttcaagttaaacttatgtaagctttccgtggcatgcggggcgcgcacccacgtccccgctgcgtaagactctgtatttggatgccaatccacaggcctgaagaaactgcttgttgtgtatcagtaatcattagtggcaatgatgacattctgaaaagctgcaatacttatacaataaattttacaattctttggaaaaaaaaaaaagaccagcgggccatgacaagctccaggctttggttttcgctgctgctggcggcagcgttcgcaggacgggcgacggccctctggccctggcctcagaacttccaaacctccgaccagcgctacgtcctttacccgaacaactttcaattccagtacgatgtcagctcggccgcgcagcccggctgctcagtcctcgacgaggccttccagcgctatcgtgacctggcttttcgggttcggggtcttgggccccgtccttaccttcacagggaaaacgcatacact

SEQ ID NO: 55395 - DNA, 728 bp, Homo Sapiens
cacgccccacccatacggtcactgcatttggtcagcctgcttcttcaggtcgatgccctccttctgatactccatctccttcaggggaggttggggccccactggactgggtgtcaagatgtgaaagcttatgggagctttaaggagacttcatggtggttccatgcaggtggttctgccatccctgctgatttagcctggtgcctgtgtgtgtccactcacgtacacgtggggtgggggaaacgtgtctacagatgacgctaaatcagttggggtctactctaaacagcattgtgtgtaagaagcatcctcaagctcccagttaagtaacttgactacttttatttgggaatttcagactatagaagctctcttatgttttatgtccagattctgtgaccactagttactgtatcagaactcatcaggtacccacttataaatagcactgatctggctgtatactgatccatcactaacctgttttctaggacccagcgtatgtagcatttgtattgcagtttccctggcttacttgtgttttgcactgatgaattttgacagggtaaattgccactttacttgtgcaatactgctgtaaataactgcagatttttaaacaatcttttatgttacttttattaaattaaactttcactaagtaaatacaacaaaacccagcaacacccgcgagtcagcaaggctatctaagcaccggaacaacacat

SEQ ID NO: 55396 - DNA, 519 bp, Homo Sapiens
tgggcatggaggtcatgacttttaagtaggaagaccggaaagcactgtgttttggagaccagaaatttaacctccacgaggtgggaaaggaatttgaacccaaagccgctcacccagttcctggctccctggacatatgtctgatcacagaggtgcctttggaggaaatgatccagcacctcaaggcttgtgatgtccctattgaggaggggccagtccccagaacaggggcaaaagggcctatcatgtccatctacttccgagaccccgacagaaatctgattgaggtgtccaactacatctcctcgtgatggaggctggacctcctccattctgtcccccttgatgtcgccctctcctttccttcctgcaaacccccacccaggcccagagatctccaaagactgaggacttaggcacttcacacatcctgctgaggggggacccaagacaggtttgggaccaaacctacatgtctgtatgtcatcaaagttggcctaataaatgcataacctctca

SEQ ID NO: 55397 - DNA, 1100 bp, Homo Sapiens
cccaacaacgtctttggactcagctcctgcccagctcccagaggccctggtaggcccacaacttccctaagccaagctccccaggcccagctcaggcctcacggtggcctctccaggctcagctcctgccctccgatggcatctgcaggccccaaacggcctccggtcggtgggcttctctaggcccagcttgggcctcccggtggcctctgcaggcccaaatcgtcccgaagtcggcctctccaggcccagctctggcctcccggcagcctctgcaggcccaagtcgtcctcaagtcggcctggaagtgggcctggaagagcagcaagtcggcctccccgggcccagctccgtcctctcggcggcctctccaggtgcaaaacttcctcgagtcagcctctccaggcccagctcttcctgcctcccagtggcctctttcggcccagcccagttcatggctctcggcggccttcccaggccccgcttttgacttttggcagcctcttcaggcgcagaacttgatctccagtcggcctttgcaggcccggcctcctgcctctcaaaggcctgcacgggcccggccttggccttggcctcacagtggactctccacgcccagctagctctcgcctcactgcggcctcccccgtccaaagctcctgcctttcggccacttcgggaggtccagctactgcctgccagtggcccctttaagccaaggttcattcctcacaacggcctttccgaggccccgtttttcccttccgacaaccctcttggcctctaaatctgattaaaccttagggcacctaaaccccccaacatgggaatctctagaataaactcccccccatcaacacaatttagcctacgacaccctcttttacaacggccgcaattccacccactcaccgaacccccttaggctcacccaaacccaacttgctctgcgcaattactcattcatataattcgacactcttattgggaagattatccgcgactacaattcaagtgcgtgaaaaattaagcggagagaacataaaaacccggaggaaaaaaaaccccagggggggagacaagaagcgaacggcaaaaca

SEQ ID NO: 55398 - DNA, 826 bp, Homo Sapiens
  misc_feature (713)..(713): n is a, c, g, or t
tattatcccaacatctagctgctcaggccctaatttagaactcattctgatattttcttcttctgtattaattaatacttatgggtcatgaatccctgctcctttgacctttttaatagctcatgaatccatcccattgcctccccaactctgcccacacctgctgcaacactaatgccttgattttcctacctcagtctccttttctattaatccctcttttgcgtggctgcctgagtccactttctcaaacacaaacctcactatgcaactttggaatctctgtaggctcacctttgccatttcttaatattgcattctccaaattgctaatctctatccagtctcttgaactagacttggcacatggagattccgctcagaaagtgctcttcacacttctacctgcttgactaaccccagattatctttcaagactttaatctgatcttgtgtcttagagaagcccccatacctggtagagcatgtaccatcttacatgcttaaataactccacatttatttgtgtttattactctgtgttataaatatacatttgttggtctctctcttggattattttgtttctttgtcctgtaactaccactgaaagggtgcaatacagctttcttgaaatgtgtattgaacggatgaatgtataaataaaaattaaattttgtaaatttctgcttattcttagaaaaagaatctanattgtgacaaatcagaattgaaaaaaagtattctaataaaagaaaaacaagctttttataactttcagtaatttgccttctttttacttttgaaaaaacacctaggaataaga

SEQ ID NO: 55399 - DNA, 782 bp, Homo Sapiens
ttttttttttttttttttttcaccaaagttagattgaatgtttattatctttctttttcctttttaccttattgatttgatgaatcttgaaatggattcatttccataaaccaagttaaagtatggcccgaccatttaagaaaacaaccatctgagacacgcaggaaattgtgagcatttcgacccgagctctcatttcctatttgtgaagggtcagacacagtctacccaggggtgtctgggggacaagggggtctctggagatgtcacccagggagccccctctatgtctgagaggctgccactgctgcacatgctcagtgaggcttggcggccatcctggcacatggctcttcctgggtcaaccgtgacctgtctggctcaggaatgggctctggctgctgggggagccgtgtcactcctgggccatgggggcacctcctgggcacttaggtgtttcagcatagattccagtttcgcaccctgggcagacccccaggccccatccgggatagggcagaggaggtgctggcggccccagggaaggagggtgtgtaccccaaggccccctggctgtgctgaggggctggggtgagcgctccatgttcacatgagcactgctgcctcttcacttgtgggactttttgcaaacccaaggatgaactttgtgtgcattcaataaaatcatcttggggaagaggctggcatccccgtgtccttgaagcttttgggtcggggaggccccacacgggcccggagccatcctcaccacctgctcctgt

SEQ ID NO: 55400 - DNA, 1156 bp, Homo Sapiens
  misc_feature (1112)..(1112): n is a, c, g, or t
  misc_feature (1116)..(1116): n is a, c, g, or t
  misc_feature (1120)..(1120): n is a, c, g, or t
aacagaacaggggagaaataatcattgtagagtgccaaggcaacatctgacccagatgagctcttcacttcctccttccctgtcgttgtagagccagactgggtagaagagggagggcagtgtcctcaactcatcagcctcacaagcaatttgggacccctctggggtggatttcaccaggttgaattagaaccgcagataatacttccctgttagtgaggacaaaccaagcgccagctctgcccttttctctagagtgttgtgttcttgctcttggtacttacaggagctagtctggtgccttgagcaagcttgaagggaagtgggtgtcctcaccagcaaacttccacatctcaactcgtgccctcttttggccacactggccccgtctcttggagggagcccagaccctgtagggagttttgttttcctttcttctcttgggtgtggtgtcttgtgtttctgaatgtgaacccaaagaccctacccctggagaggaagcaccttcctctttgtgttggtctcctcatagcactgtttgctcacagcagaaacggggctgccacagcctcctgcggctctgctgccttctgggccctgcgtgcatggcatctatagctccttgccctgatagtcaatgctgtggcccttcaagcttgtctttcaaagctttcacaatcattacaacttttatcaaggggaataataatctctaggaaaattatgtccactttaggagaatctgtcaagtgtagccactttggtgttgttctgataatatactgtatatgtacaacttaataaattttgatgaggcagaaaaaaaaaaaaaaaaaaacggacgcgtgggcggacgcgtgggctaggatgaatttaagactgggctaccatgtgttctcaagtggtagtttaaaaaggggatttttaagtgcctttcaattgtctgtgaaagtctaaaggacgaattggccccattttgaactgtgagtctttatggggtgccattttaaaaaacaaaaggctaatttttaaattggcctttttttttaactaacaggggatctttaaaaattcacccttacggggattaaatgtgcctaacattccccacnaaanaaanattaaaaaatatgggggcgggccgctcttcaaattc

SEQ ID NO: 55401 - DNA, 740 bp, Homo Sapiens
cagacaaaaaaccagaacaaggccagcgggtctcaggaatacttgttaaaagaaactttaattatcacatactttctccttgcgacctgtccaattatactgacctggccatgagcacggtgaagcagacccaagccattccatatactggtccctttaatttgctctgttaccagctgcagaaattgacaggtgatgtggaagaattagaaattcaagaaaaacctgctctgaaagtgttcaaaaatattactgtaatacaagaaccaggcatggtggtattagaatggctggcaaacccttctaatgatatgtatgcagatacagtaacaactgtgatattggaagttcagtcaaatcccaaaataagaaaaggtgcagtacagaaggtttctaaaaaattagaaatgcacgtttacagcaagaggttggagatcatgctccaggacatatttggagaagactgtgtaagtgtaaaggatgactctattcttagcgtcacagtggacgggaaaactgccaaccttaacttggagacacggactgtagaatgtgaagagggaagtgaagacgatgaatccctccgagaaatggtggagctggctgcacagagactgtacgaggccctgacgccagttcactgagactgtgcctgtatatgaactttgaaaaaatacttgactctacttttgttacctaaaataaaatgcattcgtttctctgggaaaaaaaaaaaaaaa

SEQ ID NO: 55402 - DNA, 735 bp, Homo Sapiens
  misc_feature (666)..(666): n is a, c, g, or t
attttttgaaagatttttaaaaaagcctacaacttacatatgtagtagaatcagccattgctctgctcctggcatagagtcacctgttatgtggattaaatagttttaaaatacatatttgaagacctttgagaatgctttagtgtttgatttgaaataaaaggaaattttagcaaggattaaagaaaaaagctatcagctgtatgttaagagagactcttactaacatgttgtaaatattacaattcatgaaatgttattgtaagtctgtaacttaattttttccctgttttagttatacaggttggtttggaaatttgtgttttggcataaacaagtaaaatgtgcccattttatggtttccatgcttttgtaatcctaaaaatattaatgtctagttgttctatattataaccacatttgcgctctatgcaagcccttggaacagaacatactcatcttcatgtaggacctatgaaaattgtctatttttatctatatatttaaagttttctaaaaatgataaaaggttattacgaattttgttgtacaaaatctgtacaaaaatctgtttttacatcataatgcaagaattggaaatttttctatggtagcctagttatttgagcctggtttcaatgtgagaaccacgtttactgttattgnatttaattttcttttccttttcaacaatctcctaataaaactgtctgaaatctcaaaaaaaaaaaaaaa

SEQ ID NO: 55403 - DNA, 623 bp, Homo Sapiens
gaaatattccacaattaaccccctgtggcacataaggcacctgggctggaatccagatgccagatattcggagcattttctgcaggaagctaaattactccactggaatggaagacataaaccttgggacttccctagtgttcacaacgacttatgggaaagctggtttgttcctgaccctgcagggatatttaaactcaatcaccatagctgatataactctacccttaaaatattccctgtatagaaatgtggaattgtccctttgtagccaactataacattgttctttatgaatattacctttgatacatatgatccacaatataaaaaccaaaaactactgtgtgcaaattataccttggaccatataggcattgattaacttctttaagtacatgtgataactatggaaatcaagattatgtgactgaaaaacataaaggaagagacccatctagataacagcaatcaacctgcttaattctgaatgacaattatatccacaaatttttaaaacttctacatgtatttttcacatgaagatctccttaacaggttgccaaccttttcttttataaaactattacatttaaaatatggacgtctgaaaaataaaatat

SEQ ID NO: 55404 - DNA, 554 bp, Homo Sapiens
ccttggggtccttagtggccctgcaggtcctctggcagctctgctgaccccaccctctcccggactgcccttctgtcccagaggggtcaccctgacccggcccaccttgccactgggctttggactccagccctgacagggcccagccacactggctctgcccctcgaaggggctatgagcaaggtaggagggagctggtctcctttcttcgggccccacccaggccctgagcaccccccacccctgtgagggccccaggccttaagtccctggcggggtcatgggtttgcgacttgagcagagcggaggaacagggcactggaaggccgacgagctcagcatgcgactcggtgacggaccaggctcggcagggccggtgtactttttgtggttgtcattggtgtgttgttgcacattccaggacgtcagtattttaacaggttctaagtgcctttctatcgtagcttatgttttcctcctcttggctccattgctgttagcatagagttttaaaaaaagagataagctaatgactataacaatatattcctcc

SEQ ID NO: 55405 - DNA, 699 bp, Homo Sapiens
aacataggaatataacagtttcggtccggattccgggatcaggacccgtccctagccttcctggcctggagggcctggtcttgcactggcagctgtaatacaaagggaactcgccccacttctcccagcctggtgctgtcctctcggcccaccatcggccaggtccagcgcttcctctggggctgacaacaggcccctgactcaccccggtcacctcccagggtccatggccagggcctctgtgtttggggggccacttgcccttcatcctgccaggcgctttgcccgccctgcctcagcctgggccctgtgcccttgagccctccacccctggcccaagacccccccaaactgtctgactctgtgtttcctgccctgaggagagaggggtcagattgcagcgggccgagtgccctctccgtcccctctcctcccacccacgccacaggccagcctactcttccctccatccatggccacacccccagccattttgtaccattatataaatatatatataaatataaatatataaatacaatatgtgaagacatcttcttggtttttattttgaaacaatttttaggcttgttccgggggtctctgtgctgcctgtactgtattgacctgttttataggtgcctttttattaaaaagaaaattcaaaatccaaaaaaaaaaaaaaaaaaaaaaaaaggg

SEQ ID NO: 55406 - DNA, 773 bp, Homo Sapiens
agtttattttatgtgtgtaaattcccagttgagcattttttcatttggattagcgtgagaggaaaaaatgtgaaatgtctcaaatcaaatgcttccttctaaagattagacatgcccaaccctgcccccgcccccaatcaatcagtgacagaagagaccgccatcagccaactagctttttttaaatggctgatatattcatctctaaaggccctcaaagcactgtaaaacttttaaaactttagcctttatgtcagattagagaaaccaaacaacgtgacggtacatgtgatgaaaagctctgggtttatttttctcccgcttatgaacatgtatttttatttgccgaatgaaaatcgtggtgtgttgctttgatgaatggaatttcaggctctccctgtgcacagccggtgggcaaaggtcaccttaaatgactttttctccctatctgtctgttaatccccagaccggttgcattttccagttgcttcctgggtgtctgtacatagttgtctttgtataggagtgagtgtggtgaccgtcaatcccctaatctcccaggttctaatttaacagatgatggctgtatgaggaaaacgatgtaaatagagaatacaaattaaactggatctctgtggcctaggtttgtacatacagaaactgcatggtattaaattatgtttgtctctgatgatgtatgcagtttctttaaaaacaaacaaaaaaaaaaaaaaaaaaaaaaaagtttggggggctggccaaaaagtttaaaa

SEQ ID NO: 55407 - DNA, 587 bp, Homo Sapiens
cattctcattcatgatggaatcattgatccattgaccagttgagaaatgattgatgctgaagaggtggtattctattggtaaggcttattaccaaacttccgataatgaagcaggctaccaaaaacttatccagcccaccctaggagtgtttggatttgatcatggatgtagcatacaccaaaatccaccgagacctttgcaaaattaggctacttgttttattttgccagattatcatgggagagtctttaactagttctgaatatttgtaagtctgagtacttcatagaattataaagaaggtacagctgaccccttctcaccatgttgtaaatatttactgagactgggtgcagtactgagggataataatcttctgatttatcaaatcctgactgtctagagcaaattgtacactctctttgtgaatggtcctgtaacgtgtatgaacacatttctgggtgccttagaagttgtatttttcatgtgtgctaatatgcagtatttatacattgtgagaagctgctttgaataacaaaggttgaaacttcaaaacaaacaaaaaaacaaaaacaataaaccaaaa

SEQ ID NO: 55408 - DNA, 639 bp, Homo Sapiens
ccagcccctgctggtaaccaaggtcctcctccaatgatgggtatgaatatgaacaacagagcaactatacctggcccaccaatgggtcctggtcctgccatgggaccagaaggagccgcaaatatgggaactccaatgatgccagataatggagcagtgcacaatgacagatttcctcaaggaccaccatctcagatgggttcacctatggggagtagaacaggttctgaaacccctcaagcaccaatgagtggtgtaggtcctgtgagtggtggtcctggtggctttggtagaggaagtcaagggggcaactttgaaggccctaataagcgtcgtagatattaaacattcgttcattcctggctatctagaaaaaaaaaagtcagtggtatgcctttatacttttacctgttatctggaagaaatggttttattgttaatgtatgtagacttaaaagtttttttttttttgtaaaacttgaggtttttgtatttttctttattcatgagctttgtagattagaatggtaatgatgctcatcattttgaatgttgaaatgtgtttgtgactttagctaaatataagtattccatagtactgtgaaatctatgtagttaatctcaataaagaaatcattt

SEQ ID NO: 55409 - DNA, 705 bp, Homo Sapiens
aaactccagtatggagaagagaaagtttaattatttggttccatctagaaaagcaacaacttaaaggaatccttcactaggattgtcttatcacctttattagataaatcatgaagtgtccctgtgaaattgaagtgaaactatctctgtaggacttaagagaatagctaaaaggtgtgacttgccttattgaactgatactggcatatctgactgtaagcagtaggttgaagatatcattttatgaatgtggagaattctacattgaaacagaaaatacctgggaatgaagattaaaaatgtagctgctgttatttgcttggtgattcccctcttgctcttctttagtttgaaaaaacaaaaacgtggccttggaattttcattttgatgcagaaattttgaaattgaaaatgtgcatgttttggtgcacaaaatccttctgtgggcaaaactttgtttttgttttgcacagtaagaaacaataggcaagcgttatgtttttggtaagttaactatgaaagctttcttatttttattattaaaaatgtaacattttaacccacaggaaaaaaaaattactttgtatgcttgtttgaaccctatggggtcgttttattaataaaattattacccctaattaaaaaaaaaaaaaaaaaactcgaggggggggcccggtccccaattcgccctatagggagtgggat

SEQ ID NO: 55410 - DNA, 655 bp, Homo Sapiens
tatggctagggaaggacatggtgtatataattgtaaaatactgttctaaattattcaggcctatagtttccattactggagtcctccattgtgtggccacacagtgtcgttgatttaaaggagccagtgcttcccctctccccaggtagttggtcagctgtggactctgtgacctttgtctaaacctgtgttgtaagatcttgggacttcctctctttctatgtctatctcttccccccaacactttctcttcttagtctctctctttatttttcaatctctgaatattttagtctctctctgagtctcattttttaaaatgctcttttagaacgggaaacggctcagatcctgctgtggcacggggcctatgtgtctctgtcgcgtctgctgtgaagcacatgatgctctatttattgtagagagtgactttatttgctttctagaattgtttataacagatggtataagagaggtaataaacagagaaaaatctatgcttgtaaagaatacaaaagttaattttacctactataatatgactgtctgaaacttattttctcctctgaggaaaataaatgctttctaatgggggcaaaaaaaaaacaataataacacaaaccaacccacaacatcagcacaataaaaaaagggg

SEQ ID NO: 55411 - DNA, 811 bp, Homo Sapiens
  misc_feature (572)..(572): n is a, c, g, or t
  misc_feature (635)..(635): n is a, c, g, or t
  misc_feature (655)..(655): n is a, c, g, or t
  misc_feature (661)..(678): n is a, c, g, or t
  misc_feature (680)..(687): n is a, c, g, or t
  misc_feature (689)..(689): n is a, c, g, or t
  misc_feature (705)..(705): n is a, c, g, or t
ggggataaccttcaacaatgaggctttgctaagtggccagacttgggatttgatcttcctcacttgttatttattaagtttaagccttattcagtatctctaattgcaatagatatagttcctgtgacttctaaaaaaaattcctgttaatgctgagacagtatcttttttgtcagtttattaatttttggtcaagatttagcctgagtcttaaagcatttatttgtggaatgccccactgaagtgtcttctccattggctaagtacatgtttaaagccatgggttttaatgtaagatactttcagtatctaattctgtttcccccactgagggtgctaaagagaattagaatctttactaagacatgctcaggaaagcttcacgagagaacagcttcaaaatcctccctatgacactgaatggtagtgaggaaagaattcttggggatgccagttacatacaatagccttattactgctaatcactgtcaataaaaggtcacttcattcacctctatttgaggaaaacaatgagaatgtatctgatgaactagaatccttgtcagtattgngaaattttaatgttgcaatatctagtcaaactttgagtgtactggttctgtgaaccacctganaaaacaaattaaatgtattnaacaannnnnnnnnnnnnnnnnnannnnnnnncntgtcggcccgcctcgngccctcgaaaagcttttctagaacaatccgttttggcgcggcgggccccagtagggtaaggtgaacatgggccaatagctggtttcctaaggaaaaacccctggtc

SEQ ID NO: 55412 - DNA, 700 bp, Homo Sapiens
gaagcctttattgagccgctacattaaaagtatatattgctttactgccttcaataccagtattacataaatgcatgtatcagaaacttcacagaaattacatggcaactcttgtagctaagaaagtaattctgaggtgtacatttgtcttgcctttttaaatttataaacttgccctaaaaggagatgcatatctgggaaactgaactgtctttttgcagtttagccttcatgtatataaaatatgccattaattttattggggaagaaattccatccaaaaatgttgcctacagctatgagttaagagtgtctgtacagtgtgtagcttttattttctaaaatcacagatagggcatgtatatgacttataaatatataaatacgattttgtattaaaagttttgtagtttatggcaaaatctggtcctgtggtaggctaaataagtacagtccctgtgaaaggaatgtttgtggctcatgtcagtgtgtgaatgcatagacaatttgaagtttttgatatatttgtgatatttatcttgagcactgcaatctcaccccccccccccaccaagggaattcaatgggaatgtttattgtgactttgtccctctgttgcattttaaagttatttcctgtaatttattttcagtacataattaaaaatttgttgtatatataaaaaaaaaacaaaaaaagg

SEQ ID NO: 55413 - DNA, 678 bp, Homo Sapiens
  misc_feature (332)..(332): n is a, c, g, or t
  misc_feature (646)..(646): n is a, c, g, or t
gcttatgaagattaagggtagtattttctaaggaagtggaaagaattaaactagaaatccacaacctcagaagaagtgtttcgagtttaacatgcgctgtttctgcttatgtggttccttctctagagctgctttcccatggctttcaaaacatcaggttattgtggggcttcaggtgtaaggtcctggaagttcagcaaagtttcgtggacaagacatgggcacagagagtagaagcagaaataaatggttctatgttttcaacttccagggttggggcaggccagagcaaggcggtctcatcgaggtgggtgctacctgtgtgtgtgtanatgagtgtgctgaaggtggggagggcagcacacagcagctcatggcagagccgcctcctaggtcttggcaaagaggcaagctgacgatagacatctacctatattgttaagaaaggggtcggggggatcagccaaggtccatcattgcttttttgccgcgcccccccccccccgcccccatagattgtcagctgtaagtgaaactcctagtgaaaaagaggggagccctgtgttaggagtcccataaacatgtactgtaattctttgtatatagaaaaaaaatttactggtaagtaaagtttaactttactcantaaaaaaaaaaaaaaaaaaaatcttgattctg

SEQ ID NO: 55414 - DNA, 840 bp, Homo Sapiens
  misc_feature (692)..(692): n is a, c, g, or t
  misc_feature (791)..(791): n is a, c, g, or t
tcagcttttaaaatactggttttcaggaaataaatgactagtgcatagaagcaggtgtatttacacggagaatcgacaggctgtaatttagctaagctgcctgcagcctccttctaagattctggaaatttaggttgaggaactacagtctaccagaggaagaagaacccttcctagtggaaaagcggttttaaatgtaggcacaaggttcgtgtgacttaccaattgcaaaaccaactccaaagttcggagctatgagtccataaatgttttttgcaaatggaatctgtaagaggaaataaacattatgctaaaataacaagagatccaactctaaatcatctcgtaaagtcttgaacttgtgttttctctgagcgtggtatgcctgttcccttctgaagaaaacaggaggaagaagggtggggtttgtgaagaaccggaccctccaaatctttaaaagtcaaagcttgaaacgagttttatgaccaccatgaaaaacttgtcaccggcatatgtgaaagatcagcctagtccaccctcaagttttgacaagaacaagtaggcctcatgagggatggatattggccattggtagaagagattttattctagaaaaacatcttgctattgtttcaggttggttgtcctgaagtgtttaagacactgtcaagcttaagatgatgcaggggaanagttaaactgtgaaataaaacattttaaataatttctgacataaaatgaaaatacactccttgggaaagtcttgtccaaacattttttaagatgataanaaattagaataaaatgaaagctgtaataaaacattcaacaaactcaaaa

SEQ ID NO: 55415 - DNA, 734 bp, Homo Sapiens
aaatgaaacatttgtacaacatttgatgtttttacttatgaaatattctcctcccccaagaaaatttaaactttttctctctatttaaaagctaagaaatgttttaaaggaaaaatgaaattatcttcctttagcttatttttaaggtaaaacagctttttactctgttattgtggtaatggacagaatattacatacaaaaatattctgggagagctttttcctagttggttttaaatcattgtgccacctgaaaggtttttagattttataggagctaatttgtccaccagcattaatgtaacacagtgtagttatgaaaatatattgaaggacaggaagtggacacgaagtgatttttgtaacctgagcagttaatgaatgtgccaacattttctaggaagggacagcaagaatattctgctctgtagttaaaatactggctggcttttgatgtcttcatgcttaattgtgatcactttcttgcactgtgatgtttttacgtgaatatgttgaagtagaagtctaccatattattttataaaatgttttctgtatggcaataaactgaaaacatggatcaacccttcttttgaaaataaactgagtcaatttagccttttaaaaatatagtcatctcttttaaatagaatcctcttccaccatcaaggctcaacattttgtaagcatccaaaaaattggtaattaggggggcttgcactaaatttcactat

SEQ ID NO: 55416 - DNA, 730 bp, Homo Sapiens
  misc_feature (17)..(17): n is a, c, g, or t
  misc_feature (25)..(25): n is a, c, g, or t
  misc_feature (659)..(659): n is a, c, g, or t
tgattgttttgcaaggnaagaaagnacaatggaataacataccttcaagtatgttttaaaaaatatatatatgaacattgtgctccctgcctgcttgatcaggaaacttgtgcattacatttttttaattagctttttaatggttttatcaaaacaaaaaaaatacaaaaaaaaaaaaaaaagtcctgcaagactgcagatccacaaaagctggttttatagaggatcatgaactatgcacaaactgggttcaagactttttttctcaagtttagtaggatatttagaaaaaccaaccttcctcagagtgactgcatctcattgccattacatgcgttctatatattcgatggacatacacctgcgtatgtatatccaatatgtgtgcgtgtgagcatgcgtgtgcgtatgtgcgtccgacataccacttcccgtgctgccggcgagcattgagttgtagaaaaactgttgttttaaaattggggatggaagtcaagaatatgtttgtttgtttttgggttttgttgggtttgaggggttttttgtttggttggttttttggtttttttaccttttattttgaacttaatatgtctgtaactctgagattaaacaacaagttcgtggctcttaatgttttcctcatagaatgtgactgntgaagaacatgcatcgaaagttgctttcgaaagtacaacgctttattgaatcttaataaattgcaattttt

SEQ ID NO: 55417 - DNA, 509 bp, Homo Sapiens
aacgaggaagaccatgtgatttttgcatcttactccataatgtattagtggttgcattaatatgacaatgtctgcaattaaacaccagtaagcaaaattgatacatcagaatgacttgcagggcttatcacgcagtttcatttacatccctaccccactgccatttacttgagcgtgaatgacacacgagagattctttgccttccataatgcaactttacacataaataacacaaggctaaagaaaaccagaactcaaattcaccatgcataggagtgataacaaaaatatttaacagtcagtatggttgatcactggccaatcaaaatacatcactgatatatcaaaatggatgcaggccactgtgactaacttgtggatatcatttctatgatcaccctaaaacagagttgggaaaatatcaattaactggactctctggtttgaattctcaatatgtatcttaatatgaaatagctcattaaaacttcatgtgtaactatttcaa

SEQ ID NO: 55418 - DNA, 622 bp, Homo Sapiens
gctttgtgcctgcaaatttcagacaccttcatctaaatatattcaagactgcatgtcatcaagcacctgaacaggttcacaagcatattgactgactaatagcccaaggaaaagaggagatgaagttaggggaatctatgagtgaaggaaatccccctgtgcaggaggctagtataccataaataaggttatatttgaatataaaacataaaccctgtagatttcattgtgtcttatttcagttatgaagcccccgttgtatcatcattttttatcacagatgttctcagaattgtctacatattaattagaaacaagactaaagaaatgtcaatcctgaggacaacagtgaacccctgtaattctaagtagcagtttgtctctgagacttatcagacacagggttttcactgccaaaggattacataaatattcagaacataaaggattttagccatcttgagggtgcttactttgactgctaaaaactgaaaagtgattcaatactgcttaagtgcatggcttataatgtaattattgaatcaagttatgttctaagaaattttttatactaatcatttttcaagaggcatattagtatgttataaaatacttgctttta

SEQ ID NO: 55419 - DNA, 729 bp, Homo Sapiens
  misc_feature (18)..(18): n is a, c, g, or t
atcctgttagggaaatcnatttttatctagtcatttgttcagattatttgtatttaaagtcattaacttgatccctttctccagactggccatgccgccatatacctttccttttgtattccattgtggaagcttctaggaggctgagaagcaggagatccaagctccagtcctgggtgttaccctgaggggggaagtcacttcccttctctcagctgagtttttcacgtgtaagatgagaatggctgatggctgagagcccaccaaccttccccaccccgtatcagtttgaccacgggccttttgctacattctatccagagagcaggcctgccagcccctctccactgagaagttgggctgagagtatggggaaaagaatcaagagacctgactgccgccaactcactagtgacttagatacatcccctccccctgctggggcctcagtttccccatctgtaacttgagaaaatagaactagatctgtaaagtctggaactagatctgtaacgtccttataggtgtcactagggggttccatgagaggtgtgtgacaggcagtctgattcctctcattctccatagtctgtttcctggaaagtcgatgtaattaactgatggcccaaaaactacctcaagagacctggccctgttaagacggcttaaccactgagatcccgttctattgatttaataaagtcaaactattggaaaaaaaaaaaaaaa

SEQ ID NO: 55420 - DNA, 686 bp, Homo Sapiens
  misc_feature (652)..(678): n is a, c, g, or t
ggggggttctaacattttggggggccatagattcttttgacaatctgagccaatctatgaaacttctccccaaaaagaaccaccccacaaaatcttgcaaaacgtaagagattttcctggatctgaagctacccgaagacatgggaagagttgtattctattattcaattttaagaatatttattaatattcactgagctattgctagccactgtgctaaacattttacatacattctcctatttcatcctcaaaacaatcctttgagttgggttttaatatagttccaatattcggatgtgaaaactgaggcttatagtggctaagaaacttgcccaaagccactacctagaaaatggcagagctggaatgtaggtttaactcctgaccactatgctataaagtcaccacatgtcaaactaattttcaagttgttgggacatgtcccctactaggttttaaactagatcttccttggtagatgaagctatagaacttctattttccctgctttctgtagtctctcacagtgacagcatctatactaaagtatagatacctaaggggaaaatatagaaagcctgcctgaataatagaatctagaacaacaacaaaaatattaatttttttctgtgtatgcttaggtccagcnnnnnnnnnnnnnnnnnnnnnnnnnnnaaacatgg

SEQ ID NO: 55421 - DNA, 812 bp, Homo Sapiens
ggaaaagtgcgccctacgaaaggacggtcgacttcggcggggcccaggtgagaaaggcccacctgtgtcctggttgagggtctccagggttcttggggcccgaggccaatggtggcagagtctacatagaactatgcttcgggtgttctggggaaaacctttcgacttgtggctatactattcaatatggctgtatagctcattgtgctttgaatacgttggtggtgttgtcatgtgttctggaccatcaatggagcctacaattcaaaattcagatatgtctttgcagaaaatcttagtcgacatttttatggtatccaaagaggtgacattgtgattgcaaaaagcccaagtgatccaaaatcaaatatttgtaaaagagtaatggttggaaggagacaaaatcctcaccactagtccatcagatttctttaaaagccatagttatgtgccaatgggtcatgttggttagaaggtgacaatctacagaattctacagattccaggtgctatggacctattccatatggactaataaagaggacgaatcttctttaagattggcctctgagtgatttggatttttacgtgccagcctaatggccacagattttctgatgattagtaagcatatattctttgacttgaatatggtctcttttactgtgatttattactcccgttggaaacgtgtcttaccaataactattgcttccaaaaaaaaaagaaaaaaaaaaaaatgggtgggggggccagaaattttacacatgtggggggggcccaggtaatggactggaccatggtcaagaagg

SEQ ID NO: 55422 - DNA, 615 bp, Homo Sapiens
  misc_feature (531)..(531): n is a, c, g, or t
gtctgagaaggctaccaaatggtttaagttcatttcatagttaggagaaaaagattttgagtagtctaatgtcgtcagaaaggattaaaacgttgtatgtaccaagaaggcagaatgaagaaggatcacgttcacaaatgctgtatgtttaacaaaatacgtttagatggtaatatccaatagtcttatcaagtgctacaatctttttaaacagggaatggccaaatccagtgctattgaaacagcctgaagaatgcaatcttaatttgcctgtatgggacccaagggttagtgtattattttttcccctaccaattcacactgtgcaataacaagtaaaaatcatctgcataaactccagggagacttccagccttttacttatgaatggtcatgtccgtattacactttcttttagataacctcaactataattgtcctcaactataattgatgtgagaagcataattatgtaccctgtaaaccacatttaattgtacatagtttttaatacagattttactaacattntaatttattctatatagaactaccttgtaagtcaaagttgtgtgggcatttgtgctttaaaaaaaataaaaggatactaaaaaa

SEQ ID NO: 55423 - DNA, 438 bp, Homo Sapiens
gatgaagcaaaaaaaaaaaagcactcattggagaaatagtgagtgtaaaaagagatttattttgtacagacagcaaagtatcctgtgtaatgttgctgacataaagcactttgggggaaaaaagtggaaatctgttttccataaatcacacagactcttgtacatagttatatacactcacgtagagaaatgaactgcatatatcatactggatatggggccgattttactctagaggcacatctggtgcttattgtcataaatcttttaaagaattaggtacacttttttctattaatatgtatagttttgtgatttgtcacagttatgtttcatataatcataagttattttgtcttgttcatgaagtcctttttttatgtcaaaagtaaaatgaagggattgtgcacttggtacagaataaaactggaaatagag

SEQ ID NO: 55424 - DNA, 1011 bp, Homo Sapiens
  misc_feature (772)..(772): n is a, c, g, or t
  misc_feature (892)..(892): n is a, c, g, or t
  misc_feature (909)..(909): n is a, c, g, or t
  misc_feature (911)..(911): n is a, c, g, or t
  misc_feature (968)..(968): n is a, c, g, or t
tggacatcaaggagttcacatttttgacaatctttcagtcctgaactgtccaaggggtggaggtagctccatacaggaagctgcctgctgcgtgtggatcagtaatatcagacttgcccaacagctcactggagacatcaaaaccaatgcatgggggatgcatgacgtcacccaaatatttaccacacgcttttgctgccagagaccccagatcacttttcctgcctcctgctaaacaaatgggagcagtagcttctcatcagcctccacatttcattactcataattgtggccttcctaatgtctcatgcccctaagcacttattacaatgtctcaacagccttctctcagcctctcaaaatattagtcatcattaaaataaatgtctgatgttaaagcatcagggtcaattgtactgtgacacctaaaatttcatgctgcatcccaccaggtcctcagcctaatggctttcatgcccccaacagactgctaaactctttgaattagtcaagcatatccctcaagggacaaggggttaccccaccctctgatttctaccaagcctgcctcccgcaccctgtgctccagagtgaacccccgggtagacctgcacagatgcagtgtcatcccctgttgggctgagtatgcgagatgaataaattacggtgaatttcgtctactcagtgtttgttgtgtctgcagccatcctcagaattctagggcaagactaatttcttcaccaatgacgtgaacaggaaaggacccaactangaattgccctttttaaaaaatccctttccaccctcttaattatgtagtgcatgcattttatagcttttttgctcattccattatctgaggtcaggcactgatattttaccccatctttanccctcgcaggagggcanangaaacagtgggtcataatttattttcccctaagtgggccaaagacatggattttccntccctgttgccacctcaaaattttcacctcccttccttttaaa

SEQ ID NO: 55425 - DNA, 483 bp, Homo Sapiens
aatacttcttgaaaacttagtttactatacatcttgccctattaatatgttctcttaacgtgtgccattgttctctttgaccattttcctataatgatgttgatgttcaacacctggactgaatgtctgttctcagatcccttggatgttacagatgaggcagtctgactgtcctttctacttgaaagattagaatatgtatccaaatggcattcacgtgtcacttagcaaggtttgctgatgcttcaaagagcttagtttgtggtttcctggacgtggaaacaagtatctgagttccctggagatcaacgggatgaggtgttacagctgcctccctcttcatgcaatctggtgagcagtggtgcaggcggggagccagagaaacttgccagttatataacttgtctttggcttttcttcatctgtaaaacaaggataatactgaactgtaagggttagtggagagtttttaattaagcggcc

SEQ ID NO: 55426 - DNA, 658 bp, Homo Sapiens
agatttcccggaccctggttttcctcctgtgaccctttcggggccgggctctcaccctaaagaagcagccccgccctgggggtggccccaccctctcttgggacctgtcataagtcggaccccgggcgcccggctgcgcagtcccagccgccttccccaggcagtggaaccttcgggctcctgagcttcaggatggttcgtactaagacatggaccctgaagaagcactttgttggctatcctactaatagtgactttgagttgaagacatctgagctcccacccttaaaaaatggagaggtcctgcttgaagctttgttcctcaccgtggatccctacatgagagtggcagccaaaagattgaaggaaggtgatacaatgatggggcagcaagtggccaagtaattatttccatttgtcccagtgcttggaaaatatgtctcctctttacctcctgctgggtcctgtctctgtccattgctcctacaatttcttcagcctatgttgttgactcactgtgtgatcttggaatcaacttgggaaattctgtctccttcctaactagctggaaaggagggaaggatgtgaaattgtcattttttcagcttcactttgccatccttactttttattactaaaaaaaaaaaaaaaaacgcgg

SEQ ID NO: 55427 - DNA, 696 bp, Homo Sapiens
cgcgcacacacacacacaaacgcactcagatttcccggaccctggttttcctcctgtgaccctttcggggccgggctgtcaccctaaagaagcagccccgccctggggtggccccaccctctcttgggacctgtcataagtcggaccccgggcgcccggctgcgcagtcccagccgccttccccaggcagtggaaccttcgggctcctgagcttcaggatggttcgtactaagacatggaccctgaagaagcactttgttggctatcctactaatagtgactttgagttgaagacatctgagctcccacccttaaaaaatggagaggtcctgcttgaagctttgttcctcaccgtggatccctacatgagagtggcagccaaaagattgaaggaaggtgatacaatgatggggcagcaagtggccaaagttgtggaaagtaaaaatgtagccctaccaaaaggaactattgtactggcttctccaggctggacaacgcactccatttctgatgggaaagatctggaaaagctgctgacagagtggccagacacaataccactgtctttggctctggggacagttggcatgccaggcctgactgcctactttggcctacttgaaatctgtggtgtgaagggtggagaaacagtgatggttaatgcagcagctggagctgtgggctcagtcgtggggc

SEQ ID NO: 55428 - DNA, 814 bp, Homo Sapiens
  misc_feature (676)..(676): n is a, c, g, or t
  misc_feature (678)..(682): n is a, c, g, or t
  misc_feature (684)..(703): n is a, c, g, or t
ggtgtgggtggccctctagtctagggctctcttagtgaatggttgtggaaatatgatttttctaagttccttccttttccttttgatagatgagtttgagatgatggagtaggagtggggccctcaggcacttctggtaaagacattccacctgcaagcagcattttgagtaaagcactgctgtggtttgccgatttacggtccatttaatgttaggctaaagcacctttaatcatttttgttgttttaagataatgtatttgtgaagtggataaacactggaaatagggtgcttcttctggaaagttcagtgtaaaacacaaacaaggctttggcgggtttatctggctttataaacaagtctgaaaaatggatgaaagctaaatatataaagcagttggttgtctatcttttatcatttttactcagatctgtatttaacacttatttatttgttagtttttacattcaaaagaaatacactttgaactttggctaacattgtaggatattttttaattgtttctacatttttaaagcatgattcatcatttttgtaaacttagatcattttttaattgtcttttcttttccaatagaccagttaccactcatgtgtctgcagaaacctctttattgtattcttataataaatgtaaaaatatttgtagccttncnnnnncnnnnnnnnnnnnnnnnnnnnaaacatgtcgggccgccctcggcgccttcgagaggcttttctagaacccattcgtttttggcgccgcggggcccccagtaagggtaaagtggaaccatggggcccataccc

SEQ ID NO: 55429 - DNA, 871 bp, Homo Sapiens
taatagtatatagtttaagtattgacaaaactttgaaagtttctttctttaaaatgggaaatactcaatatctaaatccaggtcaggcatgggatatcagtatttaacattggatgttttatgttttatatttataatgttcaaaatgcaagcataacatttaatatttgtccacatggttttacaaaagtaaatcttaaattactaagcttttcccatatgttctcgtactttctcaaatccctataaagaattacttgttatctattaaaaatctcctttacccaaatctgtattatggtttcgccagacaaatattatgtgatgtagcccagaaaatccacaccttttgtcctttttatgttttaatttgaataatcatgtgcttagtcccttggtttactgccacatcagtttaacacgatatcagcacattcccttgtcatcatcaaggtgttggctcagatttattcttaattggatgtttaaagcatgtactaccttgttacagttggtttagtgtagtggattattgacatgacatcatgagaagatgtgtaattttataccacatttataaaacatgattttgttttctacccttcaaggtaaacattaaaaataaggtggtacttgtgtacttgtacataaaaccaaaattatagttgggaaaaaaataaatttatatatgaaaatgtcaaaatcattttaaaagtattattttcaaataaaatggagaagctggtgaaaagtcatattggcaatttttatgtagtttaagtggaattaagcagagggagatgcttttgggtttttaatatgccacttctgagtgaaaacatctcgtgggagtcatttgtgttcagctcta

SEQ ID NO: 55430 - DNA, 616 bp, Homo Sapiens
aaacacagcatgattcatattttttatgtttcatgctactcattttgtttaattaccaacaaacatggggactttggctttttgacttatttgcaacaagcatgaaattgttaaatttaccttttatcaattgtaatcatcctatgccaacatattatcataaattcatagaaatatttttaaaaataaataacagacattgaaatccaattcttagataatactcccagaacagccaatggtaaatgccctatacttgagtcttacttagatgctgtggtaatgcaccattttagaagatgaatgatactgctatttctcttcagggaaacaataatggataaagaaatgtaactgccgggcagcaaagcttctaagtgaaacctgtagtagcagtagtagtagggagaaaatgtgtagtcatcaagtgaaaataggaaaggatctatgatttatgatgtcttaatagaccctaaattgttctttaattacaagagtggcagtctctgaagtcatttgtgagcttgtatgacttttgtatttagcaatgttgcatgctcacataattgaaaattaaaagtaacacatttttctgaaatgtaaaaaaaaaaaaaaa

SEQ ID NO: 55431 - DNA, 908 bp, Homo Sapiens
gatcacaaaatgcagccatcctctatgcagcaagccctgcccagtcagtgaccctactggacagatccaaggccagccctggttccctgctgcagccaccgtcctgacgttcatcggagcaggccggggcctggccttcccggcacaagtggctgttctgacaggcccccagtttgtcccatctgaactgctgggaggtttccgggtggccagaggagcaaagctgccttccaagtgcctgtctgtgcctgggagaacagagcaggagcgtcgtgcggtccaccgcgcagtgcatggcgattccaggcgctgaacaactcccctggacccttgggcctgcatctgactcccagctgcagagtcagaagctgagtccaggcaactgcttggccactcccgatcgctcctccctggacacccggttacmaaagtcagcaaagaagatgcggtaatcgccgcctgatctccacatggtgaacacaacactcccaccaacacctccttgactggtcggtcttcagcaccgggggtgggcaggcaggtgttctgtgttgacgagaattgcacaggctaaacacaaacacggaaccagagtgagaacacctcactcacggcagcccaggctgctccctaccaggtgacggagcgcgccggggctgtgggtgccaggggctgagtgctagggactcgtcatgagtggggatccccacgttcctgtcactgctgtcaaacagaaggtaaacagtcttatgaatgtatttccttaggaaaacttgtaaaaacttttattaggatatctatttaatactgaactttggcctactttgtgatagactataaacaaattgaggaaatcactatttctcacttctgtattttctcaaaaataattttgttacagagttcaa

SEQ ID NO: 55432 - DNA, 813 bp, Homo Sapiens
tgtccttgaattcactcagcaaacaaagctttctggagaatctctcaaaacttaggccctgctccatttggccaaaaatgatggctgctccaaaactctgaacttcttaaaactccatctgctacattatttctggagtttaaacatgactttttctgtctttgagtatagatgtgttgtttaattaacgaagcacaagtctgttaagcagaaggctccaagctgtattctatacttgggaatccttggtgccatctttattctaccaagtgccaatcaccatggctaaagtgggcgtatattacagcctgtgtcctaagcttagaagctttaatgtacttttttaaatgaaaagtattagagggggttgaacattgtaactaaagcataaagttagaccaattacatgcagagatgtttatttaatattgtgtgagctgagtccttctgtataaattatttgcacacttttcttgcatgatgaactgattttttatagttgtttgtaccagacggtggcatattttttgtaaaaacttttgacactgaagtgcataaatgtttctccaccaccaaaaacaaaaaaaaaaaaaaaaggctgttggggggcccggacccgaagaagttttcagaaccctcgcggcggcggcgcgaccagagtaaggcacggcccaagcggcgccagaaaccgtgcgaacagggcggttctcccccaaaaaaccggcgccgcggttggaaaaccaaggctcgcgctcgctgcacgctcaacatcccccccccgcccgcaccaaagagagcaaagaacagacgcca

SEQ ID NO: 55433 - DNA, 585 bp, Homo Sapiens
  misc_feature (491)..(491): n is a, c, g, or t
  misc_feature (571)..(571): n is a, c, g, or t
ttaaaaccagatggagtgggtatcggtgcaatgtttggaggcgacacactctatgaacttcggtgttccttacagttagcggaaacggaaagggaaggaggattttctccacacatttctcctttcactgctgtcaatgacctgggacatctgcttgggagagctggctttaatactctgactgtggacactgatgaaattcaagttaactatcctggaatgtttgaattgatggaagatttacaaggtatgggtgagagtaactgtgcttggaatagaaaagccctgctgcatcgagacacaatgctggcagctgcggcagtgtacagagaaatgtacagaaatgaagatggttcagtacctgctacataccagatctattacatgataggatggaaatatcatgagtcacaggcaagaccagctgaaagaggttccgcaactgtgtcatttggagagctaggaaaaataaacaaccttatgccaccggngaaaaaatcacaataaatatttattcagtgttaatgtcgtccagaattttcatcagaaatggatagctttaacatctaanattattatattttg

SEQ ID NO: 55434 - DNA, 436 bp, Homo Sapiens
  misc_feature (130)..(130): n is a, c, g, or t
ccggcactccagcctggcgacaagagtgagactccacctcaaaaaaaaaaaaaagaatccaatactgcccaaggataggtattttatagatgggcaactggctgaaaggttaattctctagggctagtanaactggatcccaacaccaaactcttaattagacctaggcctcagctgcactgcccgaaaagcatttgggcagaccctgagcagaatactggtctcaggccaagcccaatatagccattaaagatgacctacagtgctgtgtaccctggggcaatagggttaaatggtagttagcaactagggctagtcttcccttacctcaaaggctctcactaccgtggaccacctagtctgtaactctttctgaggagctgttactgaatattaaaaagatagacttcaaaaaaaaaaaaaaaaaaaaaaggac

SEQ ID NO: 55435 - DNA, 994 bp, Homo Sapiens
tccgggtttcagcatgttggctaggccggtctctcctgacctcagggtgatcagcccacctcggcctcacaaagtgctgggattacaggcgtgagccaccttgcccagcccacatcatacagtttgaaatgaaactttgccacaaccagcctttgctgtagcacacacatatatcactgaacctgtttgaaataaagttttttttctttttcatgattcgtctttgagtacctccaggctgaaagactgttgtaccagtaaaaacttaaaggcacaaattctccttgaagaccttctcccttttatgtggccccatattttatgttgctttatctttgaaattttgcatgaaaaggaaatgaatggattcgaatgaaattgtcctttagagcatgattacttgttcccatggacaaatatttttctccccttgctcttcctggcctgaaacacgggaaaccagagtcaaaagttatctccctctccctgtgatgccttgagatttttttctgcgttgtttaatgcctgaaatccaagtcttcctccatgggaaaatactgttataccaaataattctagatgagtaacaaagatctttttaggccttcattttatgttttttcttaactgttatattatgattgtgacatagattatactactactaatttttggatgtttcaaaaggtcagaagtaaaagatggtagaaagccatgagggagtccttttgatttttaactattccccaggtcccctatacttcgtggggctttcccttttttttttttggaaaggagggtcactccgtcccccaaggttagagtaaagggggcaccaatcttgggttcggttgaaacccctgcctccccggaattaagggaattctccggggtttaagccccccctgggaagcggtaaattaaagggcactttgccccccctaacccgggttaaaatttttggaattttttaaaacaaaaaaaggggggttcc

SEQ ID NO: 55436 - DNA, 802 bp, Homo Sapiens
caaataaggcttgttggaaatcctagtccatcaactaatttcaaaaatttatttttgatatgagtagcaacagctggtcatataccctatcccaaaaggaagaactgtcttgaacaagatgaatggaaaattgtggttaattctgaatttcatgtaatgacaacatattctttcataaaactatggcctgtttaagatggaactttgtgtgtgtctgctggggagggtggggtacatgtgtatggcgtgtgttcttgaaatgatgtctctctgaatatccaaaaaagtactgtactgtagaaatgctctttgaaaaagtctatcgactgaccatgatcaatctagcatatgtatgttcagtgggctagccttggtcctcagggacagtgtgtgactctagtggtcttcctaaccagtctcttgcctaaagatatctgggacctctactggctttaatgacaaataatgttatgttgaggttatgcttcctttgttatttgctgattttcctactaaatgtagcatttcaattagatccagctttcacattttgagataattgtaaaaagaatgaaattatgcagaaatggccaatatctcttatcaatctgttcttttggaaaccctcatgtactataaattgtgtacagttaaaaaaatatatatatatatatattcttacatgagtaaaaagcaccctctcccagcaatcgtatgccattggtatttgaagagaattcccaaataacccattgctgctgctgctgtttttgatttgtatgggtttttttgttttgtttgt

SEQ ID NO: 55437 - DNA, 500 bp, Homo Sapiens
gtgatacattagttgaatggatgaaacttttttaaagtttcagatgaactcccataatgaatgatgaatttgtgatgagggataacctggaagtggtattcacacattatgctacaataaaaggttctaccgtggagaggattttgacacattcagtaactaatggaacacaccgtcaacatgaattcgcaccttacatgacagaagtgattcagggattcctatgaatagaaatgctgagaaggaacgcattttattgcagaagctaaaaagctaaagtaccagtcatctagagagaaggaaattaatgtttcttaataatcctgttaaatgtttgattgtttttggaatgtgttattgtaaagatgtcatgcaggacatgtatatgttgtctgttgtaaaatgttaacgaatactttgttcagggctcactctctctttgtcatgaaagccagctccttgtggcgaggtaaagtggaattccaataaagaaattcctt

SEQ ID NO: 55438 - DNA, 493 bp, Homo Sapiens
agatacggaacggaccaaggaccacactccagggtgcattcgttgctccctggggcaccacttctggattacagtgtgccaggtcctttggaggccctaccccttccccattcattgccaccagtgagaaatgggggtgcccctgtgtaaagaaacctaccaaaggtttacatttgcaccttagcctcaatagctacgaaccctagagaagcagctagctggagctcatgtgcaactcctgattctcaggagaaagatggattttaacccaaaattatgagtgagctgttaactctaaaatgtacttgggagataggccaagcgagaggtcatgggccaactaagtgttatccagtagaaaagacagtacactgcttttcttttagtgtttgcttttcctttgctatatgttttgctatttccttgtggcttagaatgtaaaattgattgttaaaagttttgttctgaataaatatttatcttttgtattgct

SEQ ID NO: 55439 - DNA, 955 bp, Homo Sapiens
aggacgcgaggcctggggtggcgattctcggcacgaggaaatagacgagtgctctaaaccagtatcatggctccagttcctctgacaaggattcacatggggttgcaattctgactgtgctggtgatgctggttccaggtccctcaggaacccctcccccagtctggtctgcccttgaactctatactggccccagggtatcccaggattgtcagaaaggcctggccaggattcacctgggagagggatcagcatctctgcaaagttgttggattgaaagaactttcattttgagctacatcattgaagagctttaaatctgaaaataagaaagacgttgaaccctattactcacatctctttgtcatttgaagcagatcccgaaccactcaaaaggacaaaacaaggaaatagcaatgaaattggattcagtgaatggggtaagggtattaagtgtctgaaatataagagataaaaaaattagtttttacctttttttctattttctaaatgttttggtggctagaataagatatactttgaactcaagagcaataaatgttaatatattaaaagtagctttatgaaatatggaaagtatctttatttcaaaatacttcaaagtaatcatctgaatatttatcagaaatattaagacaacttattaaatccctggtattaaaatgattgcttattacttttttgtttatactactcagaagtgattctcttccacatttttagatttttcagagtaaaaaggatataattttagactttcaattgaatataaactggggtttttccacaccaattttgggacatggctgtctgaaggtgaaccctaggtatttatgctaaaaatgttattttggggaatccttggcgatgggcctccgaaattcattcatttacttactcaatcaactcactaatttcgagggcggagttcccc

SEQ ID NO: 55440 - DNA, 560 bp, Homo Sapiens
  misc_feature (53)..(53): n is a, c, g, or t
tcttcataatcataggtagctaggttataaactatttaaagacaagatcacgngataagcttataatcttctcataattccccttacttagcattgtgttagacatactaataggtgcacagtgaaatacttattgttgattgtttaaaaataaagttttagaaaaccttttcaaaagtcagagtttaggccaggggcacaggctgacacctataatcccagcactttgggaggccagggcgggcagatcacttgggtcaagagttcaaggccagcctggccaacatggcaaaaccccatctctactaaataaaatacaaaaattatccaggcatggtggtgcatgcctgtaatcccagctacttggaggctgaggcatgagaattgcttgaacctgggaggcagaggttgcagtgagctgagatcgccccactgcaatccagcctgggagacataattcaaatctattttggtcttatatcttcttatgtttgtgctatttcatgtgtgccagtttctctttttttcacaacaatttatcaatttgtggcaataaaaat

SEQ ID NO: 55441 - DNA, 712 bp, Homo Sapiens
  misc_feature (673)..(673): n is a, c, g, or t
ttttttttttttttttttgcttttaaattaattttttatataacttctaaatcttcaagaagctaaaggcaacataaatattgtcattcaccatgaaaagacattttttcaataacttaggaaggattcaataaaagtccaactacacttgaggcttatcatgaaacctaaaattcataaactaaactgaagtgaattcagattttcaagacctggaaagcaagcagagggagctcgtgtcagaaggtgactcagaaccgtgttgcctggagcatcactctccctgcaaggctgaagcacggggtggggcgggggagaggacgatcggctctgggagactgtgaagtgttttcatcctctgtaaacgtggtgctggtagtgtcttgttgagtgtgaattctctctcatacaaaagttataaatattctctattcagaagtctggtccacatgacacccagaggcaatgttcttaagcgcggcggccgggagcacccaagggtgcgagggcccagtctgtgggcgctgtgtggcaccattcacagcaagtccatcttgggtctgtagtgcagcaggagcggcgccttcttgaatctccacctagtgacaaccacgaacttgagtgtgtggtccttgcccaggatctcctcgttgcataaaatgtccagctcgtntaaggatgaaaggttgagttttttggcgatgaactcttc

SEQ ID NO: 55442 - DNA, 732 bp, Homo Sapiens
gaaatacctactgtcagcgttttagctgatgaagaattccttcccttcaaagaaaatacatttgacctggtggttagcagtttaagtttgcattgggtgaatgaccttcctagagcacttgagcagattcattatattttaaaaccagatggagtgtttatcggtgcaatgtttggaggcgacacactctatgaacttcggtgttccttacagttagcggaaacggaaagggaaggaggattttctccacacatttctcctttcactgctgtcaatgacctgggacatctgcttgggagagctggctttaatactctgactgtggacactgatgaaattcaagttaactatcctggaatgtttgaattgatggaagatttacaagaacaaaagtccagaatgttgacctaattttacaaaacaagctgcatatcagctgatgaatgcatgagaaattttcaaggctttcacagtggtcttaaggtatgggtgagagtaactgtgcttggaatagaaaagccctgctgcatcgagacacaatgctggcagctgcggcagtgtacagagaaatgtacagaaatgaagatggttcagtacctgctacataccagatctattacatgataggatggaaatatcttgagtcacaggcagacagctgaaagagttccgcaactgtgtcattggagagctaggaaaaataaacaaccttatgcacggaaaaaacaaaaa

SEQ ID NO: 55443 - DNA, 502 bp, Homo Sapiens
  misc_feature (487)..(488): n is a, c, g, or t
gagctgagatggcaccactgcactccggcctaggcaacgagagcaaaactccaatacaaacaaacaaacaaacacctgtgctaggtcagtctggcacgtaagatgaacatccctaccaacacagagctcaccatctcttatacttaagtgaaaaacatggggaaggggaaaggggaatggctgcttttgatatgttccctgacacatatcttgaatggagacctccctaccaagtgatgaaagtgttgaaaaacttaataacaaatgcttgttgggcaagaatgggattgaggattatcttctctcagaaaggcattgtgaaggaattgagccagatctctctccctactgcaaaaccctattgtagtaaaaaagtcttctttactatcttaataaaacagatattgtgagattcacataaaaaaaaaaaaaaaaaaggccacatgtgctcaagctgcaggtcggggccgttaaactgtcagaacanncccccccccccccc

SEQ ID NO: 55444 - DNA, 662 bp, Homo Sapiens
  misc_feature (542)..(542): n is a, c, g, or t
  misc_feature (639)..(639): n is a, c, g, or t
ggtctgatgcctttttgtcttttttttttttttttgccatttgcatcctatttcatagtgccaaaatgaatttttgtatcttgtcttgtctttgtccattataaactggaggatcacagttaagccttccatgaattcatagtttggaatcatttaccttaccattattttggatttttttcttattacagtgtcactacactgtattcatgtgggggaacaaacatgtaggtgcttgaacatgccccacagacacagttgtagccctagtatttgtgacggtcattattgacacagtgcagactttacagatggagcattatgctctcagaggactttaaaaatatgtatattaagcaattaactttctggagttggagttatcaaatcttgctgggaaattaacttccaagagctctgaattggatggaattccatctggcttcagagaacaatcagcctatatgaaacggagctttgaaatgtttttcttgtgcagaaatacgaactagaaagaaaagtgctgatctaatgctaagttntctctgtgtactgactcagttgccagaattataatgaaaactgtattttagtctaacaaatgtatagaattttttatgtaataaataaaatttatangaaaagtaaaaaaaaaaaaaaaa

SEQ ID NO: 55445 - DNA, 746 bp, Homo Sapiens
tttttttttttttttagacctattttagaatgaggtggagctttatctactgtttcctcattagtcataagaaattgaatgaactctttttggggatcccagtttgtatcattttctgacctaaatccatctgtacctgaggaaattcccgttactgtattgacacaatcatctttcaccaataaatcttcaccatcctcacccacctctacttgatttattaaagtgccatctgactttatattactccctactgaattctgaatgtcacaaccaactgaagcagaggtaggtagttttttattggaatgggtgggattcttagcatgtgctacatctgataacaaaaataaaacttggtgttgacttgctttctgtggtgtagacagctgaagatcagctgctaccttcaaagttgaacaagattctgttgttggctgatccacaggctgtccagtggttaatgaaacactgcctttattcatattggaagtcttagttaaggaggagtgtgaaactggtccattaacagcagctcctttaggcaagataaagttttcactagaaacagtaggagcaccagcatgtataaatagactagactggcctccacttaaggcgttttcagatttgtcctttgacagttcttcaggcagagtcaacgtattatttttctgaaatgatgtttgacaatcttttggcttatgaactccgctctctttgtctgagataaattgttgtcatct

SEQ ID NO: 55446 - DNA, 522 bp, Homo Sapiens
cggcatcttatgtgtgtcttccaccatcctcatggtggcacttttctaggcctgtctcccagcattgtgcaaggctcggaagagaaccaggaagtgaaactgggtgaaaacagaaagctcaatggatgggctaggttcccagatcattagggcagagtttgcacgtcctctggtcactggaatccacccagcccacgaatcatctccctcttgaaggattttatttctactgggttttggaacaaactcctgctgagaccccacagccagaaactgaaagcagcagctccccaaagcctggaaaatccctaagagaaggcctggggcaggaagtggagtgacaggggacaggtagagagaagggggcccaatggccagggagtgaaagaggtggcattgctgagagcagtctgcacatgcttttgtctgagtgcaagaaggtgttccaaggtcgaaattacacttcttcgtccttggagacgcttgttgtgggagcactgggctcatgcctggcacacaata

SEQ ID NO: 55447 - DNA, 782 bp, Homo Sapiens
atcatgaattaaggatgtggcttgaagtaactaaagaaaaatactaatttccttaaaaggaattataattatgatttacattttacatcattaatttcccaaattatatttaaacgtaaggaggtgcacatgagtttttagcaaacaggtatgaataagcagctatgtatatgtgttggggcagaggggagcagattactttaacacacttcagaattaaaatcagttcgtttcatgactctgtgccttaacgttgtgtgaactaaacttgctgatgaatgaaattctgggaagccgaacagtaatagcagaaaatgtgaccaaatgagtatcatgtacttaaatcactgaattttatataagcacaagtattaattttaaaaacattatagtttaataaagctgcatttaaaaatattgggagcaaagacaagcatgctaaatcttcatttgctatggtataagcatatattttggcaacttatttgcaatattctgccttaaagtttcctgaaatttcccccttagtaattcccgaatagcaaaacatttaatattccatgattaggtctattgtgtgtctcactattaaatggaattcgtttttcaaatctttctaatggttatagacaatgttagatcccaaaaaaccaagaaaaaaaaattggggggcgggccggaaatttaaaaattggggggggcagggaggaagggatgtcaaaacgggaagggtgttcccaaaaccggggggttgacacagtgtggtggtcaggcggtaacgg

SEQ ID NO: 55448 - DNA, 447 bp, Homo Sapiens
cctcacaccgcatcgcctatctccgccagcgccccagcaaccccttcgaccgaggcctgacccgcaacctggcccacttcttctgtggatggccctcagggtcctgggagaccctctgggctgaggaggaggaagagggcagcagcccagctgtttagggttgctggaggccgggctaccgtcttgtgcctgaaaaccacggggcctgtccccagctggggtgagcgctcagagggcctggggccctcactcctgcccacgcctcccagaccccagaacggagcttcaagtcagacagatccctgccttggtgggcagttctgccttccaaggaagaaggggaagaaaaggacctgtgggtggctcaggcccaagcagaccccgggctccaccccagccccgcccaggctgctgccagtgcacacttttacaaatttaatataaagc

SEQ ID NO: 55449 - DNA, 611 bp, Homo Sapiens
gcacgaggcggcgttgggtcagggctaggcttagaggtgaagcatcaacatggaaccatctcaggaagccgcatcgcctcttccgaggtcctcacttccaggagcctgtccttgcaagatgcaatcatcgttcctgctttttcattgtcattaaattctgtagaaacccattgtcattagctccaagtgtaaatttgggtcaaggagacagaataataatgggaatctcggagttcgacaccatagtgacgttcagcgtcctctgaattgtgctacatcagcgaacaagtcggcgcttgaattggattttgaggttattttaaccatggaattatttttatagaaggggaaaatgtatgtgaaagtctctatttgtgtatttctctcctaaagttgtgtctctttgggaattggatttgatttttattatttaatacctcactttggcccgtcccccctcccaacacttctgtatcctcgccctgccgccccagcctggacgctctgcgtggaagtgcgtgtttgtagcagctcgggcctcatctcagcgctcggatccctcctgctgccagaatccactggcctctgtctcattcttgggttttcctgct

SEQ ID NO: 55450 - DNA, 745 bp, Homo Sapiens
aaaaagtctagaaaaatacacactgaactgtgaatagcagttatatttagaaagcaacattaggatggacttaagtcagggctcggactagagcaaggcaagtgaggtgccaggatgcaaaagttaaggagacacctgacctcaggggcccacaactgcagagcccctgacagtgagtgtctcagtagcctcgccctagtcctggctttcacttaaatatgttttcgaatgtttgtaataaaatatttcttttggaaggcaaaaatagcaaggagaataaataggattaaaggatactaaagcccattcaataaaatttgtaggaggccactgatttggcctaggctcctatgatgtaaccaacagaccaaaccaatatggagtcattcatgctaaatgaaactagttaggagtatattcatataacaagtggctaagtgtcagttacagcctctgagctttagtcaattgtaggtggtcaatagattcagataaggcaatccagttaaactgtatatcccaccttgctgttttctgtccctaaattctctctgagtacactgcagcccctgaagttctttgaacctgttctgggttctgagggctgtccaattactgaatcatacataaaagccaagtaagattttaaaatttgttataatttttggtttttaacaacttctgttgtaaataataaaagcactaaatccctactgaaaataaagggcctaaaaaaaaaaaaaaa

SEQ ID NO: 55451 - DNA, 564 bp, Homo Sapiens
tggaccctttgcccaccagggttaattcctggtggggcagctcggctgtgatcagggcaaccaaacctataggaagccttccagtgtgagctggaattagactgaacatgtgcttgggcctgcctctccctagacgcagttgcggggcactccagggaatgaaccagctcaagtgtgtccctaacagcagcctggagctacccccaatccctcacagcctgaccctcctcattccatcagatgcatttgtagaatcggggcaaatttccttatttatttatggcccatgcctttccccctcttcatcctgatcccgttttgctttgaagagaccccagtaaccaaaaaacagcctccagaagccaaaaccatgcctggatctcccatagcttctcctttgcttccaggagaaagttcactgaaaaaaaaatatcttctggcttcttgtgtgtacagagacaacagaactcggtggggaaacgggaatcttttctgcaccaaagctgcttctaaagcagaaagcagtggggctcttggtgtttcatgctgccttatttatattaa

SEQ ID NO: 55452 - DNA, 705 bp, Homo Sapiens
ccccgcgtccgggcatgagccctgcgcccggccaagaaagtatgtttttagaggtgtgtgtaagtgcatttgtattacctatgaacaaaattacctgactcttgtcccaggaaagctgtttcgcattttcgctttttgattggtattatccagttctatgtagttcatattattgttctgtctgactctcagaaattacttcttcacgccagtgtcttgttgcatgactttgatgtcacctataggaatacacctcactgcacgtaagtgggtatcttactgtataaaaggtctacatggctttaggttttaggacaaatgtgtagatttatagaccatttctgttggccaggacacagattttgagagctgtgtgtatatatatataatcatgtttgtatttttttcctgaaagttatcaattgcttttgtttaaaacagtttgttttagaggtggggtggggatgtatataacgaggaaaagttatatgtactttaaagtatgtcaagttcttactagtttcctgtactgaaggttcaattttttttatataagtttacttttcacctgctctattctttgtggggaaaaaatgcatctagaaaaacatagtttaaatactgtatataagataatgaaagttagtaacgtccattatttaataaagtttgtaaagtacaaggtaaaaaaaaaaaaagggcggc

SEQ ID NO: 55453 - DNA, 787 bp, Homo Sapiens
gtcagtgccacagaggaggaggtcaccccccagcaccggctctggccattgctggaaaaagactcatccttggaggctcgccagttcttctaccttcgggcgttcctggttgaaggcccttccacctgcctcgtatccctgttgctgactccgtccaccctgttcctgttagatgaggatgctgcagggtccccggcagagccctctcctccagcagcatctggcgaagcctctgagaaggtgcctccctcggggccgggccctgctgtgcgtgtcagggagcagcagccactcagcccctgagctccgtgctgctctaccgctcagcccctgaggacttgcggctgctcttctacgatgaggtgtcccggctggagagcttttgggcactccgtgtggtgtgtcaggagcagctgacagccctgcttgcctggatccgggaaccatgggaggagctgttttccatcggactccggacagtgatccaagaggcgctggcccttgaccgatgagggtcccacgctgaccttggccctgacctcaggagccacgctgtagacattccctctcctggtctctgggtctggcttccaggctctggctgtggatgtcttcagcctctgggtgctggccagtgaggtcccaaatgacccagggcttaagggagaggcgagagaatgatctgggcctcaggggacaggccacctggtcaggaggcaatatttttcctgcactttttctcaggtatcaataaaagtggtttccaactcaagaaaaaaaaaaaaaa

SEQ ID NO: 55454 - DNA, 618 bp, Homo Sapiens
  misc_feature (19)..(19): n is a, c, g, or t
gggaacatgcattcagcangacagtttctcatccagtgaaaagggatcttatgaaacctcaaagcatgaaaagcagcctcctgtatattgcacttctccggactttaaaatgggaggtgcttctgatgtatctaccgctaaatccccattcagtgcagtaggagaaagcaatctcccttccccatcacctactgtatctgttaatcctttaaccagaagtccccctgaaacttcttcacagttggctcctaatccattacttttaagttctactacagaactaatcgaagaaatttctgaatctgttggaaagaaccagtttacttctgaaagtacccacttgaacgttggtcataggtcagttggtcatagtataagtattgaatgtaaagggattgataaagaggtaaatgattcaaaaactacccatatagatattccaagaataagctcttcccttggaaaaaagccaagtttgacttctgaatccagcattcatactattactccttcagttgttaacttcactagtttatttagtaataagccttttttaaaactgggtgcagtatctgcatcagacaaacactgccaagttgctgaaagcctaagtactag

SEQ ID NO: 55455 - DNA, 650 bp, Homo Sapiens
tgggcccgcaaacgttacagtactcatacacccctcagctccaagacttagaccccctggcgcaggagcacacagactcggaggaggggccggaggaagagccatcgacgaccctggtcgactgggatccccaaactggcaggctgtgtattccttcgctgtccagcttcgaccaggattcagagggctgcgagccttctgagtgggatgggctcggagaggagggtcttctatctagactctatgaggagccggctccagacaggccaccaggagaaaatgaaacctatctcatgcaattcatggaggaatgggggttatatgtgcagatggaaaactgatgccaacacttccttttgccttttgtttcctgtgcaaacaagtgagtcacccctttgatcccagccataaagtacctgggatgaaagaagttttttccagtttgtcagtgtctgtgagaattacttatttcttttctctattctcatagcacgtgtgtgattggttcatgcatgtaggtctcttaacaatgatggtgggcctctggagtccaggggctggccggttgttctatgcagagaaagcagtcaataaatgtttgccagactgggtgcagaatttaaaaaaaaaaaaaaaaaaaaaaaacgcgg

SEQ ID NO: 55456 - DNA, 756 bp, Homo Sapiens
  misc_feature (2)..(2): n is a, c, g, or t
tnttctcacattcctctccttctcagcggtgtgatggcagatggacactgagtggggaggatgcactgctgctgggcaggtgttctggcagcttctcaggtgcccgcacagaggctccgtgtgacttccgtccagggagcatgtgggcctgcaactttctccattcccagctgggccccattcctggatttaagatggtggctatccctgaggagtcaccataaggagaaaactcaggaattctgagtcttccctgctacaggaccagttctgtgcaatgaacttgagactcctgatgtacactgtgatattgaccgaaggctacatacagatctgtgaatcttggctgggacttcctctgagtgatgcctgagggtcagctcctctagacattgactgcaagagaatctctgcaacctcctatataaaagcatttctgttaattcattcagaatccattctttacaatatgcagtgagatgggcttaagtttgggctagagtttgactttatgaaggaggtcattgaaaaagagaacagtgacgtaggcaaatgtttcaagcactttagaaacagtacttttcctataattagttgatatactaatgagaaaatatactagcctggccatgccaataagtttcctgctgtgtctgttaggcagcattgctttgatgcaatttctattgtcctatatattcaaaagtaatgtctacattccagtaaaaatatcccgtaattaaaaaaaaaaaaaaa

SEQ ID NO: 55457 - DNA, 638 bp, Homo Sapiens
tgtggaagttgttctagaagttagatggacagtgggagcacattcgtgagtggggcttgggagagctcaaaagtggcactttgattttaggctgggcaggcagaagtctcacagtaaaatatatttcactagacgtccaaaccaacactgcattgtagtaacctcttctgaagtaactggttaaattaataactggtcccataagtcagggtcaagccacatttataacccattcgggccggccatgaagggttctgactcgacattggtatttaaatgctgttactttcccaatgcttagtagcacttgagactttatttccatcgacaaaaaccaagaaggccacagaagtagcctaacagtcctccctggtcatactcgtttcaaacaggtctgcctgtctagacatattcaggcaggaggttgcttgctgctatcttgaaaaccactggaagattcagcttcttggggacctcagagcccatattcatatggaagcccacccatataagcctcacagagcaaatcacagcaatgttgaagttgttattttcaagtgcttatttcacgacattaaaaaaaatattttttcctggtgtattaaaattaaaaataaaatcataacttttgatttaaa

SEQ ID NO: 55458 - DNA, 785 bp, Homo Sapiens
cacgaggctttttgagttacaacaatattttagtttgcctcatctgtagaggtaaaatttctatattaccaagctccagaggaatatgatattttacaggcacaattttctggctgtagtccctggggcattcatttgctggcctccatgggatgctgttagaacaattgttagccggcaagagaagaaaggctaccaggacagcatttataattgtagaatgggagccttcttccctctcccctccactttcattttagcatgagataaaaaaatagattggaaatgattgttgcatctcacttcatggaagtaggggcagaagttccctctggatccttttcttgacaagcagtcaagaggaaggtccccatacacatgtacctgtgtgatacttggtagtttctaagaatggtgctacataagcgttgctgttaggctgggatcctattaatgaacgtttgattagttcaggcctcccaatggcaaaggcagacaccgtggagatggacatttactgactccccttctgtgtggcttcggtctccctggctaacaccacacctgtgcgtactgcgctcggcccactttgctgcagaaacgtagcaagcgtttcatgtcagggctacagctgagagcaaaaactgcaaaaaaaaaaaaaaaatgtctcattgaatgccagttgtctgatacaaatgcagtgtcttttaagtgacagaaacacacctaaatacccttgcactcagctcgctagcattttttttttgagtacttgagataaatca

SEQ ID NO: 55459 - DNA, 1072 bp, Homo Sapiens
aaaggtttttgaaaaagctggggacactattttgtcttttagttttaaacttttttaaggcaaagcaagctccccaatccctgttctccaatatgtgtatgatgtgacttccatgtagatataaaaatgattgtgccctaaccaaacttcctcagattgtgcactgtttgtttaaaataatcacgtattttagtctgatgctgttgtattttttcattttatttaaaacactacttacttcttattctcttaacaaattttaaaaggtagtgatcttaaaaaaaaaatcactggataactaggaaatatttttgttgttgttttgtttcttaaagagtacagaggccattgaagccttttgctcctcttaccgtgaaaatgaaatgttagccattgtatggctaggaaccaatgcacttggcagttaatggatctgctgttgctggagtgtgagcgtggacttgatgcagtgatgacaaatcattgcttagaattaatgttttcaaatgtgcaactctagtttttaaaacaaaatttggttctttacattcattatttcgtttttgtttccctttagtatttaatggtctttggagaaaaataataaaacagagtgttatatatatattttttggtgcaagataagattttctgttttttgaaataagtctgtagcataaaggttaaactattttaggacaaaataaattagagtgtatttaaaccataaaaaaaaaaaaaaaaagggcggcccgctctaaagtatccctccaaggggcccaggcttacccgtacccaggctttcttggaccaaagtggcccctaaaagtgaggcccgaattataaacctcaagccctggcccggtcgtttttaccacacctcctggactggggaaaaacctgcttaaaccttggggaactctttggtgaaaggaaacccttaaacttcttggtggttgggggaacttaaattttgggaaaaaaactttctcttttcgaggaaattttaaaaagcctcctccaaggggtaataataaaaaaacattttttttataaaggggcgtaaaaaggg

SEQ ID NO: 55460 - DNA, 536 bp, Homo Sapiens
cccatgaataaatagcaggttcagtagttgaggagtggagtttagtaggtttgttttcagtataaattagataacatgtggaggtcacagcattttggaaattgagtgtccccaagtgagctttgtttataaactttcaaaatgtcggaagtggacaggtttgttaaatcttgtctgccagcacccttttcttcctttgttccttttcctctctgtgttattgcctgcggcagccagtccttcatactagatagagttcagataaagcaaacgtttggcaaaaacatactgtttgacctcctccccctctgcttatgaaggggtagcatgattctgtgttttaaagcagtgatgtttcagctgtgaaatgcactcgctgtaagctctaggctgagtgcatggaaactgttacgcttctcattttatgtgatctcctaattggtatgtagcaaaaattttctaaaactgttttgtggcttgttttgtaataaaaccatgtgaaatactgaaaaaaaaaaaaaaaaaatcgctaatcg

SEQ ID NO: 55461 - DNA, 599 bp, Homo Sapiens
atatatgacattatttgatgtacataattaccaacatccaaaagcgtttcttcccctttctacgtgtgcactaaattctaaaacaaaaattggaatacaaaatgcctaataaagaaaaaattcatgtacagaaaagcaaaagataatctactttgttaagataatttgtcactagctggttgaataatgcacagtttttgtttaaggttacacatttatgcctggattaaataacaatagtaaaacttgacaagtcttttgaaaaacagctgctaaacatattgctttctggaatgtaatcattagcaacaaatattctcttattctatacaattgcagaatgctagtggaactttcttgtaggttatttgacaatgaatgttaattgatttattttttaaaaatgtaaaatcctcttatccctttaaggccggtttaggctttcatgtccctgtgatagaaaatttcaaatgctggcttctaatttctactcactgaagtgtcttccagacataccagatggttggagctcctttgatagtatataagggagctacataaatgtatttgaactaactcgtgagcaaaatttctgtttt

SEQ ID NO: 55462 - DNA, 680 bp, Homo Sapiens
  misc_feature (638)..(638): n is a, c, g, or t
  misc_feature (656)..(656): n is a, c, g, or t
agaatattctgtggtgccagtgcacactaccttcccacccatacacatccatgttcactgtaacaaactgaatattcacaataaagcttctgagtaacactttctgattactcatgataaactgacatggctaactgcaagaattaaatcttctatctgagagtaataatttatgatgactcagtggtgccagagtaaagtttctaaaataacattcctctcacttgtaccccactaaaagtattagactacacattacattgaagttaaacacaaaattatcagtgttttagaaacatgagtccggactgtgtaagtaaaagtacaaacattatttccaccataaagtatgtattgaaatcaagttgtctctgtgtacagaatacatacttattcccatttttaagcatttgcttctgttttccctacctagaatgtcagatgtttttcagttatctccccatttgtcaaagttgacctcaagataacatttttcattaaagcatctgagatctaagaacacaattattattctaacaatgattattagctcattcacttattttgataactaatgatcacagctattatactactttctcgttattttgtgtgcatgcctcatttccctgacttanacctcactgagagcgcanaatgcagctttatactttttactt

SEQ ID NO: 55463 - DNA, 633 bp, Homo Sapiens
ctgtcttactgagagaagttgttaaagctttatacatgttgaccccatctaaagctggggaaaatatacacttgatgaagtaggtgtctttgtatttatttcttttggggtcatagaggtaagcttttttgtaaaatctctactcttcctgagagttttgagaaaaactggcaggaagaacttataatccccaaatagaagataccacgtctgttcaaaagcaggtattgctatagagcagcacccaggaaatatctgtgggtggcagccttggtatagaggtgtcctgtcttcatgagtgaagttacttgcctgattaggtgctggaaggtattggctccctgttttggtgtggactcatggcaagctggtgtttaagaggtcaggaggcctgctgatctttcaaaggacacccatgatgtctactcatagaaagggcaagtaacgtgttcattttggtcttgaatgtccaaactcaagggttggattttggccaattgaaatcagacatatgcgatcttgggtttttgcatggaaattaatgtaatgcttataaatgaaaaatgaaaacatttcaaccatctaagtcaaacacaaaaataataaaaaaagaaacataaaaaaaaaaaaaaa

SEQ ID NO: 55464 - DNA, 710 bp, Homo Sapiens
ggaaagcacagttttaataactgattaagaaacagctactacattgattatatcaattatagtcatgtcataaagcttgttttcagaagaatagaaacttcaagtagaatatcagattttaaaaagcattttattatgtattatgaaatatttcaaacataaaaagatgtaaagactatctaccaatgactccccccttaataaaacaaattaacctgaaggctgttttgtgcccctccttgattgtgcattcacctcccaacccctcgctccttgggcaactgttatctttgttatttgtcattgccttaacattagatttttttattactgcttttgtaattctaatgatatcaaatggaaaaaatattttgaatgcaactcctcttttaatttgctccaattttatctgtattttttagtccatgcctgtattataagtattataaatactatctgtatatacttttgctaaagtcgtgtgtatttgttaaactgatgatacagcttcataagattttaggtcagctatggattgtcaatattttgtttagaatacttaccaggttataaattacaatttgaaacatagatatcctatagtttgagaatttgaacatagatatggattatgttgaaatcgactgctttttcttagctatgacagtataactatataacaacagcaaaaaaaaaaaaaaagggaaacc

SEQ ID NO: 55465 - DNA, 678 bp, Homo Sapiens
  misc_feature (544)..(544): n is a, c, g, or t
ttttttttttgtttgtttgttttgttttatgaggtgaagtctcactccagcctgagtgacagagcaagactccgtcaaaaaaaaaaaaaaaaaaaaaagaaatgatatctggcccccccttaacactggagccccactcccttctcccatccggcccgagattagggaggattgactgtgtcagggatggcgggtggcctctctcgctgccagggcccttgtcagagcagccaggctggacagacggcctccctcctctccatctgaccggcacctgctgcttcggggcttaggccaccgctccctgtccccagaggagatagccccagatggactggaatgttgtggcatgagagcgcatgtgtgcgatggccccgctgtggtcccctctctgtccctccatctgtatgtgttctgtgtcccttgcatgtgtgcgtgttagagtgagcgcgtatgcatcaactcattgggctcttggctgctcacaaggcaaatttgacttggaaagactttcatctccttggaaccaagacttcctgagtcnccctcaccctggccctgttccaccatggttatctgggtattggggaatggaaactttgggggagtgactttttaaagagacacttataatttctactactgcactactgtccattgtgggatgattaaacatgg

SEQ ID NO: 55466 - DNA, 1570 bp, Homo Sapiens
cttaaaaagttgcagaaagaagaaaggaaagggaaagaaaagtgttcagaaatctttatatggggaaagagacattgcttctaagaagcccctcctcagtcctattcccgagctgcctgaagtccctgagatgacaccttccattccgagcatccgaagactgggttcaggttatttcagttcaaatggcaaactggaagaagtgaagactcctaaaaatccagtgaaaagaaaggatcttttgcgtcatgacccagatttgcatatgcatcaaggctatgataaatatgatgtctctgaattctgctctgatataaaaagttcctcatcgcttggcaatgctacttctgatgaagatccaaatacaaatataatgaacattaatgaaaataaaaatattccaaaagcaaaaaataagtcagaaagtgaaaatgaaccaaaagctggaactgacagtcctgtttcttgtgcttctataactgaagaacgtgtggcatcagatagtcccaaacctgctctgaccctgcagcagggtcaagaattttctgctggtggtcaaaatgcagaaaacctttgtcagttctttaaaatttcaccagatttaaacataaagtgtgaaagaaaggatgacttcttaggagctgcagaaggaaaactgcaatgcaatcgtttaatgcctaattcacaaaaagactgtcattgtttaggagatgtcttaattgaaaatacgaaagaatctaaaagccagagtgaggatttgggaagaaaacccatggaaagtagcagtgttgtgagttgcagagacaggaaagatagaagacgttccatgtgttattctgatggtcgaagtttacatttggaaaaaaatggaaatcacacaccatcctccagtgtgggcagctctgtagaaattagtttagaaaattctgaactgtttaaagatttgtctgatgccattgagcaaacctttcagaggagaaatagtgaaaccaaagtgcgacgtagcacgaggctacagaaggatttagaaaacgaaggtcttgtatggatttcacttccacttccttccacttcccaaaaagccaaaagaagaacaatatgtacatttgacagcagtggatttgaaagtatgtctcccataaaagaaactgtgtcctccagacaaaaaccgcagatggcacctcccgtctcagatccagaaaacagccagggccctgctgctggttcttccgatgaacctggtaagaggaggaagagcttttgtatatctacacttgcaaatactaaagccacttcccagttcaaaggctaccggagaagatcctctcttaatgggaagggagagagctctctgactgccttggaaaggattgaacataatggagaaagaaagcagtaattgacatttcctgcagagtctgtagcaagagggaaagtaaccatctatgctgaaatgatctgtctagttcccattctctgttcaacctcagtgtttcaaaagttcctaataaataaactcatttgagttgaacctacttttatgtagaaataaataagtttcttcatcatt

SEQ ID NO: 55467 - DNA, 881 bp, Homo Sapiens
aaactgtaatgccctcacagaactaattttactaatacaatactgtgttctttaaaacacagcatttacactgaatacaatttcatttgtaaaactgtaaataagagcttttgtactagcccagtatttatttacattgctttgtaatataaatctgttttagaactgcagcggtttacaaaattttttcatatgtattgttcatctatacttcatcttacatcgtcatgattgagtgatctttacatttgattccagaggctatgttcagttgttagttgggaaagattgagttatcagatttaatttgccgatgggagcctttatctgtcattagaaatctttctcatttaagaacttatgaatatgctgaagatttaatttgtgatacctttgtatgtatgagacacattccaaagagctctaactatgataggtcctgattactaaagaagcttctttactggcctcaatttctagctttcatgttggaaaattttctgcagtccttctgtgaaaattagagcaaagtgctcctgttttttagagaaactaaatcttgctgttgaacaattattgtgttcttttcatggaacataagtaggatgttacatttccagggtgggaagggtaatcctaaatcatttcccaatctattctaattaccttaaatctaaaggggaaaaaaaaaatcacaaacaggactgggtagttttttatcctaagtatattttttcctggttctttttacttgggtttattgctgtatttatagccaatctatacatcatgggtaaacttaacccagaactattaaaatgtagttgtctcagtccccttccgggccttctgaaatgggcaagtgcagtgaaacaagtggc

SEQ ID NO: 55468 - DNA, 896 bp, Homo Sapiens
  misc_feature (883)..(883): n is a, c, g, or t
atcattgaagaggaggagcgagtggacattctaatcaacaacgcgggtgtgatgcggtgcccccactggaccaccgaggacggcttcgagatgcagtttggcgttaaccacctgggtcactttctcttgacaaacttgctgctggacaagctgaaagcctcagccccttcgcggatcatcaacctctcgtccctggcccatgttgctgggcacatagactttgacgacttgaactggcagacgaggaagtataacaccaaagccgcctactgccagagcaagctcgccatcgtcctcttcaccaaggagctgagccggcggctgcaaggctctggtgtgactgtcaacgccctgcaccccggcgtggccaggacagagctgggcagacacacgggcatccatggctccaccttctccagcaccacactcgggcccatcttctggctgctggtcaagagccccgagctggccgcccagcccagcacatacctggccgtggcggaggaactggcggatgtttccggaaagtacttcgatggactcaaacagaaggccccggcccccgaggctgaggatgaggaggtggcccggaggctttgggctgaaagtgcccgcctggtgggcttagaggctccctctgtgagggagcagcccctccccagataacctctggagcagatttgaaagccaggatggcgcctccagaccgaggacagctgtccgccatgcccgcagcttcctggcactacctgagccgggagacccaggactggcggccgccatgcccgcagtaagttctagggggcggtgctggccgcagtggactggcctgcaagtgagcactgccctgggctcgggctggttccgtctgctctgctgccancaagggagaaggg

SEQ ID NO: 55469 - DNA, 704 bp, Homo Sapiens
gggttttgcctgttgcccaggctcgtcttgaacaccggggctcaaggaatctgcccatcttcgcctcccaaagttctgagatagcaggtgtgagtcatcatgcccagcctccttgaagtttactaacaattgggataactgagggaagagaagtgacaattccactcagtctattagaggtctggatataaggtagccacacaataactctaacttgacttctaaccattctatcttattgatttggaggctgtcttctgccagattttttgtggcttgagatgatattttcgaacccttctttcactacctttcttacccttaatgtgccaagcttgaaacaggatttgatttcctgagctacttgttcgccttctgtgcgtcaccaagtaatctggttcatctttcgtctcattcatgttattttcaagtgaaacaagacattttgggggtcaagtctctttgggtgttttgtttttatgtatataaaaatggattttgtgttccctttccatgtaagtaccaacttatatggaaactcacaatcataatgtaaagaagaaatgaaagcctggtgtattgtacttcaagatgcctccctgatgtatagaatctccttgtaaaataaataattgcattgtatatcagtcttcccatcaatattaattattaaatattttagaatttttaaaaaaaaaaaaaaa

SEQ ID NO: 55470 - DNA, 682 bp, Homo Sapiens
ccccgcgtccgtaagatcaatataaattactctgcttttcgactcattcaggtagcattgtacctgaacctgattgctactttttcatcttaaatattatatttcctcatctaatctgccttcccctcatccacagacatttggagaaggaaatgggagggtgtctgttatccctttctctttgctttgtccccgttgttagactggcagcgtcagttgctcggtgggcttggttagagccgtgggtgaggcaggtggctggcggggacagggagaggctgagagggaagtggtggcatttactgctctgacacttccactgtccctgctggggatgctggggccaaggcctgtggggcctgtgaactgcacagccaggagcaaggaacccactaaatactccgtcacctccatgtcccctctacagtgttaaattattacataagcaggtgaaaggtagaaggcgaattatgtgagtaaatatggtctgttttctcttcagcaaaaatgactatttttgtgtgtgactaatttatttttattattgtaaagatacaataaaccggttgaaatatctgctttgttgacaagcgtgtgctttctctggccttattcgcgttctgttctcctgcaaatagcgccctctaaaaagaagagtcagacaataaactggttgaaatat

SEQ ID NO: 55471 - DNA, 1104 bp, Homo Sapiens
  misc_feature (679)..(679): n is a, c, g, or t
  misc_feature (703)..(705): n is a, c, g, or t
  misc_feature (707)..(730): n is a, c, g, or t
  misc_feature (733)..(739): n is a, c, g, or t
  misc_feature (741)..(754): n is a, c, g, or t
  misc_feature (756)..(758): n is a, c, g, or t
  misc_feature (760)..(760): n is a, c, g, or t
  misc_feature (766)..(766): n is a, c, g, or t
  misc_feature (779)..(782): n is a, c, g, or t
ggtcggatttcgggaatcgtcgacccacgcgtccgttcaaagttgagctgtatttttgttttacttttgtaattatatacacaacaaatgtattaataactaccttgttaaacaccttttaatagcacaaggtttttatatttgcaagctgttgatatctttctaaaactgtttaggttatagtctattgatactttttatatacaattttataaatataaatattataattttatattaatggtaccaaaaatacatttcttaaggttaaaagcatgcacttccatgcatacttgcttttggggagagtggggagaagacattctaataatcagtttgtgaaatagcttctgttggaaaccttttgaggggaataaggaatggtcatctaaaatgagagattctggattttaatgcagttcaaagttgagctgtatttttgttgttgatttatctggattttttttaaagccttctaaaacccagtgaattcaataccttaattagtacatactatcttatgtaatgcataaagcaatgccagtcactgagaacatttaaatatatttatattcctggagatacacattctcatttttgttggtttattataaattattcttctagatgcatcttttataactaggatttcattttgtgtgtatagcttatgtaatanattttaaaggtgaaaactctcttnnnannnnnnnnnnnnnnnnnnnnnnnnccnnnnnnncnnnnnnnnnnnnnnannncncccacnccccccccccccnnnnaggggcggcccctcaaaagattcccctcgagggccccaagttttaccgtaccccattttttttggaaaaagggccccctaatggggagccattttataattaggcccggccccctctttttaaaccctctggactgggaaaaacgtgttacctgggacatttttggaaaggaacctttccctttggggggggggcccaaatgtgggacccacctcccctcccggaatttttaaggctttcaaggggaaaatataaaatttttttaaaaggggaataagaggggttaaaaaccaccccgcgcaaaacgcctcgcgccgcccaa

SEQ ID NO: 55472 - DNA, 618 bp, Homo Sapiens
agacagtttgacatcctccacccttagaaaatgactgacattgttttgttactgctcctacccaccaaggggataaagaaggcgagttctgagtgttggatgagtcagtcgcgtggaaggacgtggagcgtggcgctctgtaacttcctgccgtctgccaccccgccacgtgtatttaaccctcgcactttctccactgtggagatggctggggcggcgccccacagtgtgtattcctgtcctctatgttagagtgcatcagaagcacatttactgtgctatctatatctctatataaaagtgttttataaaaacccagaataggagcacgacgcatgattggtgtttgaggcgtttgccagctgggacaaactgcgtttggagctgtggttaagctgactaaggaggcggtggctctttcttaacattcccacgtgcccagggctgttcatgcaagattttaatggtgacttgtcctggcttactgggacagtctgtatgaggcatgtcaccacactgtcgcctcatagctgcaagagagaggcaccagctgaagttcccctgactgaagagagcctgtggccatgtaaaaagagaattaaactcttgttgcttttt

SEQ ID NO: 55473 - DNA, 757 bp, Homo Sapiens
tctagcgaggtgacagcgtagaaccagtagagcacttccttcagcacacttttttgccttcagttttcattttttataaaatgagaagactaatgataaactgtagaaatcaaaatttattgagaaatctgtttctcctaacagatagtaaccctgccatgatatactacttcaacaatgttataaaagttatgtgataatatacattttaacctgggatttctaaattgctttaacaaatgctaatcctgagagttgccctgcaggactcaaaagggaaaggttttgggacgtggcagaaccctgcagggacatggaattaaggccattgcaatgtatcatctttgtagcattgtcatcactcctaagctgccttcacagttttagtacactaagatgaggaaatcgaaaatgggcagagaaagctcatactgtataattgaagacagtgacagagaacgtgtcagttatgccaaaactcttttgatttctgttccaggatttccaacaagaggggaaaggaatgacttgggagggtgggaaagacattaggagttgtttttattttttaccttggaagctttagctaccaatccagtaccctcctaactagaatgtatacacatcagccaggactgactgactacttcattagagatatactgtactcattggggggccttggggggtactggctgttcttaatgtggggaattttaaatgtttgtaaatggtattggcatccttaaatggaatt

SEQ ID NO: 55474 - DNA, 989 bp, Homo Sapiens
gcaaagatttgctcaaaggagaagaatcgcatgagtgtgaaaagtagatgctcgtagccagaacagaaaaggttacacatgatcatggcacagaagataggaggtttgacttggtgggccataatgtttattatcctttttgaaataacagggaccagcagcagttttctcaggataaatgctctaccccacttctctatgaacaggtgtggggaggcttactttccattttcatatttatacacctctctacaaaagcaatttttaatgaaggttagtggaattgttaaaaatctgagaggaatgatgactggaggtgtttggggtttttttctgtattcattttttaatgagaaaagttttaaatgtagtacaggttagacccaactactaccttactattataggacgattctatgtttctgttaaagtattcaagtagctttctctgggggaaaaagtaccacttggacacttaaaggaattgggatttttgtctactttggataaggcagttgacttcttaagtaaaagcaatagtgtacaactgtcattccgttcggaatgttaagtgagccaattaaaaaacatgttgaaattggtacaaggaagaagagaagagaaaaagagagaacttgagggggcattatgggggggggcgaaaaaaagggtgtatgcgacatagggaaagggggaaagggaaggagtccgatgaaaaccagaggtagcgtggcaaccaaccgggggacaacatagcagcggggaaaccaccacaaagagggggagccagacaaaaaatagcgcaaaaaccccacgggacaccgcgcgaatatggaacccgggcaaaaagcgggtagaacagaacgcagaaaggagcacgacaacgacggacgaccgagagcaacggaggagaggcagagagacaggagaaaaaaagacaagagaagagaacaaagagaacacgcagtaggcacgaagtacaagacagc

SEQ ID NO: 55475 - DNA, 550 bp, Homo Sapiens
actgttgagaggagagcagtgtgagagtttttctgtagaagcagaactgtcagcttgtgccttgaggcttccagaatgtgtcagatggagaagtccaagtttccatgcttcaggcaacttagctgtgtacagaagcaatccagtgtggtaataaaaagcaaggattgcctgtataatttattataaaataaaagggattttaacaaccaacaattcccaacacctcaaaagcttgttgcattttttggtatttgaggtttttatctgaaggttaaagggcaagtgtttggtatagaagagcagtatgtgttaagaaaagaaaaatattggttcacgtagagtgcaaattagaactagaaagttttatacgattatcattttgagatgtgttaaagtaggttttcactgtaaaatgtattagtgtttctgcattgccatagggcctggttaaaactttctcttaggtttcaggaagactgtcacatacagtaagcttttttccttctgacttataatagaaaatgttttgaaagtaaaaaaaaaaaaaaag

SEQ ID NO: 55476 - DNA, 764 bp, Homo Sapiens
  misc_feature (44)..(44): n is a, c, g, or t
caggggccggtgcgtaccgggtccggaattccacgggatctttntggggcctgttctaagtgcaaacccagcaagtttcacttgtcctgtccattagatacaactacatcttgcgggggttgtttctttcttgttccacaatgaattgcacatccatctccatcagagctgatagcctgttaataagcactggtctaacacagccaaccctcctccacagcgccatattaatggaggaggggaggaaggtgaaatctactgcatgggattcaggaaacagttgtggttggtcaggacggaagttggggtaagtttggttggtcagagggagttgtgctggagattgtgaaaaatgggttcttgaatgatctactataaggcagggaaggttcatttgtaagtagtaatgtgaactgaattgcattaagagtgtgtggcctttgttgtgatatactatgtattttcttatatgcatgagccaaactgttgcatcataatttagcactgatgtctgcttttattttgatcatctttgtccacccttattagttcttggctgttaaccgtagatagatcttgtaaatccagcaacctttggttgctgcattccccttggttcgattccacgcaaggagccacaagtgagaactccactgtccttagaagaaagggcatttttacttttgaaccaaaaagagaaaaaaaaatcagaagtgttgcatcttgaggcgaattaactgtaagacatttttaattatgactac

SEQ ID NO: 55477 - DNA, 481 bp, Homo Sapiens
ctgaggcaggagaattgcttgaacccaggaggcagaggttgcagtgagccgagatcatgccattgcactccgactctgggcaacagagcaagactctgtctcgggggaaacaaaaaaaaagtgtgctttgtcaagagaagcaccagcagacctctaagaactgctctctaaggctgcggtagcaaattatctactattgcaggtgccttattggtagagggctctgaagagccaaaactgtatatgcaacacttgtaagataaaagggactttaataatcaagattttcttgaagatttgttagaaataatgtcttatttctggtaacctttccctttttgtatttataactctactaaccaaattacctatcaataaaccattactataatattttaaaacaacctatgtttatcaagcttactctctgagtgacagaatatactaaataaagaattttttaatgaaaaaaaaaaaaaaa

SEQ ID NO: 55478 - DNA, 552 bp, Homo Sapiens
  misc_feature (550)..(550): n is a, c, g, or t
  misc_feature (552)..(552): n is a, c, g, or t
ggtgttttatttccaaaaaatgtatacaatatcagaacttcacattttatatactagtatctggctattagtattttacaggaaccatagttcttggtgactacatatatatatatatttttgtgaccttttttgtaaactaagtgccgtttcaacgttacaatcatttttagggttattgtaatcaatgtgaatatcatgttttttcaaatctgttctgagcctatagtgtttgctttgtgaacatgtgtattgtatatattctgtatagttatattgtactgaaattagcttgtttgatataaggaaaatatgtattgagtacctttttgctagcctgattgtttaatctttttaaaaaaggtttaaactttttttaaaaaaaaaatctttaaactggcctttattacatggtcacacataaagttgcagttaggaaagggatgggcagggaaaaactagttttgagtgtctttagatagaaacatgagactaaggtttgattttgttttcgttttctcattaaaatatcttatgctttatggaaaanan

SEQ ID NO: 55479 - DNA, 655 bp, Homo Sapiens
  misc_feature (622)..(622): n is a, c, g, or t
gccaaagccctggaatcaagggtttccacgtaccctgcctaatacccgacgtagctcttgatgcaccgtccttgtgctgtggctggcggtgtctcagcctgaaacataaaccccacatgccccaggagcgatgtgctccctgaaacagacaaccacacgctgttggggagagaaggatggagataggatggagataggatggagatgtggctcttctcatctttgaagccagcagggcatcccggagcaggaggctggccgggctccccaagcgaaggcgttggtgtctgtcattaggtgtgtgttagggtgcagcaccggccgtcacaggatgctgataagcgcgctgagaggtggatgaaacaccaaagtctgtttccccgtccgcagtgggtgttgcctctttgtgtgtgtcccgatgttcctgcctgtgagtcggccttactccgtttccttagcgcccatgacacgccaagtcccgtttcgcactcggcttctcacccgcccagctcggctagggagggggagtttttagcacctaatatgcttcctgccattgcgcaatctgagcctgagcaactggaaacccccatttctcattagtgcaatgtcatatctgatnccaggaagcctggaaaataaaagacgatgcatt

SEQ ID NO: 55480 - DNA, 817 bp, Homo Sapiens
cgatgatcggagacatcctgctgttcgggacgttgctgatgaatgccggggcggtgctgaactttaagctgaaaaagaaggacacgcagggctttggggaggagtccagggagcccagcacaggtgacaacatccgggaattcttgctgagcctcagatactttcgaatcttcatcgccctgtggaacatcttcatgatgttctgcatgattgtgctgttcggctcttgaatcccagcgatgaaaccaggaactcactttcccgggatgccgagtctccattcctccattcctgatgacttcaagaatgtttttgaccagaaaaccgacaaccttcccagaaagtccaagctcgtggtgggtggaaaagtgttcgccgaggtgtgcatggtttcccagccacgtccctgttttcaaagatagtttcactttggtctctgaattgaaatgctgtctactgaaagggtttcaggagcgtttatgtaaggggctgtgatgaaattgcattccccatagataaaagaaaaatcatttctatccagagatctgagcagaaggattggcttgttagtttaacacagccgtatttttggacattcagtgttacttgctgagtctgacagcctctgggcccggccaggggccctgttaacaaactgctttcacatcccaacagggtctgcttggccactcagtgcagctgcgattaaccctaaaggctttaaggaacgggccacctgtaacagagacaccagccttcctgtatagacactaaattgttagcaagagtgttgagctagttcctggtgaagtgtttc

SEQ ID NO: 55481 - DNA, 532 bp, Homo Sapiens
gtcagcttcattatttggatgtattgcattcaaagcagcagttccaaacataacacacatctattttcttagagttttgtaaatacaaactaacctgatgacattaaaaattgtggatcctacatgttcctatgttcattctctaaaaacctgagtaactttatgaaaacacacaaacctggaaaaacatcacatttttgtcacatttttactgacaaatgtatattcatatgatggtacggcagcagggagtggcccccagttaacatggctgtgagtggacacagtgtctcgcaggatcactgcatgttatgatggcttgtaagtgcgttgttaagacttttgtttcagtgtttgtctcccagtatttgaacctaatttaaagaaaaagacgtttccaagttgtatttattaaatgtgtttttccttaccttttgtgctgctactttgctaatctcattagcttagctgtgtttgtgcataggttatatttggtaataaatttatagagtgttggttgtcaaaaaaaaaa

SEQ ID NO: 55482 - DNA, 614 bp, Homo Sapiens
gacgtccattactgacagctgtgctgtatacagagtcaacaataacaggggcaatagtctgaccttgattgaccttcccggccaagagagtttgaggcttcagttcttagagcggtttaagtcttcagccagggctattgtgtttgttgtggatagtgcagcattccagcgagaggtgaaagatgtggctgagtttctgtatcaagtcctcattgacagtatgggtctgaagaatacaccatcattcttaatagcctgcaataagcaagatattgcaatggcaaaatcagcaaagttaattcaacagcagctggagaaagaactcaacaccttacgagttacccgttctgctgcccccagcacactggacagttccagcactgcccctgctcagctggggaagaaaggcaaagagtttgaattctcacagttgcccctcaaagtggagttcctggagtgcagtgccaagggtggaagaggggacgtgggctctgctgacatccaggacttggagaaatggctggctaaaattgcctgagaggcagctctaaagcacaagacctggatgtgtgacacacagttttggaaaaaggtctgtggtagtctggagttga

SEQ ID NO: 55483 - DNA, 715 bp, Homo Sapiens
  misc_feature (707)..(708): n is a, c, g, or t
ttttttttttttttttttaaattttatattttttttccagccaactcaaggccaaaaaaatttcttaatatagttattatgcgaggggaggggaagcaaaggagcacaggtagtccacagaataggacacaagaaacctcaagctgtgaggtcaatttgtaattaaaagaatactaagattagatgaacacaacactcagaaatactctaggagagctgaaaaagaaggaacagatgttaacaaaacaaattaaggctgctggggaacctgagtccatgttaagcttgggttgactgtaaagaatttttttttttttaatgcaagttagacatggagttagagggtcagataaataacgaagagaattaagttagcgatagaaagatctaaggatactagctcctgggcacctagggtgcaaactgacttgtggcagcataagctgatgctgcacaggggacccaagccatgttgctacttgtcacttaaggcaggaagcgcacaaaggaagtgatgaaaggttattagcctgcaacattatttacagcatgagagcctctcctacggttctcaaccttcattaggcactactgtgatctagtgatggttgtaacccattctttaaaggcaaagatgtaagatttacagggaaaagcttcgggttttatcaattcactatcatcaaacacatattgagttggttaannaaaaaaa

SEQ ID NO: 55484 - DNA, 712 bp, Homo Sapiens
  misc_feature (682)..(707): n is a, c, g, or t
tgtgaacatgaaactaatgatccagaagacttgcatagccatgtggtaaatgagcatgcatgtaaattaatagagttaagtgataagtataacaatggtgaacatggacagtatagcctcttaagcaaaattacctttgacaaatgtaaaaacttctttgtatgtcaagtatgtggttttcggagtagacttcacacaaatgttaacaggcatgttgctattgaacatacaaaaatttttcctcatgtttgtgatgactgtgggaaaggcttttcaagtatgctagaatattgcaagcatttaaattcacatttatctgaagggatttatttatgtcaatattgtgaatattcaacaggacaaattgaagatcttaaaattcatctagatttcaagcattcagctgacttgcctcataaatgtagtgactgcttgatgaggtttggaaatgaaagggaattaataagtcaccttccagtccatgagacaacttgattattctctttaacttacagaatgttagtttaaaataataaattcatcctttttttggagatgactaaatggatgattgtaaacacaacttatgaaatctgcctttaacaagtaacttttttaaattataaaattttattggcattgctccattttctgtatataaatatatctttaatgtggtaannnnnnnnnnnnnnnnnnnnnnnnnngggcg

SEQ ID NO: 55485 - DNA, 796 bp, Homo Sapiens
caggatcgtgcaggatacagcaccacccctcaattattactgggttcctatactgacggtgatcgttggctcctacttgattgcacacggtttcttcagcgtctatggcatgtgtgtggacacgctgttcctctgcttcttggaggacctggagaggaatgacggctcggccgagaggccttacttcatgtcttccaccctcaagaaactcttgaacaagaccaacaagaaggcagcggagtcctgaaggccccgtgctccccacctctcaaggagtctcatgccgcagggtgctcagtagctgggtctgttcccccagccccttgggctcacctgaagtcctatcactgccgctctgcccctccccatgagccagatcccaccagtttctggacgtggagagtctggggcatctccttcttatgccaaggggcgcttggagttttcatggctgcccctccagactgcgagaaacaagtaaaaacccattggggcctcttgatgtctgggatggcacgtggcccgacctccacaagctccctcatgcttcctgtcccccgcttacacgacaacgggccagaccacgggaaggacggtgtttgtgtctgagggagctgctggccacagtgaacacccacgtttattcctgcctgctccggccaggactgaaccccttctccacacctgaacagttggctcaagggccaccagaagcatttctttattattattattttttaacctggacatgcattaaagggtctattagctttctttccgtctgtctcaacagctg

SEQ ID NO: 55486 - DNA, 553 bp, Homo Sapiens
gtatctttatatctcagctgaaaatattacattctaactccccaaagctattctcacattatttgcaagtattttttcatagtttacatgtgtgtgtatttgtttaatacattccacaagactgaaagtcttggtgagggcaggaactctgtctaggttgttcatctggcagccagcaaacccaaaataagtattagttgaatgaatagctaaatagatgagccatggggtagcatatctgttttagctactgcttgcctgttatcatcctgggatgctgcttgcttctccgtgatctcttcttgttcttaaattgtcttcagttgtagtactaagtactaatttgatctgtaatgtgatatgtggctgaagtttgctctgtaaaatcaccgtttcctgaggtatattcaatacctttaatttttccataaatctcttcaaggtttgtgtgtgttttcttttaaattatctaactagttggatgtatgcttgaagtgctagacaataaaagtttcaataggctaaaaaaaaaaaaaaaaaaaaaaaaaaaaaa

SEQ ID NO: 55487 - DNA, 678 bp, Homo Sapiens
ctagttctagatcgcgagcgccgccctttttttttttttttcttgttttgttttgttttgactgcactgtgagttttgtagtgtcctcttcttgccaaaacaaacgcgagatgaactggacttatgtagacaaatcgtgatgccagtgtatccttcctttcttcagttccagcaataatgaatggtcaacttttttaaaatctagatctctctcattcatttcaatgtatttttactttaagatgaaccaaaattattagacttatttaagatgtacaggcatcagaaaaaagaagcacataatgcttttggtgcgatggcactcactgtgaacatgtgtaaccacatattaatatgcaatattgtttccaatactttctaatacagttttttataatgttgtgtgtggtgattgttcaggtcgaatctgttgtatccagtacagctttaggtcttcagctgcccttctggcgagtacatgcacaggattgtaaatgagaaatgcagtcatatttccagtctgcctctatgatgatgttaaattattgctgtttagctgtgaacaagggatgtaccactggaggaatagagtatccttttgtacacattttgaaatgcttcttctgtagtgatagaacaaataaatgcaacgaatactctgtcaaaaaaaaaaaaaaa

SEQ ID NO: 55488 - DNA, 879 bp, Homo Sapiens
tctgggctggtcccttgcacagggcccacgctggagtcttaccactctgctgcaggggtggaaggtggcccctcttgtcacccatacccatttcttacaaaataagttacaccgagtctacttggccctagaagagaaagttgaagagtcccagacctactagcattttgcaactatgcttgtaaagtcctcggaaagtttcctcgcgtaccagacagcggcgggggctgatagcaattttagtttttggcctccctatcctctcacatgagaacactgcctggatgcatctcatgatctctggagaatttccccatctttctcttctttccatcgtgtggattcaatagtgtggatttgaaggctgccctgcccccgactctcctgccgcacccctggccattgtaccttttgatgtttagaagttcgtggaagtagacgctgaggtgtgcagaggagctggtggataacagagaatgccagggaagatgagtgctgggtcagggtacttggatgaaacggtgcaggccaggcgggccctaataaaaccctctgccaggtctgggagtcccaggccatctgctcaacgctctgtggtttgtcagacctgcaagcaagccccctgctggggaagcctaggtgtccttgagctgaaccgcactgaagaactcttgtcctcactggctgatgcagcagaactcttgggaaatgtcttagtcctgcagaatcaggagtcaccagatgatgcagagttgagatcatcattgcaaagttctctgttcctgagggaactaatttaaggaaaaaatgggattttgttttaaagttggaaaaaaagcctgattaaagagtttctgcctgttaaaaaaaaaaaaaaag

SEQ ID NO: 55489 - DNA, 268 bp, Homo Sapiens
ccagtccctctccttacttcatccccatcccatgccaaaggaagaccctccctccttggctcacagccttctctaggcttcccagtgcctccaggacagagtgggttatgttttcagctccatccttgctgtgagtgtctggtgcgttgtgcctccagcttctgctcagtgcttcatggacagtgtccagcacatgtcactccccactctctcagtgtggatcccacccctctttcatctctgtaccccacaaataacacaaacaccg

SEQ ID NO: 55490 - DNA, 817 bp, Homo Sapiens
aaacatttttcattttgtttaaagtagaagttacataattctatattttaagtcttgggtaaaaaagtagttttacattttataaagtaaagatgtaaatgattcaggtttaaagctctatttgacttcctttttttgtttgagatagcgtcttgctgtgttgcccaggctggagtgcagtggtgtgatctcagctcagtgcaacctccgccccctgggatcaagcgattctcctacctcagcctcccaaatagctgggactacaaggtgccctccagcatgcctggctgatttttgtatttttagttgaggtgaggtttcaccatgttggccaggcgggtttcgaaatcctgacctcaaatgatccacccacctcagcctcccaaagtgctgggattacaggcatgagccaccacaaccgtcccactattttactttttaaaatgacattcctactgattgatttttatcttgctataagttcgatgacaccgtgaatctaataaggttcactgttgacacagtacaagttacatagctaaaatacatagcatttgaagactaattttaaaggattggacagaagttatttttccattggggcaatatctttaaaggaagcaacccacctttggggaaaagtgtatcctgctggctcctaggggccatggcttgtaataccgtattttaaaattaaccattattccttttaccccgaaaaaaaaaaaaaaaaaaaaggggccggcccggctcctagaggaatcccctccggaggggggccccaaagctttaacccgtaacccccagcttttctttc

SEQ ID NO: 55491 - DNA, 706 bp, Homo Sapiens
aaaacctgtctgactcgacattttaatgcctgagagttggtgaaagttcagctgaagctaatgtctagacatcagcagtaactaggcatccagaaagtagcttcaaccaaagctaatagagcccaagtttccgcaggaagtttggtgctgagctgtccagagcagttttttatctgagtgttgctagcccttagccatgctttcttagctttattctcgcctgttcctaggcatagcctgaaccagagctatggctcactgctcgctttattctactccctagtcatgcggaacaacatagtctaaaaaggaagatgtggactggggagttaggagacctgatttctattccctatgcttctactaactagcctcgagatcttaaccgctctgtgcctcagtgttcccatctgcaaaatggggatagtgttaattgccctacctacctcacagggttgttgtgaggataaactgagacaatgaattcaaagcaagttgacaagtaagtgctatgcaaattgtaagaaatggaaacaatcatgttaaaagcaatggaatggacattggcagaagggttaatggattgtccagccctttctctgtgtggcttaaacccaggtcgccattgctttatacattttcacttagcacagatttgtaattatgcatgtaataaagcacagccttatccaaaaaaaaaaaaaaa

SEQ ID NO: 55492 - DNA, 664 bp, Homo Sapiens
  misc_feature (606)..(606): n is a, c, g, or t
cattttcttctgctccaaacagctggagtaaaattcatgggaaatggcccttcatttaaaaaaagatgtacctcactacccactacaaatttggaactttgttcttttcaataattagttttctattgtaaattacctactaaacagtggtagccatgacatggaaagtcaactgattctacaattggacattcatttgtgtgccctggaatttccaactagtaataaacaactactgttgatgtagttttaaaccacttgaagggactcatgaagcatcctgcaacataaatttgcatttttacatcagatttcttttttttcctgaaaaacaactaaccttctaacaactatctttcaaaagtaaatgtaataaaaatgcacaacataaaatgtttatgatcccagcaatacactttttaaaaaatgtgaaagtcaaagaattaagttctagttctgactcatcacaagaggtcaaaagtatttgctactgtaacattcaattcacatttgagaatcatggtaaaaataactttgcattgccttaccatcatgatcctactgttgagttaggaaaatatggttagacagactcacattactttntttcagaggtaaactctagattactgtgtcaacccaatacttattggccatagatgta

SEQ ID NO: 55493 - DNA, 681 bp, Homo Sapiens
cgcgtccggttgtatttatggttgtaactgtacatgcttatcaggatgagactgaaagaaggtagggcaaaaatggttgaatctattttcagatagtagttcatacttgagtgaagtgtcttgtctgcattatgaagcctggtatgtatccagtactaaataggtgggttaaatgtggtaattctagttcagtgtcttaccctgaagagaaagttgtaggttggctgttgaaattcattccttagatatgatcagtttgattgcccggctttattgcctttacaggaatgtgatactcagggcttactctatacaccaatgagtcttctttgatcctaagaccaccactgaagttgtttaggttcttttggacaaacatgataaacttcttcagatactttttttttcctttggcaggaaggtgtcttgctgcaggtaactaatgaagaagtggtcaaccacagagtcttcaagaaataagaaattctgtaccatctgaaagtagttcttgttggtgccttcatttaaaaagcactctttaaaataaaagggaaatgttttctgataaaacaaacatttagttgaggttcttgatataaaacaattacaaaatgagtgttgtttgtaaaacagtaacatcaaattggctaaagagataaatgtatcatgttttaaattagg

SEQ ID NO: 55494 - DNA, 1044 bp, Homo Sapiens
  misc_feature (907)..(910): n is a, c, g, or t
  misc_feature (912)..(912): n is a, c, g, or t
  misc_feature (915)..(915): n is a, c, g, or t
  misc_feature (918)..(920): n is a, c, g, or t
tctgtccctacccagcacagcaaatggttgtagtaattgccaaagccctcataaagccctccggcttgaggagagagtgtatagtcatgggttctgcctctgtgcccttgctggccgcttctcctctgccttctttcctggaactcagggtgtggggactgagcctgtaggggacagcatgccgtcttgctgtggccactcccaagtgtgccctcttccctctttacacatcaggtgtctctggcacaggacttggcactaagctccatgctgagacaccaggctatgtgggcccccaccttgtttcccagcctgcaccttagaagccgaaggtgctttcatcagaaccctaaaatggtcgttgaaggcgcctgggccgcagcccagcagtagttggagaggcaggcagagggcagtggttctcccaaataggagacctggggcctggccaggccagggtttgggcctaatggctttgactaaattacccccatcctccttgcccggaaaagggagagctagagccactcactgtcattctgctctgaccttgaagggggcggtgttggcctggcttctggaatggactgagtccatcgtggaaagggctgggggcaggaggaggtggggaggggcactgcctgcggaaggtaggattagatcattagctcagtgacctcctagggtttcgatgtgctatgttctcatcctacagttggtttggtaatgatctgcaagtcccggagagcaacagcacagctctgcctgacgctctcattaaaatctatgcagccaagctcggcactttgtagcagccggccttgcgaagcctcctcagctcggggggccgggggacccaatggagccgagaagcccctctgggcctccacttatgcatatgcacccnnnnanaanaannnaaaaactcaaggccttctatgtccgggggccggaaaaaaggaggaatggaaagggcacctgggccctaactggtttccggaacccactttttttggacaaagggggtagaaatcgcgccggctc

SEQ ID NO: 55495 - DNA, 493 bp, Homo Sapiens
aggtttttccagaattagtctggatcagtgcctaacaaagctgttattaattctccacacatgagtctggctaactgggccagctctcatgttttactcctgtctggctacaaatagcactgtgcatagtagccctgtttccccatggtgttggactgtggtaaagtatgttgtgacatactggaattctaataatcctgttgtaagtatgtacagaatctatgtaacttattgttgacatacagaggtttgggaagtagtctaatggacattccttacaatagaatggctgggaagggaaagaaaaaaaaaaaaaaactacctaactccaatcttaatgttgtagttttatagcaaacaaaaattgtcagctttttgtattgaaaggtcagtggtggtaagacaaggtgtcttgtaaattaagattttaagaagtgcattaaaatgttttagaattactctgggaattctgtatatcacactaaaattttta

SEQ ID NO: 55496 - DNA, 683 bp, Homo Sapiens
gtagctccccgggtgttttccctgtgcagccgagcttgggaaactgccatgcttattggatgtcaaggcgctgttggaggctgggtgtgacagcacagagccaggttgtcttgtggaaaccacagccacgggtttgccactggctcagcatggcctcactgccagtcccagcctggctgagggacaagatggtttctcttgggagttcctgagtggagcacccttccaggctttttgaaagccagctgatctgtggagccttgttaagggactcaatacggtgtgggatattgatgtttttccttgagactgtcttgtccatcaataaagatggaggatgtctcctctttgaaccccgcttccccaccagtactctctctcccttagagtttatgagttattcaaggaggagacttcttaaagacagcaacgcaattcttgtaactgtgtaaatagccccatctttcagagtgataccatttctacatttgataatgcctgtcattcctgtaggctgtatatagttaaggggattctccgaagagtcgaggacgggttctaagaagtcatatgtcgtggttaattacattgcttgaaaaacaaaaacaagcaaacaacacaaccatttttgggcggccacgccccgagaaacatttcaacaccttcttttgggccgggcccca

SEQ ID NO: 55497 - DNA, 630 bp, Homo Sapiens
ctcctctaaataacccttaagcctcatcaagaaaggtttgtttatagtatttttactatagcttcatccttgataacgtcctaatttccttctggacaacctccttgaccaatggcatattgagatctatgtgacatgaggatatttctcagtaccactttgttactggtacctgatgcacacggattgcgaccagagcatgatgcctccatcaagtggtaatatgtttgcagcctgctgtccagccaagagtgacagatacttctagtgacttccccggtatccactctcatcttcttccaatatcaagagaatccaggttctgtcagattagtaaggtgtgctaatctaaattttaaaaaatctcttacaggttttcttgcagctggtaccatccatgtctcacagccctggccactgacagatcagcagatgtcaccacgtgggcttctgagaaagctcttgaatggggatcgttcttaaacatgaattcctccctgtatgttttgttctttgctttacttttcaccttgcaaagagatccagtacctagtattggaagatccaccttaacgaccgtgcatatgaaaaccacagtctaaggaagtgactgcagaaagctcacagcga

SEQ ID NO: 55498 - DNA, 670 bp, Homo Sapiens
  misc_feature (440)..(440): n is a, c, g, or t
  misc_feature (599)..(599): n is a, c, g, or t
  misc_feature (630)..(630): n is a, c, g, or t
  misc_feature (652)..(652): n is a, c, g, or t
aataccctagcatattgggattaagagctttctagccagaatctggacctataccatgggaaaatttaggggtgctgggaatcccaaagccaaggttctggcttcattggcaacccactaggaacttgaatgtgagattcagctctagtttgcaccttgatttccccagtgaaaagggagaagagccaaagtattgtctaggtgctgagttcccttttctgagtggatttcaagcatttgccagggtatgctggaggagggactcctaaagtaggtgagttgtgggactaggtaacactttaaatacttttttactcaaagatttgccaagaacacagcttattagtgaaagagacctgtggattgaaatggctgcagatagatcccgcagtcccttctgaaaggaactgtgtagccagcagggacctaaactttggcanaaagtgaacacaattcaaatacgaatgaaggaagagccctcagatggaacgaaaggcgatgtgcaaggccatcccagagagacggaagcaggtgcgatactaagcctcagcccaagaataaaagagagttcaactgttactcttttctttcatcaatcncctatcagttagaactgcaggccagttccanagagtgtttgcttaagattcanaagtgggtaagtaaatgg

SEQ ID NO: 55499 - DNA, 898 bp, Homo Sapiens
gatgatcatcgagcccaccagcccttgccttctcccagaccctctgcaggaaccgtactaccagccaccctacacgctcgttttggagctcaccggcgtcctcttgcatcctgagtggtcgctggccactggctggaggtttaagaagcgcccaggcatcgagaccttgttccagcagcttgcccctttatatgaaattgtcatctttacgtcagagactggcatgactgcgtttccactcattgatagtgtggacccccatggcttcatctcctaccgcctattccgggacgccacaagatacatggatggacaccatgtaaaggatatttcatgtctgaatcgggacccagctcgagtagtagttgtggactgcaagaaggaagccttccgcctgcagccctataacggcgttgccctgcggccctgggacggcaactctgatgaccgggtcttgttggatctgtctgccttcctcaagaccattgcactgaatggtgtggaggacgtgcgaaccgtgctggagcactatgccctggaggatgacccgctggcggctttcaaacagcggcaaagccggctagagcaggaggagcagcagcgcctggccgagctctccaagtccaacaagcagaacctcttccttggctccctcaccagccgcttgtggcctcgctccaaacagccctgaactctgggcctcctcaaactcagtgcctgggtccagggccccagtgcttccagaccaagacttgggccaccacttgtccaataaagtacattccagacgccccaattttatttttcccctcctcatatatttacttcgagggcttctttggtcgggtggcggaaaaaaaaggtaatggaatgggccccggggccatagccggtttcc

SEQ ID NO: 55500 - DNA, 726 bp, Homo Sapiens
agaagtgacatggaaaaaacactgtgcccaccctagtccttttcttaaatttgggcagagatccagggtataggttaagagatttttaatttgccagatggtatgcctatgttgttaaatatacaatgaatctatggtatgatagcagtttctggataaacattacttgaggtcctaaaatgcagaagggaaaaagcagcttttgtcagatgcttactttgctttcatttcatctctaatattttggatggggaaccatccaaagcttctggccgcatgaaggtcaagtgtgccagtgtgcagctgggtttcttttccagaattaaaagtattttgggtggtgctgagggtcagaggaagaagtaaaaattgtgagaaaggagaaacatgggcttggggagaacccagaattggggacagaagacctggcactaagctatagcacttagcacctctgatcttgtttttcctcgtccgtaaaaggagattaacaatgcttttctgcccacctcttggggagaagggaataatttagttggtaaaaaaaaaacttttgaataataagcaactctgtctttatataagtagccaagcattattaattatccaccccatatcactggtagatacctgtattcaagctatgtggacataaaagcagtcacattttagaagtcatgaagttggtgctaataaacctaatctacagaaaaaaaaaaaaaaaag

SEQ ID NO: 55501 - DNA, 598 bp, Homo Sapiens
gcacgagctgaaaaggactggagcaagaaggatgcccctcggaacggcagcggggtggccttggagcgaagtgaagccaacatcaagcacgagcgatgatgacaccaaatccatgtgtccaccctgggacccaggagggcacagccaaggaatgagccctgtggggtgacgcttcagggcagagctgccttttaatttttattctcagagcatcagcacttgaggccttgccccacgccttctctgtggaccattcaggacctccagtgggggtggcgtgccaggcgcgtaccccaccaggtgggcaaagcagaaacctgcggggagcggagacgccttttatctctggatgccacagacctgagcagcattgggctggctgtccgctgctgactggatggcagcacaaagacaatatgagcagagggaggagaagaaggggtgctcaggctgcgggccacagtccagcagcgccagaagcactcatttctgaccaccaggctatgacgttcctgctgcgcattacagaaagcttttaactgtgatcaggcactctgctcagatacattgagtggcgatttttagttttgttttgaaa

SEQ ID NO: 55502 - DNA, 567 bp, Homo Sapiens
cctatttcagctgctttgacaaaatgactggctcctgacttaacgttctataaatgaatgtgctgaagcaaagtgcccatggtggcggcgaagaagagaaagatgtgttttgttttggactctctgtggtcccttccaatgctgtgggtttccaaccaggggaagggtcccttttgcattgccaagtgccataaccatgagcactactctaccatggttctgcctcctggccaagcaggctggtttgcaagaatgaaatgaatgattctacagctaggacttaaccttgaaatggaaagtcttgcaatcccatttgcaggatccgtctgtgcacatgcctctgtagagagcagcattcccagggaccttggaaacagttggcactgtaaggtgcttgctccccaagacacatcctaaaaggtgttgtaatggtgaaaacgtcttccttctttattgccccttcttatttatgtgaacaactgtttgtctttttttgtatcttttttaaactgtaaagttcaattgtgaaaatgaatatcatgcaaataaattatgcgattttttttt

SEQ ID NO: 55503 - DNA, 654 bp, Homo Sapiens
taatactaaaagctctgcataagcagtggttcagaacctgtcttgggtacagacctgttgaatctgacagaaaccagaaacgcacttttgagaaaaagacatttgtaattcactcagttttccatacacatttagcaggttcaaagcccatctgtggaatccctaaactgccttcaaagaaagggagttccccgatctaaaatggtcattatatatttgtgtcaagaattagaaggcaagggtcactaaatattttaaggattaaggtaccagaggcatcagtggtataaggatggagtctggtctttaattacgacaagggtattgcttacattctactctctggttttcaaaaagatctgacatgctgacaaatccagctcctcacaaatcttgtttgaaggacttgtgggaagtgatattccttactattagatcacgccccttataactacatgttaacatccagccttttatctgtttgagtaattgtagggatagaaagtgaagcccccagagttaggtgcaagtatagcacccagctgaaaggcatcatggagtctaagggccttctacagaaggggcaatcctttgggttatttctggtgtaccactgtcttctctacctcggtccaacaccacctctcttggaca

SEQ ID NO: 55504 - DNA, 919 bp, Homo Sapiens
  misc_feature (624)..(624): n is a, c, g, or t
  misc_feature (626)..(628): n is a, c, g, or t
gaacagcagacgtgcactttgagcggaaggcagatgccctgaaggccatgaagcagtacaacggcgtccctctggatggccgccccatgaacattcagcttgtcacgtcacagattgacgcacagcggaggcctgcacagagcgtaaacagaggtggcatgactagaaaccgtggcgctggaggttttggtggtggtggaggcacccggagaggcacccgcggaggcgcccgtggaagaggcagaggtgccggcaggaattcaaagcagcagctttcggcagaggagctggatgcccagctggacgcctataatgcgagaatggacaccagttaaacagaccagcaaatccgcgtgcggaacaggacccaggcgtctcctcttgctccctggttggggggcggtggctggggctgtgcggccaatgatggatttgtttcttttatgttttaaaataggatttaaaaactcatgtaaaggttttttttttttctttttttttttttttaattctgaaacagacctgttttgtaccgagttatttttgggataaattttactggttgctgttgtggagaaggtggcgtttccaccttttccataataaaataaaaatgtgggtacncnnnaaatactaacactcatacaacctcgagggctctatttcggggggcggaaaaagagggattgaaatggccctgggccataccggtttcctgaacccacttttttgtacaaaggggaaaatttgccggggctccccaaaaggggagccaaataattttccaaaaacccgggttaaccctgccattaaggaaatcgggtggcgatacccggggaatttaaacccccccctagtgaaccggggctttttttttggggactccaaagaggatcttcttggaaaccccctttcttcg

SEQ ID NO: 55505 - DNA, 752 bp, Homo Sapiens
  misc_feature (530)..(530): n is a, c, g, or t
  misc_feature (532)..(533): n is a, c, g, or t
  misc_feature (539)..(539): n is a, c, g, or t
  misc_feature (542)..(542): n is a, c, g, or t
  misc_feature (544)..(544): n is a, c, g, or t
ggtgttacacttaattttacagggcacaaattatggaattacttcataaattcatggtaatgttttcataaattattgcattaacatacaattgccatttaattatgaagtccatcagtattgacagaagacgttacagtgaagtgctaaaaccacactatatggtaattatattttgggttatgtagtaaatcaaatatgcatgtcattgtgacactttatgtgttaaaacatggtagataatcacattttctgggccctgtaaaatagtgttactgtaatactctgttttgcctcctgccttgtttacattaaacaggatatttggtaaatttttttgtattgaaagttgtgtaggttactgacagtgttaccagcgtctggaattcttggtccctccgtggagaaactcttcagatggtcattgtgtacctactctctcttcaaaggaagttgtgatcaagttcaactttttgtgctaacaatgcatgcaggactaagagggatgatctaaaaaataaataatgtanannaaaaanaananaaaaaaaaaaaacatgtctggccgcctcgggccctgcaagaagcttttctaggacccattcgttttggcgccgcggggccccagttaaggtaaagtggaaacactgggtcaatagccttgtttttccctaggaaagaatccctggggccattgcaccaaagggtgcctttggggatttctcccaacccaaaataaaaaaacacgccct

SEQ ID NO: 55506 - DNA, 683 bp, Homo Sapiens
tggggcctcgctcgctcccgacccggttgcaagtgttgcggtgggagaaagtcgcgtccgcatcggaggggaagcgccgtcatgcctaagtattatgaggacaagccgcagggcggcgcgtgcgcgggcctgaaggaggacctgggcgcgtgtctgctgcagtcggactgtgtggtccaggaaggaaaatcacctcggcagtgtttgaaggaaggatactgcaactctttgaagtacgcattttttgagtgtaaaagatcagtgttggataacagggcaagattcagaggaagaaaaggatattgatgcattatgttgaagccaacatggaaaacaacaaatattttccctggtcattaacacaaagaagccaaaacaggaaacatactttttactacatctgtttggttggaccagatttcccctccgtggaacactgaagaaagtggatgagttgttttcgaatatgtataaagtaaatgattctcttgatccaagttatttttagaagaaaaacctaattgaacaggtatgggttgggagcataataaatgtgttttgagaattgttctaaagcacagaaaatggaaagactgttatttgcaaacttgactcttcaattgaattacccaattagtacaggccactgatttgactgacacagtcgataacatgcagcctat

SEQ ID NO: 55507 - DNA, 848 bp, Homo Sapiens
attatcaggcatgtgagatctttcagttatctttaaagtagatgtatattaagggcttagatttaggatctacatattctgggcattgaataggcagtaacttacaaataagttttgcttaccttttgttctagggactagcactgctatcaatggaaagtatttttaactaatctgttattaagaaagtcatatttttgcatttcagccaaaataaagaccgcctgtaataatctgttagaaacagataatacatgtctgaaatccatatgtttcatatgatctaaactgtattttccaatttaaattaaaaatgtaatgtagattcagaaaggttcatatttttctaatgacttcattctatattattttgttaggttgcataaagaagcaaggaattgtacttgtattaaaagatgaagaaagctattaggtatatttgtacatgactgcaaatgagtctatgcccgtttaaaagaaaagatggacactattttaaagtgagctttaatatgcttttatataaacaaatttgaagtacagtttagtttggttgtgtttacctaacaagtaccataagccttgtgtttgttcttatttgtataatcctagcctgtgacttaatgttgatgctttgctttgtcttttggctggcctaacctacattgacatgtacacagaacattttaaaactttttttttcaaaagtcataatgaattacttttattaataaacaaaaaaaaaaaaaaaagggcggcccgctcttagagaatcccctcaaggggcccaagccttacgcggaccccagcttttcttgtaccaaagggggcccctatagggagtccga

SEQ ID NO: 55508 - DNA, 1282 bp, Homo Sapiens
gtgaacagatgtcgactcaacctgagaaagaaggtatttgttctagtgactaaatttataaatgagattcagagccacttgattaatagaagatatttactttgaaaaatacagcgagacacactaaaaaaattgaccttttgcagtacttttcattggattgcttcataatttcttggtgttggaaaattaattcctaaagcacaagattaaaggatgcttgggtaagcaattagtttacctgtcttttctgggaccttacacggttcatccatgattgcattttcttttagaattggagtttaatgaataaaaactttaatataatctactgattctttatctcactaaggtgaaacactcttatcttacagaaatatttccccttttctttgcttttaggttggcattgcaaatggtacggtcaccgaacaggctacaaagaatgccctttctttatcaaagacaaccaaaagttacaacagttcagagtagcacatgaggatttcatgtatgacatcatacgagacaataaacaacatgaaaagaatgtaaggatacagcagttaaaacagttactggaggattctacctcaggtgaagataggagcagctccagttcctctgaaggtaaagagaaacacaagaaaaagaagaagaaagaaaagcataagaaaaggaagaaagaaaagaaaaagaagaaaaaacggaagcacaaatcttccaagtcaaatgagggttctgactcagagtgacaaggatgtgacttgttcaacattctcttctcaaacactgaccaaggaacagaggaagatgcagtcagagaaagtagcaggatagagacgccgagagaggagtatatgtgggtcacagcagtgagctcccacccgccttgcagtgaagatgtgaccccaggagagggagtgtctccttccaggtgctagctctggacagcagctgattttaggcaggaaagtttcttcatcgttgtcctccctgctggtcacatgagtttacgattccttagaagtgtctcccacagggtggcaggactgggagaatctctgaggcgtgtcttccaggccctcccacagcttgtgccctccacagtgtagacttgaacacttggcctcatgtgatccttccaccttggcctcccaaagcattgggattacaggcgagagcactggttggctaaaatatttatatttacctgacatgatttgttgatttgggggctagggagttcttaaaacaacaataaaaaatcttctgtggctgc

SEQ ID NO: 55509 - DNA, 649 bp, Homo Sapiens
ttttttttttttttttttaagaagaaaaggctgtaattttattttcaaatttttggaagtttttcagaaaaaaataaaatgacaagaacacataaaaatattgaaattattcattgaactataaacacttagcagaggaagggacttttgatgtatttgaatccacctccttctgaaagcaggaatcacttctaaatgtctctcatatctttcttcaaggagtggttttccaggaggttcccagcctcctcaaatctttcccaagtttgatgcacttcacctcataaaaataatatatatatatatatatattttttttttttttgagacagggtcttgctctgttgtccaagattgagtgcagcagcatgatcaggactcactgcagcctcacctcacccaagctcaagtgatcctctcacctcagcctcccaagtagctgagattacagatgcacatcaccacactcgggtaattttttttactctctgtagagatgcagtcttgctatgctgtgcatgctggcctcaaacttgtaggctcaagtaatcctcctgcctcggcctcccaaagtgctagaattacaggcctgagccaccgtgccttgccacaaactatttttaatcattaaaaaagaaaaaagaaaata

SEQ ID NO: 55510 - DNA, 572 bp, Homo Sapiens
ttttaaataaaaaagcaattgactgaagcattttctttttttaggtaaatagcaaaaataaaaataaaaaccaaccctggcatttgcacaaataatgcaaatggagtgatatggcctttaaggaaggagttagtagaaaggaagagggaagtgaagaaaatccagagaaaatgatgtactaatttctttcttttaaaaaatttctacatgtgcaaaaaaatcatgctgtttgaggaaaacaaagggaaatgagtacataaaactaaaaacataaatatgtttgggtgactggtaaaagtagaaaccaacctgggttacaaaaaggattatacattcaagatgctcttaaacccagtgggataacttatgttaaaactgtgttaatagttacgttaaaaatctcaagtttgtttttaaatcttcacaatacaagcaaagctgttttaaaatatacactatacatatttctcatagtctcttcaacctcattaatgcgcattaggctttttcatatactaaaacaagggggttctgaaagcgaaattgctcatagtaacccatccattatttta

SEQ ID NO: 55511 - DNA, 657 bp, Homo Sapiens
gcgtccggtgaagtacgaggtgtggctgcaggagcagggggagaacacctacgtgccttacatcctggctctgcagaaccacaccttcactgagaacatcaagcccttcaccacctacctggtgtgggtccgctgcatcttcaacaagatcctcctgggaccctttgcagatgtgctggtgtgcaacacgtagcgagcaggccacagcctggcctcgggaaggtggctcctgcagttcagcgtccctgggcccattaatcccactgtggagacttctgggaactatttattgagcaggcctgtgcctccacatcatcttgttgtctctggggtgtggtgtcacagcactcctctttgccctagagataagggacctgacttccccttctcccatcctgaacatttgtacccctggagaagttccttagcagggaggaggaagaggagaggaggaagcaaagaatcacaaggaacctctggctaggtgatcctgatgtttcctactgagtttttctggtatccagatttctggaaaccgagtaatcatgtactgtttgattgggtggttcatctgcttccatcccagtgaaatttacctgtagcccagtgaagggtgtgtttggaacattcattaaatgattctaagcatcttgaaaa

SEQ ID NO: 55512 - DNA, 690 bp, Homo Sapiens
ttttttttttttttttttaaaagcttatgcctctttggtatctatatctgtgaaagttttaatgatctgccataatgtcttggggacctttgtcttctgtgtaaatggtactagagaaaacacctatattatgagtcaatctagttggttttattcgacatgaaggaaatttccagataacaacactaacaaactctcccttgactagggggacaaagaaaagcaaaactgaccataaaaaacaattacctggtgagaagttgcataaacagaattaggtagtatattgaagacagcatcattaaacagttatgttgttctccttgcaaaaaacatgtactgacttcccgttgagtaatgccaagttgttttttttattataaaacttgcccttcattacatgtttcaaagtggtgtggtgggccaaaatattgaaatgatggaactgactgataaagctgtacaaataagcagtgtgcctaacaagcaacacagtaatgttgacatgcttaattcacaaatgctaatttcattataaattgttttgctaaaatacactttgaaactatttttctgtattccaagagctgagatcttagattttatgtagtattaagtgaaaaaatacgaaaataataaacattgaagaaaaaaataaaaaaaaaaaaaaaaaaaaacgcgcctcgtgcc

SEQ ID NO: 55513 - DNA, 590 bp, Homo Sapiens
cggagttccagatgcgccttctctggggcagtcagggtgccagcagcagccaggcccggcgctatgagaagttcgacaaggtcctcactgccctgtcccacaagctggaacctgctgtccgctccagcgagctgtgaccccagggacatttcccctctgcagctgcggacagcgtcaggggcagaggggcacacaactttccccagagcaccccaaggacactgtgatcaacccgataatgttctgggttcaactcaagcatctcccttgcacctccagggtcctgcgtggactctgggttccatcccacctgctacatgctcaccaggtctccattgaggaagaacaggaacgccggttcccccaccagcttttgctgctccccttcctgctggggttccctgttttcgagccatgggaggcaggctgctcacgcctcctcactctctgtctgtccctcaccaacaccaaggcctccatctcactgtaaataagtctctgttctgtaaatagatgtacagaagccatgttatttctttcatataataaacttttatgactctttaaaaaaaaaaaaaaaaaaggacgcg

SEQ ID NO: 55514 - DNA, 515 bp, Homo Sapiens
  misc_feature (490)..(490): n is a, c, g, or t
aatttcctttacccatcagggtatggtctggctggtaatactgactccaacccagctccttcattttatagaaggaggcatttctgaatcatgtttgttcaccatggcgagactcactgcagaatttttaaccaccttattttaagtcattcattctaggaacagtcaagcccctaccacaaaggggccagatccgttcaagtgaggaagcacttgcagtttctgaattttgctgtatatttgtcctatgtcacccaacaggccctttgctatagctgggacattaccagaccccaataccttagggtctcacagcctgaaggacacagagcattgaattattaaaagacctgaaaatattataatgtttttcaattgtcacctgttttcaagacttaaatgctatagacttttctgcaggaatgacgtgtatattcctcactggcatttaccaaaaataaatgatgggttttccagggaaacccccaanaaccccaaacccacatcaaaggggg

SEQ ID NO: 55515 - DNA, 630 bp, Homo Sapiens
atagttccaccctccttcagcacaagaaagtccatactccagaaaggcgtcaggaggacagggcacatgggaaggtcgttagctgctagcaccgtgttcatcaggaaaggtcttattccagaaaggaggttaaggagagtggccgtgagagtgccatccgaaagaagctaaaccttgcacatcccaacacccaccccagggagagttcccgtgtgtgcctggtgtgtgggacgctttcgggacccacattgcactctgacttgcctggggctgttggcagtgtcacatcactgagtttatccaccgccatccacctctatccaccccataaggtccctacagcaagtgggacagcagaccttgtgctccttgctctaaacagtagagaatcgttaatagtggagcccaaaacaggcctcattccctacccttgactggtttagctgtggacatgacccacctctggccggaggagctgagctggtatctgctgggggcttcctgggaaggtttaccattttcatggaaatggttgacattacacatggtatttgtcatgccctagcatggactgtctcatactgctctggactatgtggtaataaaggctttattgtttaagccgcttaa

SEQ ID NO: 55516 - DNA, 564 bp, Homo Sapiens
agtgcttggacctctacatcagataggtcctaaactcgagttactccaatgacacctatcattagggcagtatgtgtcctaaaaagaatcccaataactgaccccaattcttggcattcagaaacattctcaggaaggtatggtgtttacacggtttctagacaccctccttgaagaattacatctaaaaaatgaagaccttgaaagtctaaccatcatatttagaaccagctgtttaccagagtgatatattccatgaagacaaaatagaagatgaacttctattcaccgtttctggaattctagccgccatgatggtctggtggtgactgataactagttttattccaagacatacctttacctctttaagtttcaatctcccatctcccagtccttcagtccccaactgcagaggatgacctccccagatagaggagaatcattactccaacaagaataaccaagtctttgtatccctagtacaagacatagtatttttattcgaaaatgaatgtttaagtattaaattgaaacttgaatgaaaaaaaaaaaaaaaaaaag

SEQ ID NO: 55517 - DNA, 489 bp, Homo Sapiens
cgcgtccgcaggagttggagaccagcctgggcaacaaagtgagacccctctctctacaaaaaataaattggccaggcatggtggcgcgtgcctgtaatctcagctacttgggaagctgaaggaggatcgtctgagcccaggagtttgaggctgcaatgagctacaatcacacccctgcactccggcctgggcgacagagtgataacctgtctaaaaaaataaaaataaattgtataatcatattgcaattttctttgcattactgatgaggaaaaatctcaaagtaattgtaaaaaatcctggatatcacatagttgagaaacaaagttattttaaacttacaggactctgtagttcacagttgaacactgtggcttcctgaaatatcaaagaataatgtacattaataagccagctactatcggcatcttgtaaaaattaaaaaattaaacataaataaaagttcaaactatgtgttgaaaaaaaaaa

SEQ ID NO: 55518 - DNA, 528 bp, Homo Sapiens
aaatttgcaaatgatgaaaacgtgaagcacatctcctgtcccctgctcatcctgcacgctgaggacgacccggtggtgcccttccagcttggcagaaagctctatagcatcgccgcaccagctcgaagcttccgagacttcaaagttcagtttgtgccctttcattcagaccttggctacaggcacaaatacatttacaagagccctgagctgccacggatactgagacctcagcagggcccaggttccagcccagatcccagcatgtggtcagagctggtgtgactgaagccaacaggtgacacggtcatcgaagagcagcagacaaaactaacccaaaggcagctgaaagtggagggcaggtgaattcccagccctcgccggattcaacttttgccaacggtgaagaactgccctgagctgcaaaccttacaaagtctgtaactctagataaaccataccatgtgctaactgcactgaaataaaacactaactacattataatgtcaaaaaaaaaaaaaaaaaaaa

SEQ ID NO: 55519 - DNA, 611 bp, Homo Sapiens
gaggcgaccaccgcgtggagctttacaaggtgctgagttcccttggttaccatgtggtcacctttgactacagaggttggggtgactcagtgggaacgccatctgagcggggcatgacctatgacgcactccacgtttttgactggatcaaagcaagaagtggtgacaaccccgtgtacatctggggccactctctgggcactggcgtggcgacaaatctggtgcggcgcctctgtgagcgagagacgcctccagatgcccttatattggaatctccattcactaatatccgcgaagaagctaagagccatccattttcagtgatatatcgatacttccctgggtttgactggttcttccttgatcctattacaagtagtggaattaaatttgcaaatgatgaaaacgtgaagcacatctcctgtcccctgctcatcctgcacgctgaggacgacccggtggtgcccttccagcttggcagaaagctctatagcatcgccgcaccagctcgaagcttccgagacttcaaagttcagtttgtgccctttcattcagaccttggctacaggcacaaatacatttacaagagccctgagctgccacggatactg

SEQ ID NO: 55520 - DNA, 525 bp, Homo Sapiens
ccctatgcaacttccctctatcacagttaggtgatttgggggcataactctaaccaaaattaagatatgtttggaccataaagaatccaacaactgaagattcaaaaacatcccttctggattcctatagtgtccatcttaaaatcataactaggtagttctacctgctgcagttgcactgaagtgattagttccctctggctttctataattttaagtctttattatggcatgatggcaaggttgtagcctaaagctcatcacttttgtaggtggtgttagtttttagactagcttttataaatactaattgacataaagcatcaaagattatttatatatttaggctaaaaataatgtttatctccttatgcaatcctgattatgtgaaaatatggttgctgtttaagtgatgctgaatttgctgtgtgtttataacttaagtgctatatatatatttcgatatgtcttacatattctctattaatataaagaaccaaattttgtctgctattttgtaaaaat

SEQ ID NO: 55521 - DNA, 592 bp, Homo Sapiens
gtttttagattatacttgcatctgtgactttactaccagccacgttgacacaaaacaggttctggttcaggtaaagttgcgtcagtcacctgcagcagaaatccctcttcattcctcttctctgtgttcattcctcttctgtgctgttctgaagcttctaccaatactctttccatattgtctttttcagtgaagagaaatgcattcaagattaggtccctcctgtctatccagtttcaggattttatgttgttttatacacagttatttcagtatagaaactggctttattgccaagtgtttttttaaacatgttttaactctcatatgagcaaactgtccaacttcagtttttcataagattaaacttcttacgatcaaatttgtctcttgcaatgatgtgatgagttgccaaataattgagattattttaaaatgttttgttcatattcttgttttataattaaaatttacattcagtgtgtatgggttttttttttattttgactcttaatgtaaggtggatatttctgtcattttacatggtttcttactgagattttatatataaattataaaatgtttaccaaaa

SEQ ID NO: 55522 - DNA, 679 bp, Homo Sapiens
ttttttttttttttttgctggtcctaaacatttcaaggatgtaagtctttgttttaatataactttatttgttttccaagtagatgataatattcaaaagcaataatgtatatgatatctataaaggaagcaaaattaagtcatacactgattccactgtaaacaatctgtccagaattccagacaccttcagcaaactttttctgtaaaggcctgatagcaaatatttttgtggtgggttgaatttggcttatgggttatagtttgctgacacctagtttagagggtgtgtaaaactatcttcataactttgagatttttataaaattttacatgaaaatatactgataaattatatgcacatattttctaccagtagcattatagtggcatcatagaagaatatttaccaatgatggggaaactgtaaaactacagtatcaaggcatacaacttaaattccacttggaagattgtaaagtgtcaaagtattttaatgataatttaatttgggcttttgaaatgttcttctacaaatgaaaaagatgtttaaaaacgttacaagggaagctatgccttctgaagtctatccttagttgaaacagaaaataaacacaaaggtacaagatccttaaattattttgaaccacagaggttgaaattgttttgtgatcttcag

SEQ ID NO: 55523 - DNA, 830 bp, Homo Sapiens
aagacatggccactccagtcggtgttgagcacggcgagcagtctcaggcctttagtgatgatggtgcagtcagcctcagtttccaaagccggaaaaggatcctctagtagccacggtgtggcagctgctctgaaccaggacctggacccggacccaaagtgccatgtctttaatgttagctcccagcgatgccagatgggatcagcacagccctgcctctgctgctaattgttcctctaaagtaatcgccatgcgttctttgggcttcatctttaaaggaatgaagcaactgagattattctggaaaaccttttggcagttagtgaaattagagtacaactaagaacattttcagacctccactgtggatgacctgggtataatctcacaaatcgatgggactgcaaggattgtaaactgaaatgaacatgattatactctgttggaagagcctaagaggaaactgatgccatgagtttcagagagtaatgcttaaccccagttacacaggatgccgtcttgtgtttcctcttgtttagttacccactacagtgattttgtgatctgctaatgggttgccacccacaaccattgctttagcacttttacttcaaatcaatgaaggattgataaaagttctcctggtgtctccgcagagtgccttccaggaacagatctttgcatagaatatcagtggtttccttttttgtttcaaatagtggtcagaaaatacccagtgttgactcaccaaggcaatcagcttcctttttccctttttttgttttttttttaacattttatatttttgctttattttattttattttatt

SEQ ID NO: 55524 - DNA, 828 bp, Homo Sapiens
aatggctctagcccatcgctgttgttattgtaaaagggctcctttcaacgaggatccccttctagaggctttgactaaccagtctcttggcacccttagaatgaagttgagagcgtcacagggatgcttaacgaggccgaggggaaggccattaagctggccaaggacgtggcgtccctcagttcccagctccaggacacccaggtgagtgtcctgccacatcatccagggacctggggggtggccttcctcggggcaggtccctgggacctctttgcatcccttttgcaggagctgcttcaagaagaaacccggcagaagctcaacgtgtctacgaagctgcgccagctggaggaggagcggaacagcctgcaagaccagctggacgaggagatggaggccaagcagaacctggagcgccacatctccactctcaacatccaggtgcctgccccgtgtccttgcttccttcatgggtcctctcaacttctctgcgctgagatcccccgcaggcagatcgcggtggagtgttggtgcgatggtgcttgaccccccagcttcccctgctattgggtttctccaacgaggagacatggtcttcgcttctcagagtctgtggggccagggacaggggccattcatggtccccctctcaccctaccctggacgctgtccttgtagctctccgactcgaagaagaagctgcaggactttgccagcaccgtggaagctctggaagaggggaagaagaggttccagaaggagatcgagaacctcacccagcagtacgaggagaacgcggccgcgtatgataactggaaaagacca

SEQ ID NO: 55525 - DNA, 896 bp, Homo Sapiens
aactttgttgtcaaactaggttttggagtgtcacagaccaaagccatcatgactctggtctctgggattccaatgggcccaccccggcttccactgcagaaagcctccagggagtttactgatagtgctgaagctaaactgaagagcctggatttcctttctttcactgatttaaaggatggaaacttggaagctgaaaactcaaaactcaaagtttcaaagaaccaaaggactcttcctctgggcaccacaaacttccccttcctccactgagaagactgtctctcccgcaggaccctgaattattgaaatcgaaggctgacttcctttctgcagtgagcccaggggctaatgttattatcctgtcacacttgcaactagtgacttttgtttagtgatagaagatttggggaggacccaaaggactcagaactttctctccatacctccttttactcttttctttctgtgtaatgtatcaacaactgtttaatctcccttctaacaaaccttgatataagctttctgatatcaaagtatattgacagttaacccttactgattttaaacttgactatccagtctgttaattacctaagattttgttttcatttcatctctaattggtttgatcattggcagagaaagagtatttgaaattcatatcaggtttgctccttattttaatctctttgaattaaaaataaaactttttcaaaatggaaatttggaaatttataagtaggacttccattaatctttggctaaatcctctccttttaataagcccagctaggttaaaaagtggggtataattccatataatccctccaacccctctttttttggccttttgggagcctttttttaattttcccccggaaaagaaagaaaac

SEQ ID NO: 55526 - DNA, 583 bp, Homo Sapiens
aatggacttagaaaacattaagagaatgtcatttctcatagtgtttctgtttctgaaaatgaatctcctgaattattatctttctccctgttacttggctggggaaagagatagaagctgtataaacaaattctcttccatgctcaaagcaagtgttccatgtgcacaacctgctgcagactggggcccttctcagttaattgggtttcacaagcaataatttctccacaacaaaaaccacaacttgaagtgagttgaaaagagatcaatagtggaaacagtcgcctcagtactttttctttctggatttcatctctagaaatttgaagtgtttgagacagagtccaccctttgtgcaaggcgagaaccaatgaatggactccttgtgtgaattattgcatcttcttccaaagcaggttcatcaagactttcacagagattcatttttgttgagaagtaagggttaataggaggatagaattttggatccaaatctagtgataaaagtgtccaagcaatcaaaaagtaagatattttagggacataccaacatcttccctttctgctaatttcatgctccaaa

SEQ ID NO: 55527 - DNA, 652 bp, Homo Sapiens
gtgtcatcacccatgtctgccacccactgattgggcaattgtgggcccatggggtggaagcccccagatgactgagcagttctacaaaaaatggccagcacgagcggggactagagggtcctgattttgtgtctgtgcctcttcatctctctggactctgatctccttctcccttcccatctccaggccttctgtctgtcccagataaaggcgctgttctcccatcctccctaccccatcctctccaccaaatcgctcccaattttgagagccaaaggctggcgcttctgacttcaggagcgaaaggaggaggcctagcttgggccgatgtattttaaagcagagtggacagcagagagtcaatttccctttcgttgggagtgggcagtggggtggctaattgtcttcggccaaccaggggcctgttgcccaggcaactcaccagctccgcctctgctgattggctgccacggtgggagtcagccaagatttaaagggatgccagcgatgctcttttcaaaacctaccagtcccactgtgggtggagaaataaatggtctttctcctcaaaaaaaaaaaaaaacacaaaaaaacccccggggtcttttgcgggggggaaaaacagggtttgaagggccatgggtcaaacggc

SEQ ID NO: 55528 - DNA, 537 bp, Homo Sapiens
  misc_feature (441)..(441): n is a, c, g, or t
gcacgaggtccttccaagatgattttggataataaaagttgtatttgtggaaattggtattatctctgttttatgcacttacatttatcccttacattttgtttttagtgaccctacatgacattaaatttaaagtaaaacattgtttaatgttaccttttggcttgagaatgtctttcagctccagaattattgttactcatattttaatcagtaagtcatttaagctatgacagagtaggaattgagaaattatttcatatgctacagtattgaaatgtggatgctgccttgttttataagaagatgatcaaggtttgtgtgcccattacctttcctctgcctgaaagacgtgtctcaagaaaaataaattctattttagatgcaggtactgcattttattctaagaattgatatcaattcaaaacatagaaaactgtnaaagataaatcaggagatggctgattcataatgggtaataaaaataaatagcactttcgagctgaaaaaaaaaaaaaaaaaactcgagggggggcc

SEQ ID NO: 55529 - DNA, 505 bp, Homo Sapiens
  misc_feature (25)..(25): n is a, c, g, or t
agagggactacaaagtcgaccaagnaaattatcaacattatgcaggatcggctcaaagcctgtcagcagagggaaggacagaactaccagcagaactgtatcaaggaagtggagcagttcacccaggtggccaaggcctaccaggaccgctgtgcgtgccccacccacccccaaccccccaccatcctcctgaggcctgggggccagaaccattgcaaatcttccctcccctcccttgtgctcacttgactttgccccctttgcatgtagcagaggcctcggttcccagcttgtttccattgcttccccagatcaggacctgggggcctacagttctgccaggaagtgcctggccaaacagaggcagaggatgctgcaagagagaaaagctgcaaaagaggccgccgctgccacctcctgaggcagctgtgggtgcccctgctgtgtggctctgtatgactgttgctgaaatataaagccctgcaacctgaaaaaaaaaaaaaaa

SEQ ID NO: 55530 - DNA, 611 bp, Homo Sapiens
  misc_feature (5)..(5): n is a, c, g, or t
tgtantctgaaattctaaatggttctctgatttgagggaggttaaacatcaaacaggtttcctctattggccataacatgtataaaatgtgtgttaaggaggaattacaacgtactttgatttgaatactagtagaaactggccaggaaaaaggtacatttttctaaaaattaatggatcacttgggaattactgacttgactagaagtatcaaaggatgtttgcatgtgaatgtgggttatgttctttcccaccttgtagcatattcgatgaaagttgagttaactgatagctaaaaatctgttttaacagcatgtaaaaagttattttatctgttaaaagtcattatacagttttgaatgttatgtagtttctttttaacagtttaggtaataaggtctgttttcattctggtgcttttattaattttgatagtatgatgttacttactactgaaatgtaagctagagtgtacactagaatgtaagctccatgagagcaggtaccttgtctgtcttctctgctgtatctattcccaacgcttgatgatggtgcctggcacatagtaggcactcaataaatatttgttgaatgaaaaaaaaaaaaaaaaa

SEQ ID NO: 55531 - DNA, 579 bp, Homo Sapiens
aataagcaatcctatgatccactaatttgttttatcagttaataatattaatcaaagacatttactgtatattctagtcattttgatttgagttaaccccaaatataaaattacctgtagtgatgtctctctcccagcccttatatgtggatattttttaagtggacttgtatgctgataattctagaccaaagtaaatatggcagaatatttatacatgaaaaaataattttgcaaatattttctataattgtattcatttaaaatgttgatagcttgtgttagtttcagggaggggtgtatattttgataaaaaaatacttgactttgtaattctgtatattctatacaatttatagcagagccgttttaagacagccttgtcacatttttttgttaattgtgaaaattttattgagtgatgtttaagtatgcattgagtacatgaccaactagaattaaagtaagtgtaaacagtgaacatactgtatgctgtacaagatataatgtaacttgctgttttagcatctgtattttggttagaagatattattaaatgcagatgttaaggattggaaa

SEQ ID NO: 55532 - DNA, 676 bp, Homo Sapiens
  misc_feature (633)..(633): n is a, c, g, or t
  misc_feature (641)..(641): n is a, c, g, or t
aggtgggaggtgacacatggagagcttcgtcctggccgagcaggcacccagccccatgtccgccgccagcattctggatgtcagaggagggtgcgtgtgatggcgtcacattcatctgaagcacactgattgattttccacaaggtggcaagtttgatcaaattgaccgcttttcatgagacaaccagatgctgtaaaaaaaaaaacagcactgggatgtgttgaggagggggcagtttgctgtgctctgttctgtctgctgctctctctgggggccgcacaatgtccgcacacatcacggaggggagaaaggcatcagtaccaaacggaacaacctcttttttctacattgtccatacccggacatgtgaggctctattatcaacaggtggtgagaaaaattctgtttttattcgctttctggtaacttctgtaggccctggctcaaggacttagcatttcgtctcatgtacatctttttcttaagtgttctttgccatttctggaattgtccttggtttttccttagctcataggtcatagatgcagaaatatagtatttaaggcatccgcatccagcatcagatggctttgcatccagaaaaacattgataactcagtttgaagcaccangcatgtgntatatggctctatacaatataataaatgcataatg

SEQ ID NO: 55533 - DNA, 570 bp, Homo Sapiens
cacgcgtccgcttgcgtggtggcccctggccccatcttgcctgctgcggcctggggagcaggcgctgggtggtggttctgcctgcttgctgctcgttccccgggcatgcgtgggcagcggggggcatgcgtgggcagcagggggcgtgggcagcgggggcatgggcaggaccacgtgggccgtgatcgtgggttgccgagaggacctgagcgctgcggctctgctgaatggagccgggtccctcaggccgtggacgccctcgggaggggggtgactgtggcttgtgtctggacaggaatgtgtcatttcccacatcttctagagggctgccagctgggaagacagttatcagggcaagctgtgctctgagtttcgggttctgctcctacaaagaacgtgcggtgctgcgggcgagggccccggcacggacaagggccactgcagagtgtgtttctgctcgtcagctgccctgggcagcggatgggctgggcgatgcagctggatgcacatctcattctgtcatgaatgtccagtaaaaatctgaattggttgcaaaaaaaaaaaaaaaag

SEQ ID NO: 55534 - DNA, 467 bp, Homo Sapiens
aatggtgcctgaatattaacagtgttctgattaaaaacaaaaaaaagatacatatgccttgtaaatggctcaccgagtggtcagtagtcacttcaactcttagttcacttttgtatagttgctctgctggaaagaaatgagagtgaatctgcttactcactagaacttccctgtgtgctgtgagccagcggaaccacttgtacaatgccagatttgtttatctttgtacagaagctttgatgaagtgtcttgtatttaacacccttatttaagcttatttaaccttaaattgttaattttataaaatttggtttggcctgcactacgatgagggatggaggtagctgcaggctcagaagagactgagcttgcacagatcagaccgagaagcagggtgagagattctaacgactggatgctgctagtaacacattgtttgtattgctttaccatttttaactgttaga

SEQ ID NO: 55535 - DNA, 847 bp, Homo Sapiens
ccgggattcgaaacgtagtatctctacaacctttcattctcattgggatttaccttgccatttgaacaccatcattttttgaggactgtctagaaaaggttgcctaaccctcacagggaacacacagttccctcagagtccagcatcttctggtcttttctttttcaagatttttttaaatggttgtgctatcatttgtcatcatcagaaaatgcttgctgtaacaagcgtttatctgcacattatgctgcagtgaatgctctactgatcaagttaaacagataagatcccttcccttgtagaaactacaacttaatacagtctaagacttgacaaattacttagtatttattttccaactgctttatctctgtaaaatgatatgctgaattattataagctaattgttgtagaaagaactttccccttaacttatgtaaacagtctggttttaaaaaatttgataattgtggcccagtaagctcaacactttgccttccccaagactggggaacctctgtcctgttcaccactgtatattcagcaccaggcagtttctttttttgtttgtttgtttttttgttttgaaaaattaatacatatacatggtaagacattccacaatacaaaagggtatacaataaatggtaagcttccccatggaggtcagcctctagtcccctctccagagttaatcactgttatctatatgttgtgtatcctttcatagcaattctatgcatttacaagtttataaatatgtatatttatatatctatttttaatacaaaatagtagaattctatacacagtgttctgaagcttgctttcttatatagtattttgg

SEQ ID NO: 55536 - DNA, 600 bp, Homo Sapiens
attcagaaaaatgtgggactacttccacagtgttcttcttataaaacatgccacagaaagaaatggagtaaatgtggttagtggaccaatatttgattataattatgatggccattttgatgctccagatgaaattaccaaacatttagccaacactgatgttcccatcccaacacactactttgtggtgctgaccagttgtaaaaacaagagccacacaccggaaaactgccctgggtggctggatgtcctaccctttatcatccctcaccgacctaccaacgtggagagctgtcctgaaggtaaaccagaagctctttgggttgaagaaagatttacagctcacattgcccgggtccgtgatgtagaacttctcactgggcttgacttctatcaggataaagtgcagcctgtctctgaaattttgcaactaaagacatatttaccaacatttgaaaccactatttaacttaataatgtctacttaatatataatttactgtataaagtaattttggcaaaatataagtgatttttttctggagaattgtaaaataaagttttctatttttccttaagtcccctaaaaaaaaaaaaaaa

SEQ ID NO: 55537 - DNA, 498 bp, Homo Sapiens
  misc_feature (3)..(3): n is a, c, g, or t
  misc_feature (458)..(458): n is a, c, g, or t
ctncattgtaatcccaacacttcgagagttcaagaccagcctgagcaatatagtgagacctcatctctacaaaaaaaagtttaaaaattagctgagcatagaggtatgcatcttagtcccacctacttgggaggctggggtgggaggatcacttgagcccaggagacagaatttgctgtgagccaagatcattgccactgcattccagcctgggtaacacagtaagaccctttctcaaaacaaaacaaaatatcatatatgcattaatttacttgcatggtgaagtccaacatgtcaaaaatgaaatgatgagctgtattgtccctatgtctacccagtctactactttgtgttttaaggttcataagactttttgagtgctatgtgtcagtagtctatttacagagttcatccaaagaatttattgaattaaaggatggttctaatggaaatctatngtgttttgttattacatgcacacctaaaaaaaaaaaaaaa

SEQ ID NO: 55538 - DNA, 703 bp, Homo Sapiens
ataattcactgttattaaagctcttttattaaggcaattgcatatgttttaaaagcaatggtaaattaagttgtcttccaaaactgtgtacttgtctggtcagctgtgtatgatcagttatctacctcagagtctattttcttttgtgctgggacaggttgctggccctccctgtttccacagaccaaatcctcctagctcaggagctagggctaagcagttatttctttcaagtattttttagttcttaaattttatgcttgtatttgatgatagatgtcagtgacatttcatagtttcaaaagtccttgctgctctgagaagtgtagattctagtgaaaattacatagtcataagagaaatgtgtttttgtttttgtttttgtttcatttttttaaagttgtggtattattggttctatgctccctggaatattactgctttgtgaaagtccagactgaacgcagcaccctctgtgtacctagtacagttataaacctgggtctctcactacttgatatttttgcattagttaagacagaaatttgatagctcggttagaggggagggggaaatctgctgctagaaatgtctgaactaagtgcaatactcgtctgggtaagaatttgggaaacataacctctgtccttaaaaaaaatccgttaactcccttttttacagcttaatttaaattttttttgca

SEQ ID NO: 55539 - DNA, 746 bp, Homo Sapiens
ggaaatagataataatttatataacaggttttctgtttatagattggttcaagatttgtttggattattgttcctgtaaagaaaacaataataaaaagcttacctacataaaatttcaatgttttgacacttaattgttgtttggcacaatagtatggaagtaattcaaactggtaaatagtttcctctcatatctcgggtatatatacataccatattttattgatccagagatacttatttcactttgtgacatctctgaattaggatgcatcttacaactgatggcttattaggtttaatgaaatacagaagatacacagtataaaaagggttttcctgtggttggtttgtggtttgtgataggtgttctgtgatgtttatgctttgaaggccttaagactcatggttgcaaccatggaagcaaaatgaaatttttagctcttaacctaacaacctgaccatgtttatccatttttattgtttagaagtttatttactgatacttggtggaggttgtgtgaattagttaaattttaaatgtttaagacttctattaacagctgcaaaatatgaaagtaagtgcactcacttttcctgtagtagtctgtcttttgaaatcacaagcagttgtatccttgagttactttggttaatgtatttttctcagtacattttaaccactgggggaaatgatccccttgtaccgaatgggttttccttccttccccgggtaggaaataaac

SEQ ID NO: 55540 - DNA, 545 bp, Homo Sapiens
aggatttttttttttttaaacataaaagcatggtcagatgctgcaaggattttacataaatgccatatttatggtttccttcctgagaacaatcttgctcttgccatgttctttgatttaggctggtagtaaacacatttcatctgctgcttcaaaaagtacttactttttaaaccatcaacattacttttctttcttaaggcaaggcatgcataagagtcatttgagaccatgtgtcccatctcaagccacagagcaactcacggggtacttcacaccttacctagtcagagtgcttatatatagctttattttggtacgattgagactaaagactgatcatggttgtatgtaaggaaaacattcttttgaacagaaatagtgtaattaaaaataattgaaagtgttaaatgtgaacttgagctgtttgaccagtcacatttttgtattgttactgtacgtgtatctggggcttctccgtttgttaatactttttctgtatttgttgctgtatttttggcataactttattataaaaagcatct

SEQ ID NO: 55541 - DNA, 627 bp, Homo Sapiens
gctgcctcccagtgtctctgctgctcaaaatttctcttccagagacagaacctcgcctgtttcctcacaaacccacactgtggcagccttgttaatgcagatggccatggtgaagtgtggacagattggaataatatgtccaagtttttccagtatggatggcgatgcaccactaatgagaatacctattcaaaccgtaccctgatgggcaactggaaccaggaaagatatgacctgaggaatatcgtgcagcccaaacccttgccttcccagtttggacactactttgaaacaacatatgatacaagctacaacaacaaaatgccactttcaacacatagatttaagcgagagcctcactggttcccaggacatcaacctgaactggatcctccccgatacaaatgcacagaaaagtcaacttacatgaatagctattcaaagccttaaattgggcatcactcaggatgtgtataagatcttaatattgactagtttcacatccaggtttctaagaaatgataagatacttcacttttccagagtgaaatgtaggagggagcacattctaagtacagctaaaaatttagctcactgtaacacagtttcactctctgaataaataaa

SEQ ID NO: 55542 - DNA, 602 bp, Homo Sapiens
  misc_feature (586)..(586): n is a, c, g, or t
ctcatgtttgtgttttcttagtactgtctatttacaaacacgtaaaaaataccccaaatatgtttaagtattaaatcactttacctagcgttttagaaatattaatttacttgaagagatgtagaatgtagcaaattatgtaaagcatgtgtatccagcgttatgtactttgcgccttgtgacgtctttctgtcatgtagcttttagggtgtagctgtgaaaatcatcagaactcttcactgaagctaatgtttggaaaaaatacatacttgaagaaccaatccaagtgtgtgcccctacccccagctcagaagtagaaagggtttaagtttgcttgtattagctgtgccttcattattttgctatgtaaatgtgacatattaattataaaatggtgcataatcaaattttactgcttgaggacagatgcatacagtaaggatttttaggaagaatatatttaatgtaaagactcttagcttctgtgtgggttttgaattatgtgtgagccagtgatctataaagaaacataagcttaaagttgtttatcactgtggtgttaataaaacagtattttcaaaaaatntaaaaaaaaaaaaaaa

SEQ ID NO: 55543 - DNA, 600 bp, Homo Sapiens
ctgcatgctccctctctccagaccagccttctgcttttggggtccgaaggggcatttgctcccatcctgagcctcttctgcccctgtcttgctcttccccaccatcctacaagtacctcagtctccagcaggcccacccctccacctgcagcccagggcgggtctgttctgccaatgcccacctccttgagccacagttagctgccaactgggtcttgggacaccctccagtacctggctcaagagagaccaggccgggccgagccttcttcccactgcagtggactagacccacggccaggggatgggcatccccaggtagcaatcccacaatgcactgtacctcagagagagagcacgccaggggcaccaagggaccgagccctctgtccagagggggacagcggtcacaatactgctcaccaaaagacaaaggccaggctgccctcgggcacctctcagtcttcacttttgtctctccggaagaaccagcagtctgattccgtctatttcagcccccgtctctctcttctccacccccacgctgctgaaccattttcatgtcaatcacaaaggaaaaataagtggggatggggggaa

SEQ ID NO: 55544 - DNA, 413 bp, Homo Sapiens
ccaaaagacaaaggccaggctgccctcgggcacctctcagtcttcacttttgtctctccggaagaaccagcagtctgattccgtctatttcagcccccgtctctctcttctccacccccacgctgctgaaccattttcatgtcaatcacaaaggaaaaataagtggggatggggggaaatacctaggagtctattatcacatacatattaatatgttaatactttctttaaaaaaaacctcttgatgttattattttgcagactacgctttatagtacctgtgtgacgggacctagaacactggatacaaatagagctatgttggtttatcataatatgtacgcagaaactttctttttgtcatattatccttgtaatgtaagaagattgttaataaaagcatttaaatttaa

SEQ ID NO: 55545 - DNA, 566 bp, Homo Sapiens
catttccagagtttattgcattatacatgcggccagaacatgcacagaaaggacaggttgctgttgtacttctaccaaaccacagatgcaccacaagggaaaggctacaaggcataaatcgccaatatcccatctcaccaaggacaactgctaaattcatttgtgaaaagatacattgtaatgtgctttttaagtccccctccctccaacttgtgggttttcttaatcttttttttttaaatatatatgtcatttttaaagtactggatgtattcaaaatgccatgagttcatggactaaccacacacatagaccttttgtgttaggaaagacatgaaagagtcacattgctggatggatggatggatggatgctctacagttccaataagttaagacccaaatgaaaatgcgcaataatagttaccctgcattacgatgaaaaaataataaattacacgtgctaagtttttatatatatatatatatatatatatatatatatatactcatagggattacagatcacttgcagcacgaacataatgaccccaaagtcatattcta

SEQ ID NO: 55546 - DNA, 846 bp, Homo Sapiens
  misc_feature (636)..(636): n is a, c, g, or t
  misc_feature (846)..(846): n is a, c, g, or t
ccacgcgtccgagccagcggaccagcggcaggagccgttccccgacgggcagcagggcgctcggcctccgcgtgtgggctgagcgcggcgacgctgctgccccgaaatccccgtggattttgagtcgtatggaacctcaaagtctttgtgacaatggaaaccaaaaaattaattggtaaaccgcttcaaccagcaagacctgttcgtcatctgacttctcccccaggagcagtgttccctttcaactttcaaaacgaatatccatgcaacactcagtgcatacaaagtggagttagcagatgtaagacgaatggaatgcaagccttttctcaaggtcttaatgagcaacagcaacagcagtctccagttaagaaagagagaattaaatacagcagagatttcctgttgaagctctcaagtgtttccatctgcagaaaaaaaccagactttctgcctgatcatcccattgtactgcaaaaaccagaaaacaaccaaagttttaagtagcattttaagaacagatgaatttaagtttggacatctgcaaatgaggtggatctagcaacaataactgtaatggactgtgacaattcaatttattcttaattttgatggttggctatttgacttctctanaaatgagaaagagctattttaaaatataaagaattttctaatcagtttcagctttgcaggaggtttcctgcataaattgggaagtaacactggaaagtaggaatttggttagtgaagtgggaagactgtatatttataatttgcatactacttgcaatttttttgtttttcatcacttgtaataatggaaatggaaaatgtaaagctgtn

SEQ ID NO: 55547 - DNA, 486 bp, Homo Sapiens
  misc_feature (51)..(53): n is a, c, g, or t
ggaaagatagacttgagtttctatacttttaagaagagctctttgttcctnnnggaggggggcagggggtgaattttactttcatctcaagttattaaaaacccacaactgaagtaaattttatttcaagaatcagcagttttagaatttcagatagtacttgctcagaagtacatgctactcaagatattaagagataacaagatctgtagatctgctattgaatcagaatctgtgtacttgaacaaatgtgtgaatctcaaatatctcaaagcaaaagaaaaagtgttctagagtgttgttgcttttttaaaaaaagcgctgaagttagaccaaggtatacagttttgttctaacagacatttaggttaattgtaaagataaggaatgcattatgggtcaaaaatcaaacattcctctcatgttatgtatattttgttcctgttatattggctttattttcaaaattgtagtttgtagtattag

SEQ ID NO: 55548 - DNA, 671 bp, Homo Sapiens
ggaactgtgatttcagaccatataaacaaatggaaggatggagccacttcatcacaccttcaaatatattaagttgtataaactatcaaggccacaaaatactaatgtcatttggtcataatgactactgataaggcatcagaatggattttcagggctaccagaaaaatgtttccagatggttttagaatgtaggacttatgatccaattcaccaaaagattaaatgaaaccaccctgtgttttaaaatatatataatgttcaacctaatgtatatgcaacatttattctattctaattatttgacaggtaactgcagtgttaaattgtaaatgtgttttctttatgttaccaaaacagcaatttgaaattagaactagtggttttagagaactcaggtattctttcctgacattgttttcagaataaagaatatttttcataatattttaagatacatactatctaaaagtagaattttgttcagcattgacttttataattcccatcctaaaaattcttaatattttcataaaatttgtatttttaaatgaaaattctaaatgttgtattttatcagtaacattttctaagtgaagattaatttactgaggatgatacattatagtattgtattattctctgtagtaagattagtataagtgaaaata

SEQ ID NO: 55549 - DNA, 966 bp, Homo Sapiens
  misc_feature (758)..(758): n is a, c, g, or t
gaaaaaaagaatggatctagtataactaattctgagtaaaccaaaatgataataattaattgttgctatttaatcccacatttttggcaggtgtaattgagccatggtcttatttgattttgttatgattgcatccaaattcactttaactcagagttctgtttaatggtggtaggatgtaagaattgaattttgaaaagactactcactgtcaaaatctctccttcctataggaaatttagctgagttttcttcatccccaatttctctcttttcttgtgttgattcagtattctgaactccattctcagctgggaaagctacagatccttttagtgcaagataaggttttatagccagattcagtggcagaccatgatttaagaaattatgtttggagcctgtgttctgtaaagagaaggttgatttggtttttagctatcgtattcggagtggaactataatacaattgtataatattcttgttgatcaattcaaagttactctgcactgtttttgactttttaaaaataccttagatgcaaatttataggagaaaaaacactttcagataagaggtgtttgctgggatggaagaactacctgggcatgttagaaatatcgtcagtcgtcctaatgcgtattgtgactgttgcctttacttctgtgtattacagtatcagtttcacttttcacaggatttgtgagaaatcctttcaaattttccttggaataaacgacaaggtctcatttgcccntttccttgggaaaaaaaacaaaaccaacaacagatatagaaaacacaacagaaaaacgactacaaaaaaaaaagggggggcgaataacccgggggcaacacaccttttgaagaggcagaggaataaaaagggggcacagaaaagaaggtttggactcggtggacccaacacaaatatgtggggctgcggacaaacgccattgaaagaa

SEQ ID NO: 55550 - DNA, 449 bp, Homo Sapiens
gtccacatatcattggactctgggggacacaaagatgcctgtgacactttggtgttgccgagttagtcaacaattattctgggaaaaagcagaattgaattcttctctagatgtcctaccagggttggccaaggcacatatagcaggctaataaattcccacaggatccagacaccaggcaaaattgctctaagaagccagttactgtcatccctctatggttctagaaaaaatagtacaaaaatgacaggtcatcctatgagcgtcatgccaatgaaaccccatcttctggagaagcccttgaatcagaattatcttttttcttgatgtcgtcagatgcagccagtttcttaatttttttaaaaactgtatgtttctgtggtatgtatatttgtacacctaactacctggcacttggaaatcacagcactactcagaggcaattgaat

SEQ ID NO: 55551 - DNA, 598 bp, Homo Sapiens
ggaaccaagggtttggtacttttgcctgattagcattccattatttatttgaaatgctcagtgtttgctcaaatttggtgaaaatatcttttgaagacatattctctgagccttaaaaatggctgctatcgacagtactgtaagatgcactgccagtagatttgatacttttcatttcagtgtaggcagtaatgttttctaagaaagatttagaaatcagcaaagtgtaacaattgtgtttcatttatggaatggaaaaactgaagtgtcccattcagaacactttggaaaggttgtctgcattaggggatgtttctggaagcatcccttagagaagctgcctgaggaatctccttgccaggttgtaccagatttttttttttcttaaatgtattgtatatattttccttaaaatgtcttcattggctgaatgattcctatccgtagtaatattttaggtacttgttggatttttaaaggaagattatttattttcagatttgctgctataattgaaaacctagtaactggtcctgttgattgtgccttcatcactgtttctctgtgccacgaccgttcatgtgtatttgaaataaag

SEQ ID NO: 55552 - DNA, 368 bp, Homo Sapiens
cgtccgagaaaaatcatttatggagagatcccaccagaggcagaaagaaataaggaataaaattcatgtctctgaaaattctcaaatcaaaacagttaaagagaaaccatctataagttcatctgtgagtcgtctaaagggcgtgaataaagtcagagcatcttttcctgaagacagaaagactacacaggctctaaggcaccaaaggggtctaaggttatacaatcaactagctgaagtgaaacaacaaaaggaagaaaaaacaaaacaagaagcttatgcccaaaacagagcaagggcaaaagaattccataagaaaacactagagaaacttcgagccaaaaatacatgctgactttctagaaata

SEQ ID NO: 55553 - DNA, 985 bp, Homo Sapiens
tgttgaatcctgaatggtttataaagtgaactagctggcttaatgcagccagcgttctgggcagcagaacatattcattcttactgtaaattctatttgctgcttccaaaggtgatgattttcaagcagacatgttctatatggtctgtgttttaggatctggtgcccagcctctatcagagcttgcctacctggcaaagctgcctacccttcaagtgggaaaatataatccactgtttaacaaggctcaccctctccaccctgtcctaacgaccttttgtgaatgtgctgtgatattttcttgctcaatagcaaggtggtagctctgctttcattttaagaaagtggaggctgagggcattgtatcaatactgttgcaactccaagaagttttccttgtaaaattaaaggaaagatcttgttattgattaaccattttcttatgccttgctattgacatattcatgctctttctacgtctagtggctgaaaatgtttgcatttgttcatttgactaatggtgtgatttttgtttctatattattagacctgtaatgttttaaaatgtattttattaaatttggactggatgtatgtctctagcaatacgaggtactttctaaactattaagggaggggttgtatcctcatgttgagataagatgatggtcgtttaaattttgcaattttttttggcctgcagggatattttgtgtttatgtgtccaaaaaaggaataaattggcattcttgtgccaaaagttgtttttcctgtcaattgtctaataagtatgcagtacactgtaatggcaacatacatggttgctttataaaaacagtttcctcagtatgagaaattttacaaagaacagtggaaaaactttgtgtttttaactcttgggtctccctattttttaaaaattgctaatttggtatacaattattatgtgtcaattaaaactaaaataaaacytttaaaaaagaaa

SEQ ID NO: 55554 - DNA, 891 bp, Homo Sapiens
aaagttcataatgaaatcacacgagaactgagcatttccaaacacttggctcaaaaccttattgatgatggtcctgtaagaccttctgtatggaaaaagcatggtgttgtaaatacacttagctcctctcttcctcaaggtgatcttgaaagtaataatccttttcattgtaatattttaatgaaagatgacaaagatccccagtgtaatatatttggtcaagacttacctgcagtaccccagagaaaagaatttaattttccagaggctggttcctcttctggtgccttattcccaagtgctgtttcccctccagaactgcgacagagactacatggggtagaactcttaaaaatatttaataaaaatcaaaaattaggcagttcatctactagcataccacatctgtcatccccaccaaccaaattttttgttagtacaccatctcagccaagttgcaaaagccacttggaaactggaaccaaagatcaagaaactgtttgctctaaagctacagaaggagataatacagaatttggagcatttgtaggacacagagatagcatggatttacagaggtttaaagaaacatcaaacaagataaaaatactatccaataacaatacttctgaaaacactttgaaacgagtgagttctcttgctggatttactgactgtcacagaacttccattcctgttcattcaaaacaagcagaaaaaatcagtagaaaggcatctaccgaagacactcatgaagtagattccaaagcagctttaatacccggattgggttacagatagaccctccaacagagaaatgccatctggaagagggacattaaatgggctcactttctccatttaaggcagctatggatacaaattactatt

SEQ ID NO: 55555 - DNA, 588 bp, Homo Sapiens
  misc_feature (21)..(21): n is a, c, g, or t
tgagtaacaaggatctaattnatgcctcaaaactcttcccccacaatgcaaatcttacctcacaagctctaacctaaatcacagagacatgcatgtttcatgcattaacactgatttcgctctgtggcccaccagaggggtgggctcatgtcccctgactcctcacatgagtgcctcagctctaagagccgtggaacggggggtagggaaggtttgcgatctggagctcagcaactggctcagcaacgttttctccatttcattagcactaaacaagtctcttgctctcaggaatttgtcagaaaaaagaataaaatcacctgagactccacataccagattataaactcttctcgtaggtttgaattgcttactcacatgtcataaattaaccacagcttcatttgaccaccaggtctaaagtctgttgacagtttcagcatgactgaatcgctcattttttttttttgctttcagaaattggcttggttctctttagagttggtgtaaacatgccatgtaataaatgatttccacttaatggtacaacagaattattgctttcttagatgtatgtgtagtaaaagt

SEQ ID NO: 55556 - DNA, 647 bp, Homo Sapiens
aagctttggtttttaattttaaaaaaagcttcaaggtattgccattccttagcatccttattgattatgggtgatgagtttttaactcttaaaatcatatacgtgtagttagtttatcttaactgtgccctaagcaaaagggaaggtatacacctaagggatgtactgattttgcatttttggtcatgggtgggaatggggtgggtgcctacttaaatagtttttaagagaagaaagatatcacaaatatttttctactgttatatatgatcttcctttatactagtttctctctagtagggtatgccagaagcccaagataccatatcatgaattcttacatattgtacctttgtgttggtggttaaatcgcatcagatgcttggcgattgctgccataattataaaatgcttgtaaaggatcaaatatcactaaatactttaaattgttttacttaagagtctaatctgggaagttttcaaatcatactattaatgtgtaatctaagctcttcagatgtatccatgaataatcctggaacaatattgcttgtattcctgtcatagaacaggtttgtaatctttacaggaaatgaaaatttatataataaagttcaaatcatgcaaaaaaaaaaaaaaaaaattaa

SEQ ID NO: 55557 - DNA, 811 bp, Homo Sapiens
  misc_feature (720)..(720): n is a, c, g, or t
  misc_feature (722)..(723): n is a, c, g, or t
  misc_feature (735)..(735): n is a, c, g, or t
  misc_feature (738)..(738): n is a, c, g, or t
agaggtaatcccaacattacagaatttcaacagcgatttgatggaattttgactgaaggagaaggtccaagaaggcttaagaacttgtattttctctacttaatagaactaagggctttatccaaagtgttaccattcttcgagcgcccagattttcaactctttactggaaataaaattcaggatgaggaaaacaaaatgttacttctggaaatacttcatgaaatcaagtcatttcctttgcattttgatgagaattcattttttgctggggataaaaaagaagcacacaaactaaaggaggactttcgactgcattttagaaatatttcaagaattatggattgtgttggttgttttaaatgtcgtctgtggggaaagcttcagactcagggtttgggcactgctctgaagatcttattttctgagaaattgatagcaaatatgccagaaagtggacctagttatgaattccatctaaccagacaagaaatagtatcattattcaacgcatttggaagaatttctacaagtgtgaaagaattagaaaacttcaggaacttgttacagaatattcattaaagaaaacaagctgatatgtgcctgtttctggacaatggaggcgaaagagtggaatttcattcaaaggcataatagcaatgacagtcttaagccaaacattttatataaagttgcttttgtaaaggagaattatattgntnnttagtaacacanttntaaaaattgtgtaagtctatgtatatactactgtgagtaaagtatactttaatatgtggtacaatttaagttt

SEQ ID NO: 55558 - DNA, 967 bp, Homo Sapiens
aggagcgaggcctgggtggcgtctgcatctgcgggcccattcagctgcaaagcggcccatcgcttgtcccaaatgcgagagacgcttctggcgacgaaagcagcttcgagctcatctgcggcggtgccaccctcccgccccggaggcccggcccttcatatgcggcaactgtggccggagctttgcccagtgggaccagctagttgcccacaagcgggtgcacgtagccgaggccctggaggaggccgcagccaaggctctggggccccggcccaggggccgccccgcggtgaccgccccccggcccggtggagatgccgtcgaccgccccttccagtgtgcctgttgtggcaagcgcttccggcacaagcccaacttgatcgctcaccgccgcgtgcacacgggcgagcggccccaccagtgccccgagtgcgggaagcgctttaccaataagccctatctgacttcgcaccggcgcatccacaccggcgagaagccctacccgtgcaaagagtgcggccgccgcttccggcacaaacccaacctgctgtctcacagcaagattcacaagcgatccgaggggtcggcccaggccgcccccggcccggggagcccccagctgccagccggcccccaagagtccgcggccgaacccaccccggcggtactctctaaaccggcccaggagccgcccccagagcacccgcaggaacccatcgaacccccccccctcctccaccagctgcaacaacggagcaaggaacttccggcggaagcgcctccccctacggtcacatagccggacagccgtcggggggaagtctccctgagcctgagcccgtatgccggtaaatatctctacccaaccaaaactctccaagtgggacgaactctcacgcgtttgaatcgcgggcggagcgtcccacccggcattggaggggatgcgggggcgggcgctatatttgac

SEQ ID NO: 55559 - DNA, 678 bp, Homo Sapiens
  misc_feature (659)..(659): n is a, c, g, or t
acgaaatgccctcctgtactctgtcttcagcagccaactcctggagctgccaagtgaggggttaaagaagaggtggggaggcagtgtggctccctgggaaaagtctgttgctttggttctcagtcctgggtattctaggagcttggacacgggattgcgtttcctgtgctaaaattctctctcctggctgggctccggtaaactgaagctgctcgagaaatcacctgggaactctcatagccgtttgtcacccagggtgtacttgccaggacctctccttgctactcttcccaaagtcgggaggcaaagcggctgggtcaccagagcctgaccatactgacgctccagggggaagacgcagaggccgggaagagacaccccctcccaaacacataaaacttgccccttcctagcctcggctcccctcactggggccttgggcaggaccgacccgcatccaactaggcctaaggggtaggctctgagcctcttacccctaagaggcggagatgcgcccaaggcgggcgcccggcctgttccccagccctgcctggaagccccgcagccactgcattttgtttaaacacagatagcacgggcctttctcttattgctacagtgttttgtacacggttaaaacactagtaaagctttttcgntattaaaaaaaaaaaaaaa

SEQ ID NO: 55560 - DNA, 887 bp, Homo Sapiens
ggaaattagggttcagtttatcactggacattcaggaggcaagtcaatcttttttatttccttataaaattaactcttcaaaagctgttaaacagagagttatcttaatttttattgcagtaggaggaaatatatttaaaatatttgtagatttatagcaaatagagactcgttatttaaaggttaaataacaatttgttcttttgttgtttttgccagtttagggcagtagctgcttttgtcataaatatcttcctaccacatcaaaaatgctgcttttaaaatttttgtttataaattgagaaggaattttctctctataagtttctgtcattgaacagatcaccattaaaaagaatattagaatccagcatgaagataatggctaataaaaatgaggtacatactttataaaaccattaatcagatttgaatgaggaatgcttcccacatccttgaaagaaaaactgtggcttacgttttgaagtattctgagaatgaagtattaagatccaatttctataagcaagatcagacttgttaagtatgccgcaagtaagagctaattcattcattccatgtgtgccactaaataaagagattgagcaagtgccactgtgtggaacatttttcttttttttaatatttggactttccaattttgaaattatggataaagtccctaaattttctatagtggcttcttttctgtctgcatattttgttaaacttgtggatctaaaagcaatatcctgtctttggtggtggccctggtaggaatggtgtcctaattcttccaaagtaagattgacccaagcaagtctcctcgggggcgggttacatcctcccgggtcagaaatttaagctggaaataacattggccttta

SEQ ID NO: 55561 - DNA, 611 bp, Homo Sapiens
ggcacgaggttttaagtaagctgtaaaaatattattgaatatttactgtaaatatatgttcacataaaaaaataacttggagggtctttgtgtccctggcatattatcatcttcatggaaagaatccactgtggtttctgtagagtgattggaaaaatggattattttgaggattgaagaaagtgttctttctgcgttgtcactttgttcaacagtaaaactttattctcagtgttcctactctgcattgtttacatttttgacagttttttttaatcacctacaatctgtaaagaatgtatatattcttttcagcatctcagtttgaaaagacatgcagttaaacttgaccttttgataatcgctcttacaggtcattgtctgttctaacagcaaattgtaaacatgcgcttcatagatattgtggctctcagtcatcactttgtcctatggtatttattgaatgttcacatactaatggtgcacaggtgtttttttctataaatcttctgactgtcctgtaattcattcttaagctttaacttgaaggtatcgtaattgccggcatttgatgtttagcaataaaagaataaatgtgtaccagcatttta

SEQ ID NO: 55562 - DNA, 1094 bp, Homo Sapiens
  misc_feature (914)..(914): n is a, c, g, or t
  misc_feature (926)..(929): n is a, c, g, or t
tcagagatgattgaaccagcctggccagcatggcaaaaccctgtctctactatgatatgaatgcagcctgggcactgggaaatttaaaaactccccagataattctgtgcagccaaggttgagacctcctagtctagagctttgctatacacagggtggtccacaagccaggagcatcagcatcacttggcagcgccttagagattcagaccccagacccactgaatctgaccctgcattttcactagaccccaggtgatcagctgcactagactcaacctctaaaccaagacctcccaccctcacagtctatgatcctttagtgaccctcagctgagtcctgtgctgaactgtgtttgttctccttgagcacatgcccgctgaccagggacagactggatgagcaagcaacctgctggctatggagaagagccaggctgggtaaatgtttgctgtgactaagccaggatcaaagaactgcctgttgcttgcactggctggcactgagcttgccactctgtgaactgtgcttccttcccctgcatggacctgtgcctcagtcactattatccgcaggccttctccaagggcagccctctccttgtttatccctcttaagcctgcgtgcaggaaggcacattaaccctgtggccccctgcaggcaggagggtgttgggtgcccttacctaccttgccctttttcttgtaccgtaggctgtgccgtttatgagtaagtgatgtgtgtctgtgtgtgtgtctagaagtgctgcactcaccttgtgttattggaggttgtgtaaccccctagcttttgaccctggtctcagatgttcctttttccggtctctgtccaagcgtttaccgccccaagtttggaataaaaggctattagccgtggcacttttaaaaaaaanaaacgcaaaaannnnccctccagggcttctttgtcgggggggcggaaaagagaggaatggaatgggcccgtgggccatagcgggtttcctgaacccacttttctgggaaaaggggggaaaaactgcccggtcccccctataggggaggcgcttataattttccgcaaaaccgggggtaac

SEQ ID NO: 55563 - DNA, 578 bp, Homo Sapiens
caaaaacttttatgtctctcagactatacagcctctatacaaaattgagatgggggttgggggcaggggctcatgcctgcaatcccagcacttagggaggcagaggccagaggatcacttgagcccaggagtttgagaccagcctgggcaacatagtgagactctgtctgtatgaaaaaaattaagaattagctgggtgtggcatagcacacacctgtggtcccagctacatgggaagctgaagtgggaggatcacttgaactcaggagcagccttggtgacagaacaagaccctctctcaaaaaaatatttaaaaaaaggtgggtcatccattctcctttaccaaacaggctttgaaatgacacattccattcatttgcatctttttaaaaaacttctgattccttactgagtgtccagcagcctcaaagtttttaatggtagctgatgcagacataaacagtgctcaatttggcccttaaactataaaatcaagaaagagtatttcaatcccatccacctgcctgcaagatttcttaatgttcactagttataaccattgtttaaacagtgctttt

SEQ ID NO: 55564 - DNA, 644 bp, Homo Sapiens
ctttcccctgttgtggaagaaggaaagggcagtactgaagcaacaaggttctgctccatcacctcagtctccagagccagccaagagagagtgcaatttgagatggagacagtgattgggtttttacctcagagaatcacaatcctagtctatctagctcctcacccagcatatgaagcgacgtcctatgtcccacacatggtcagtttgctgaaacacctccaggaatgagcaactccctccggtttgaaaaaagctctggtggctgagtgctgtggctcacacctgtaatcccagcacttcgggaagccaagggcctcctcccaaggagaacatgagaccacttcatatctggaactctagaaacactggctgcaacaatcaacctcctgtgccaaggctggccccactcttgtagcatggacactgctagctgggttcaaatcccagctccagcagttgccagcgctgggtgacctcgagcaagtgactactcctcactggattgtaggagaactaaatgtgatagtcattatttacagttcaccacacgctcttcacatccgttacctccctggatcctcaaaataacctcataatattggaaggcaaaaaaaaaaaaaaaaaaaaaacaaaaaaaaaag

SEQ ID NO: 55565 - DNA, 677 bp, Homo Sapiens
gccagagtagtcacactgaagaaatgtccactcagtggctcccaacctatgtccccattcctccctcctgccacaaattccccaaaaattcacagaatcattgctctcctcaccgctcaaaaagggggtccagctgggccatcaggttgttcaggtgctgctctgtctgggccagctgttgtgtcaactgggccagctgttgctctggggataagggaaaaaagggggcagaagtggttatgtatcttctgctgtcccctaaactcccccgacccagcacagacttctgctaaacccacctgactgcagtggctgctgcttgcttgcctcctcgtggagaaccgcagtttcatctttcccctgttgtggaagaaggaaagggcagtactgaagcaacaaggttctgctccatcacctcagtctccagagccagccaagagagagtgcaatttgagatggagacagtgattgggtttttacctcagagaatcacaatcctagtctatctagctcctcacccagcatatgaagcgacgtcctatgtcccacacatggtcagtttgctgaaacacctccaggaatgagcaactccctccggtttgaaaaaagctctggtggctgagtgctgtgggctcacaccctgtaatcccagcacttcgggaagccaaggggcctcc

SEQ ID NO: 55566 - DNA, 850 bp, Homo Sapiens
atctgtttcaaacaggctgacagctgggtggagaaggaggagccggcacctagcaactgacggcctcgcacggaactgccatcctgtgagggcagcggtggcgcccggcaaagttggagcccttgcggtaccagaaagcagcgagagcgaagacctgggagccagggcaggggtggctgaccccatgctcagcctctaggggacggcaggccatcaggctgggggctgtgctatgtgggatggatgtgtgaggaaccccggttccacttaacaactaaatacaacatcttttgcacccctagaatgtcattttgccctcaaccttggtatttctcctggggcccttttagtcttgtgctgactttctcctgtcctcttccagtttagaataaracaggggagaaaaaggcttttcgagtgtgggacaaggtctgatgtcagtgaacggaattgaagagcaagacatggagcctggctggggctaagcagccccctcctccggatggcacaggctctgctaggttccggacacaggcttctgggggaagggtctcccttggccatcacgggaatggagtccatgctagaaagagctcagtgttgggctgggtttgccagtagaacactgcgttccagtcaccccggtcttgccagaagaaaccagcacctctttcccgtggctcctgtgttcagaatgtggtattggctctggcccagccttctcccctgttacccataattcttgcctctttccataatccgtggtttcagtttgactttgtatataaagttggggttttttttttttttttttggcttgttttttaaawaaaccaaagtcaaaaacaaa

SEQ ID NO: 55567 - DNA, 840 bp, Homo Sapiens
  misc_feature (729)..(729): n is a, c, g, or t
  misc_feature (820)..(820): n is a, c, g, or t
ggaactttgcaagaatattcatattataaatgtctcatctgatggaggaacgtgtgcatttagagagagggagagttttcaaggtttatggcaactttgtggaggacctgggtaactcttacccttggccaaaggaagaggttttcctgtctggcttctgaggttggagggggcacttagcagtgaaccttaagtctgggtacatgtaaccctgctgaggggctgtgcaggccgctcctacggtcctttggcctgaggcagggcgggaggcatgcaagccagtgggggaaaacccctctgaagctgggcagccctctacctgggccccgggagccgtgctccttggaacgcaaagggccgaggagcatctggttttcatggcaaagctctactccagagctcctttaacatctgctaattaagtgcaataaatttttctagaaaatggcaaagatgacttccaggtggatattgctctcttacggtgttggggatgccagaacaccacttggttttatttttctaagtgcatgtgatgtgatagagtgtgtggggctctgtgtccttccctgggagctggcattccagcgggcccctctctttacctttgttgggggaaggaggcaagagagaaattccttcttcccagccagagagggcagaagcagaccgtagcccattggccttatgtgcgtgtgtgcgtgcaaatgtgtcactgctggtgggccnggaatgatgtggtgggagggaaaccggggaaagaatccttttcagacaaaaattaaatatttttgaaatggagaaaaaaaaaaagaaaaanaaaacttccaggcattctta

SEQ ID NO: 55568 - DNA, 234 bp, Homo Sapiens
gcacgagatactattttatccatttcgtacagcttacccatttcctttatcacactctgttcctgcttctgtgaactttggattctctgctctatttgagcattgttcagaagtcactgaaatatttgagttgtcagaactatgtgttttctgggtgcttcatttcttatccaattctcctaattccactgtagaagcttttttcaagaagtaaaaaaaaaaaaaaaaaaaaaa

SEQ ID NO: 55569 - DNA, 632 bp, Homo Sapiens
  misc_feature (431)..(431): n is a, c, g, or t
acttacaaacaagcaactgagtcacttcattttctttagtgtagtatgtgaaggcactggttcaacaggatggctccagaactgtgtttttctaatgtttggtaaggggctagtgagaattttaatgatatggtgaagaaaaatatatctgtataattaatttattatattggtgtatgggctgtgagttcaccttttagtggtcatttgtcatttcataacaactatgcattttggttcactgtgatgatgatctatatttagtgactgcaacatgtttataccactgattcaaattccatccatgatgaagttatacaaataatgcatatattgataacttttattgcaaaaatgtaaatttaaaacttgtataatgttcttgtgctttttaaaataaaatatatgtgtatatttaaaaggaaaaaaanaaaaaaaaaaaaaaaaaacaaaaaaaataaaaaaaaaaataaaaaaaaaaaaaaaaaataaataataataaataataaaaaaaaaataattattatatctttttggccccctttgccccatttttttttaattttgaaaagatttttttttgcgcccaaattggggctcttttgccaacttcccccttttggggggcgttt

SEQ ID NO: 55570 - DNA, 549 bp, Homo Sapiens
ccaagtggcattcctagtaagttgggtagaaatgacattttccagagctgaaggagtgaagagcccttggccatactagggctctccttcccccggggagtgggaactcagccacattcagaattcacatcgcctttgttatgtccagaggagaggcataaaaaggcactctcccccaccacccctaccaaatctgggtttggtttggttttatttaactagcaaagttaatccagtaatcgcaaattactccagatggttaaagaaaaccctttcagaatacagaacgagaaaactagagtttgaccaataagaccaatttctgccatgaagaaccgggggacgcaagttaattgtttaacgtactctcattttaagcaccttctttcctgtctcttgattgttttttctgaaggaagtgtaaagaatgtctcagtctgccttaaaggaactgtgaaggcttctctgtaatttaagcttgattgaagtgaactgaaacattgtctaatgtctttgtggctttagagcttttgttatattgtgcctata

SEQ ID NO: 55571 - DNA, 501 bp, Homo Sapiens
atctgtcttcatcttcccgccatctgatgagcagttgaaatctggaactgcctctgttgtgtgcctgctgaataacttctatcccagagaggccaaagtacagtggaaggtggataacgccctccaatcgggtaactcccaggagagtgtcacagagcaggacagcaaggacagcacctacagcctcagcagcaccctgacgctgagcaaagcagactacgagaaacacaaagtctacgcctgcgaagtcacccatcagggcctgagctcgcccgtcacaaagagcttcaacaggggagagtgttagagggagaagtgcccccacctgctcctcagttccagcctgaccccctcccatcctttggcctctgaccctttttccacaggggacctacccctattgcggtcctccagctcatctttcacctcacccccctcctcctccttggctttaattatgctaatgttggaggagaatgaataaataaagtgaatctttgc

SEQ ID NO: 55572 - DNA, 840 bp, Homo Sapiens
  misc_feature (796)..(839): n is a, c, g, or t
tggtactacatgcattagcgaaaggttaagtaagttttgttctccactgaagtaatacttaacatctcagaaaaaattttgcatgttctgtagttttgtattaaatcagtcatttcatatgcactatatcaagtacaaacaggtagtttacctgtttatagtagtgtactaacaaagtctcccttgcagcttcagactgttatctataggcttatcgttcaaatacagcacttgaatatcccaagtagttcttctacgcatagctcacctttctaaacccagttaagcatggaagagaggtagtaggtaggtgcagtgtgtggaagctgcaaacaagtaggccttttattcattgatatcttttcccaagtactggattttaaatctgtatgtatctgtttgatttttttttctaatatttcagttgagctgctgttttcttccatgcaatattgtatactcaattgtgtatagaagaagctggtgagagtgccctcctacataaataagcaattgcagtgttttgcatgcaaaatataaaaaatttaaattgtcctgattctattttgtaaatggagaaacaatcatatctttctaagcggtaatggaggaagactagtgctttgtgcattttgatatatttgagttcattttttccacaatgtcatacttttgacgcagttgggtttctcataagtatcctagttcatgtacatccgaatgctaaataatactgtgtttttaagttttggtgttgccagaacaaatgggataaaacttgaatttgtggctacannnnnnnnnnnnnnnnnnnnnnnnnnnnnnnnnnnnnnnnnnnnt

SEQ ID NO: 55573 - DNA, 708 bp, Homo Sapiens
  misc_feature (20)..(20): n is a, c, g, or t
  misc_feature (28)..(28): n is a, c, g, or t
  misc_feature (35)..(35): n is a, c, g, or t
  misc_feature (42)..(42): n is a, c, g, or t
caagagagagtcactgccangctcgttntgtgtcntgagccntatgccaagccaccctataaatcatgcctgtttagatgtttgagttctgtttgctattgttatcttaaaggtgtataactctgacatgccagacatcaaattaagctcaaattaagctctcgtttaaatgtttaaacacctaatttatattctaattgatcccagccactgatgcatgtactttagctacttctgctaaataagcatattaattttccacatcaggccatcagatcttgagaaccaacagttatctagaattccgtgtctactaatgtttcacctgcatgcagccttcattaattttgtagcaaaatataaagtgatcattatgtagtttctggattaaaaaaatttgtgtgtgaagttgctttgtaaagtgcatgtggaattaatgggacagtgtgccctttgtgttagatgttagagcaaaagaaagggcttatagtgttagtattggagcactttgaagatagatattttcagaaaagatgtaggatttaaaagttaaattttaaattttagaaaaagatatgatggcaattggaaatagtcacaatgaagttcttcatccagtaggtgtttaacagtgttattttgccactggtaatgtgtaaactgtgagtgatttacaataaatgattatgaattaaaaaaaaaaaaaaa

SEQ ID NO: 55574 - DNA, 799 bp, Homo Sapiens
  misc_feature (670)..(670): n is a, c, g, or t
  misc_feature (732)..(732): n is a, c, g, or t
  misc_feature (755)..(755): n is a, c, g, or t
  misc_feature (778)..(778): n is a, c, g, or t
gaaaatgaaaaatgattacaaaataactttcaggttttctataatcaatggctttaaaaagtagacagtcttaattttaaattagcttgctcagaaaggtcatgccatacagtcctatcataaaaggaacactataagaattaagcaatgaacagcatgatttctgatcacccagtgaggactgacagtgtataaaagatacaggtatgctactggatgtacccgataattgtttgagagttttctagtgaaaaactcaaatatgctagcttaaccacagtagtagggggcaaccttattatatgggggaacttcaaaacatactgtcattttgtagaaggagcccaggtaaggatgcctaatcctgtccagtttggctagaactccatagccaaaaatgcagatttggattgaacatttttttgatgggacttctatcaatgcttaactagtaaaaacacatcttttctataagactttagaatactgtggtttctaatgggttcttgaataatgattttgcattgtgtttttctagttaatggtttttggtagtatttaatgatagcacagtttggggttttattggtgtcttgaagggggaggatattgaatttggttttcttagagaaaacatcaggtttgctcaaatagactaacaacctggtgnccttaagcacatactaccatgaataaactcaggaaacaattttcaagaaaattcgaatgccntgcttggtgatggggatttttgngggaaaaaaccatgggttcaagncctttcccaagaacaacttta

SEQ ID NO: 55575 - DNA, 961 bp, Homo Sapiens
  misc_feature (483)..(483): n is a, c, g, or t
  misc_feature (787)..(787): n is a, c, g, or t
tcgtggtggaagttccacagctggccgcttgggggggcccttgcaccgcactgccgcctcctgactgccccgatccccgcagcccctgtgccggatttcatttccctcctctctcccagggtacctggccccagcactctcccatctgttcttcaggaaccgactcctctccagttgcaacaccagggagaaaggggcctccacatgcccaagtacccctgcaggatgaagggcaggccggcccttgatgtgccatttctgaataatagtcactgccgccgagtctaggatgtcctgttctaactcagccctgcctcggatgcaccaccgatctgtgcagagtgggtgtgggagtgtgggtgagggtcgaaatgccaaaggtctactttccagaatcaagtgccttctgcaaatcatgttggaaaagtccaaacctggagatgtccctgtgcctccgcccctacacaccccttttccttcagntgtgttaggaaggagaagttttcagaaccctctaggctggtggctttcaaacttcagaccatgatctgcagcaagaaacgtgccttccattataaatcagtccatttgcctacaactgtgtttcaaggagggtttcataaagaaattcttacccttagaacctcggatatcctccaaaggtttaggtttccatttttttaaaaatgctttcttagaaatccctagattggggcatggggatggcacccggcatagaaaccaaaggattagggcaagcttagaaaggcaaaaacccccccccacnccaaaaagtagaaaaccacccagagcaacaacgggagaaagccacccccaaagagagggaaaaaacaggcattatggggtaaacaaaaggataggggcccgccccacaccccgccgaaaaaatgggaccgacacccccccccccgcgtttcccgccaagcccagccacacccgt

SEQ ID NO: 55576 - DNA, 582 bp, Homo Sapiens
  misc_feature (330)..(330): n is a, c, g, or t
ctagcagagcgtcagtgcagtcgtgttatcccggcttttacagaatattcttgtcctattttagaattttccggagtagtttatttgcagtctgttgattatgtgcagtagacccgggacactgcgttttaccgatcaccttgaatgtggtgcctggatgtgcctttttttttttttccctgaaattattattaattttctattgtgagttcatcagttcatagtttttttagtaaagaagcaaaattaaaaggcttttaaaaatgtacaacttcagaattataatctgttagtcaaatatttgttattaaacatttctgtaatatgaangttgtaatcctggccgtgagcttggaagcttacttttgattcttaaagcctatgttttctaaaatgagacaaatacggatgtctatttgccttttattgtaacttttaaatgaaataatttcatgtcaatttctattagatatatcacttaaaatatttggttttaaatcacaagaatatgtattctttaataaagataatttatgatcatggtataattaattgaaatttattaaaatctgtttttattaa

SEQ ID NO: 55577 - DNA, 623 bp, Homo Sapiens
cacatatatgatacaaatgctttcaggctgcttaccttaccgtgtagtggtaactattcacttcttaatttatgacctcaatcaatttaattgtctagaatgtaaaaagtctttaagacataagaattcctcaaagaagccatacattttttaaggtggggattgacttttattccaaggaacaacatcagttcactgttgttggagacatgacaatcattttcatcccaagaacactttaaggaaacattttacaagtatgcttgaaagaatgtcactaactggtccagaattttatcttcttgatttttccagatttctctatgtttttgagaaagatgttaatgttttgccatggtaaaagatttcaaacctcattttttttgttccttttcttgttacttttaagaaaactcatgctctgtttctctgaatcaaatgaagtagaagtttacaaagctaactttcttcttgtctagctattaacatgatttgtcaaatgcatgtttttttcagccaaagccttgtttccatttttgttgatgtgtactcttgctcttttagctagagtgtatgtgacacatcaaagaaatacatcattgtatccacaaaaaaaaaaaaaa

SEQ ID NO: 55578 - DNA, 593 bp, Homo Sapiens
gtaattttccagaccaaccagcgtcagtgggaaatctgacctcttttggcaaactgcgatcattcattttcctgagtcccctggtggggtggggggaattctgcctcaggaccctgaggggtctttggggcaagatggccttggtaatgcagccactaagaacaggacttcattcaaaggcataatgaagtaaccaggtgaccatcaagtaaaattaaagcacaagatcattgtaggaggcttccttgtcaaagacgtgaacgtgggatttccaacgcaccacggtgtgtccactcatcactgcatgttaggaactgctgtctctttgggacacgagttaaaagaacacactaatttctggagtgtgcctgcagcttcacggccttcattttgttactaagttattttctggaagaacagcaaaaatttcaggttgaaaacagaactttccaagtgctactgaaattccgcagagaattacgctgcgatggtgggtttcttaccctagaaacatcctaacctgtatccacagaagatgtccttttatttttttacaagatcaataaaatcaagagaaacgacaacaaaaaaag

SEQ ID NO: 55579 - DNA, 710 bp, Homo Sapiens
  misc_feature (83)..(83): n is a, c, g, or t
ttttttttttttttttttagagttatcattgaatttattttattttaaagttatctatgtacaccaagtaaatacacacaggngggttgcgcagtttggtttgtcttccacgctggcatgcaacattttggcagatgtgagtgggcaggccaggtgccccttgcagtgaccctggctctgaaagggatgcggtgaaggtggggagcaggaggaggaggaggatgtagtgtgaagcttctggtgaagggtttgcgtgtgtgttgtttcttttttatgtaagtgaattatatttcccttacatcttgctaaagagaaggctgctccctctgtgtcatctctctcctcatctgcgctacaccctcacatttccttatgtgtttttaaaagaaccatgtggtggcaacattacataaaaccccctggattcttaagtgccctgctgacagcaaatattagcctaagtccacaggcccacaggaaccttccttccaccctagtgggtctggagacagcatggcttgtctaccccaccgttgccctcttttccatgagttgcagctttagtgcagaggagccagattggacccccttcctcagaacaatggttttcaaactactccacagaatcctcagggtctcttaggactgttcaagggctcatttgctgaggagcctttgaacagtcagtcctaagagacgctgagacttct

SEQ ID NO: 55580 - DNA, 645 bp, Homo Sapiens
gattttgccaaaagttagaaaggtggagctgtaagccatgtgcttgttgcctttgacagtgacagtgcgcgtcttacaactaattccactaggcatgggaatgtcacctcctttgccactgtaccccatcaagcttactctgaatcaaaggttttgtaaaacttttgaaaatgaacttagctgcaaaatatagctaaccactttccattgcaagctttgcaaagtgaagagaggttcgtacttctcataatggtatttagcacaattgtaagatacagttttactgtttgtacatcgtttttttccattaaacttttctagagaagacaaaagcttacactggtgacatggataagtgagatggtgtctaacgagcagtgcaatattaggcggtgcaatagaggccctgttggcaagatgagttttgctggagagctggacagtgttggttagcttcctgcattgattgcccctgggcgttcttcccccttaactgtgaaagcagagtctataaatgaactctttgctcttacaaggtaatttacatattttctttctgttgaaataactgaaaatgttaaatctaccagtttatgtcttgtaaacagagtgtcatatgtatttaagttgtgtatttttataaag

SEQ ID NO: 55581 - DNA, 842 bp, Homo Sapiens
  misc_feature (698)..(704): n is a, c, g, or t
  misc_feature (709)..(714): n is a, c, g, or t
  misc_feature (716)..(716): n is a, c, g, or t
  misc_feature (718)..(718): n is a, c, g, or t
  misc_feature (734)..(734): n is a, c, g, or t
  misc_feature (739)..(739): n is a, c, g, or t
  misc_feature (747)..(747): n is a, c, g, or t
  misc_feature (750)..(751): n is a, c, g, or t
  misc_feature (758)..(758): n is a, c, g, or t
  misc_feature (769)..(770): n is a, c, g, or t
  misc_feature (781)..(781): n is a, c, g, or t
  misc_feature (786)..(786): n is a, c, g, or t
  misc_feature (789)..(790): n is a, c, g, or t
  misc_feature (796)..(796): n is a, c, g, or t
  misc_feature (806)..(806): n is a, c, g, or t
  misc_feature (809)..(809): n is a, c, g, or t
ttaatcatttctaacttttgatgtaaagtgagagatgtacaactcttcctttcacttgaatacttagaggtcattatacggctagtgattggtttaatttcagtgttgctgtttcacgaaataggaaggcctgaggagagagaaaaggaaacagcagatgtgtggagcagtcagaacatacacatgtatccattaagttcactatattatatgggcatagttcatggtgcctccaaaacaatagtaacatcaaagatcactgattgagatcgctataacacaaataacagttaagaaaaagttcagaatattgggagaattaccagaatgcgacagaatacatgaagtgagcatatgctgttgggaaaatggagttgatacacttgctaggtgtgggattgctacaaaccttcgatttgtaaaaaatgcaatatatatgaagtatagtacaatgaagtacaataaaacagtgtatgcctgtagtattatctgactggatgtttactatctacagaaacatctgaattataccatttgatctttgctttaaattaagttggtgtcttaaccacttaggtctggttgccttcctctctatacaaatcggccctctatgtctgtgggttctgcatctgtgggttcaaccaattgtggatcgaaaacatatagaaaaaataaaatgtgtggttgcacctgtnnnnnnnaaaannnnnngncnggctgctctagagtantcccntcgagggnccnnaagctanacgcgtacccnnagctttctttngtacnaanngtgctncctttataantgnaagtccgtattaattaaagctagggcacttggc

SEQ ID NO: 55582 - DNA, 629 bp, Homo Sapiens
  misc_feature (547)..(566): n is a, c, g, or t
  misc_feature (568)..(571): n is a, c, g, or t
  misc_feature (573)..(576): n is a, c, g, or t
  misc_feature (579)..(579): n is a, c, g, or t
  misc_feature (617)..(617): n is a, c, g, or t
  misc_feature (619)..(619): n is a, c, g, or t
gaaagctgtcagttcaaaaataagcttttttgttgttgttgaagatgaagtgtgttaggtgaaaccaaaaagccaaaaaaagtaatttcatatatagcatctatttgaatataatctttctttaaaatttcttttagcatagcattttcagtgctaagaaagaatctctatgttatattttgttaaaataatggctttctaacaaagcaaatggtaaagtacaaagttggaagatgtcaagttaacgagacttgctgcaaagccttgcagaacggaggaggctctgcctgctggctgtctctccctccaacctctctacaatcatgcctgctttgaggtgttctgttgcagcaagctgcaccttgggtcactcttttggaatattttgactataggctgcgtcacaggcagaaaaggagttgatggaaaatggactaaaaaactgacatgtttgaatcagtgctagagggaacagattgtgaattttgtttacagcatccaatatttggatttttttgtaaataaaaaagttatttttttctaaaannnnnnnnnnnnnnnnnnnnannnnannnnaanaaaaaaaaaaaaaaaaaaaaaaaaaaaaaaaaaaaaananggggggggcg

SEQ ID NO: 55583 - DNA, 770 bp, Homo Sapiens
gcaaaagctcggcaaccatggatccaaccacaggactcatttacattggatctcatgaccagcacgcatatgctttagatatttatagaaagaagtgtgtttggaagtcaaaatgtggaggaactgtcttttcctctccgtgtttgaacctgattccacatcatttgtattttgctacattgggaggacttttactggctgtaaatcctgctactgggaacgttatttggaaacattcctgtggaaaaccactcttctcttccccacaatgttgctcacagtatatttgtattggctgtgtagatgggaatttactctgctttactcactttggagaacaggtttggcagttctctaccagtggaccaatcttttcatccccgtgtacctcaccatcagagcaaaaaatattttttggttcccatgattgctttatctactgttgtaacatgaaaggtcacctgcagtggaaatttgaaactacttcaagggtctatgcaacaccgtttgctttccataactacaatggcagcaatgaaatgtcgctggcagcagcatctactgatgggaaagtgtggatcttggaatctcagagtggacaattgcaaagtgtttatgaacttcctggagaagtcttctcttctcctgtggtcctggaatcaatgctcattattgggtgtagagataattatgtttattgtctggatttatcgggtggcaatcaaaaaataatcaaatacagtccttattggtataacaaatgtgagata

SEQ ID NO: 55584 - DNA, 596 bp, Homo Sapiens
gtccgacgaaacctaatgttagaaccgcatcctttcagctaagggagggttggatttattttccttgttttagagactacaaatttttaaatatcccattttgactgagaatattgacatataagggaagaagttttctaaattgtgaaagtctggttcttaattaaagaattttttttttaatatcacggttaaaagctgctgccagttagccaagacattatccaccaaattgctttgtgatttatacagggattaatcaaatctggctactataacatggggcattgtaactttaaagtagtgttttaattacagtgatgtattttagactcacattttgtgattcaaatatgttataaaggcattcttgcaccatggtaaagaatgtgtgtggtaaatctccgtttatatgtagttggaaaaaattcactgaataatgttttaatgatagggtattatgatacaatgtaaaaaacaattggttcttcagcagtacagaaagtaaactatatatgtgctatcaggaaaccccttcatactgtgtataaaattgcaatctagtgaaataaaccgtatgccatggaaaaaaaaaa

SEQ ID NO: 55585 - DNA, 581 bp, Homo Sapiens
aaatgaggaggaagatgaagttattgatgaccaggaagaggatgaagaagaaacagatgatagtgacacttgggaacctccacgacatgtgaaacggaagctgtctaaatcagatgactgaaatctgcctaaaacgttgaaggagaatcaattcttcaactcaagatgtctgatttactgtgaatttgcccaatctttgatgacattgaaaacgttttggggcatacacactcaaaaagcaggatccaatacccaaaagaaatggaacttaatgttgtgccaaagttaaactactgcagttggtggaagttctgcaatgtaaatagaacactaattaaaaaacaacttgtaaaaatgcaatttaaattttaatacagtacatttttcttctaatatgatggagacattctgaatcttagactttctgagggggtttaatgaccactagagcttgtcctcatattcagtccagtttaatactgtatgtctagtaagatgggctatatattgcctctattctttgagatgtgattaagcttagaactttgaccaaaaattgtacagttaaaattgttagaaat

SEQ ID NO: 55586 - DNA, 540 bp, Homo Sapiens
ggatttaataatcttgctgtttttcctctttatgacaaagaatataattgggaggatgaagtgtcttaaaaattgtagagaccagctcactggaatgtttttccatccctgtattcatggcttgactttgtgactgctctacactgcatgtctgacattgcagagtgagctatgttgaggtaaactggttggttgtcattattttgcaatcagcctggtctctcccatgaagatgtcgtgtgcataagcacaatcatcactgattagaagatcacagcagaatacccttggattagagagaagttcgtaccttgcatttctctgaattctagtctctcataagcactgctttgctggatgattttcactgctttgtgttaatgactttgagcgatctctcacatgatggggttctttagtacatggtaacagccatgtcatcttacacacctagcattgtgaatgctgtagtgacatcctttataggcaccttacagctcaaaacttttgtttcatttcatgccttacttatcaaaaagg

SEQ ID NO: 55587 - DNA, 558 bp, Homo Sapiens
gagcatttgagggcaagcgaaaaagccctcttcatcctccagaggcaacaaagaggcagcagaaatggggaaagattgtgagaggcagggcttgggtctagacctggacttaggcaagatatgttgccctcaaccctgagttttcttatatgtaaaaagggaaggttgggctggactagatgaggtcaagatttgccattctgggaggctgatattccagagaatcaaaattaatcctaaaccaaagctttatggctgctacagagacatgtcacatttctgagacttgtcaccaagagtttgtccctcagactttggcgctgttgaatgcaaagacaaggatggccaccttctggttcttgcctgttgtcctcagctgagagcagtctcggtaaaggtggcaaagattctgtgacctcagaccggggaccaaatgcttgggagtctgatggccgggctgggccaccattctcatagctctcattctgtttggagcaaccaaaggatttgtgtgaagttatttggaaaaggaccttaactgagcagtaatcttttttc

SEQ ID NO: 55588 - DNA, 649 bp, Homo Sapiens
  misc_feature (131)..(131): n is a, c, g, or t
gagacaaagtatttatgtaattatttgataactcttgtaaataggtggaatatgaatgcttggaaaattaaactttaatttattgacattgtacatagctctgtgtaaatagaattgcaactgtcaggttntgtgttcttgttttcctttagttgggtttatttccaggtcacagaattgctgttaacactagaaaacacacttcctgcaccaacaccaataccctttcaaaagagttgtctgcaacatttttgttttcttttttaatgtccaaaagtgggggaaagtgctatttcctattttcaccaaaattggggaaggagtgccactttccagctccacttcaaattccttaaaatataactgagattgctgtggggagggaggagggcagaggctgcggtttgactttttaatttttcttttgttatttgtatttgctagtctctgatttcctcaaaacgaagtggaatttactactgttgtcagtatcggtgttttgaattggtgcctgcctatagagatatattcacagttcaaaagtcaggtgctgagagatggtttaaagacaaattcatgaaggtatatttgtgttatagttgttgatgagttcttggtttctgtatttttccccctctctttaaaacat

SEQ ID NO: 55589 - DNA, 688 bp, Homo Sapiens
  misc_feature (658)..(658): n is a, c, g, or t
ccaagatgttaccattctgatgttggagcggccgccgattagcgattttttttttttttttttttttttttttttttcccaggaggcggcgacggcggcggcggggggagaggaagagaaagaagcgtctccagctgaagccaatgcagccctccggctctccgcgaagaagttccctgccccgatgagcccccgccgtgcgtccccgactatccccaggcgggcgtggggcaccgggcccagcgccgacgatcgctgccgttttgcccttgggagtaggatgtggtgaaaggatggggcttctcccttacggggctcacaatggccagagaagattccgtgaagtgtctgcgctgcctgctctacgccctcaatctgctcttttggaatcatcacattccacttctaaaaggagctttaaagatggcctggttgaacgtccttcctttgtgagtgaggaaattaagtgcagattaagtgacttgccaaagatcagatagtccaatggtggcagtgccaggaacagaattcagctttcttgcccctagacagtgtctttcacttgacccttactgagttttgaaccttagaattactaagattgttgttgttgttgtttaataaagaataaagctttgaaaaatttgttaatactttnaaaaaaaaaaaaaaaaaaaatcgctaatcg

SEQ ID NO: 55590 - DNA, 583 bp, Homo Sapiens
aggaagagaaagaagcgtctccagctgaagccaatgcagccctccggctctccgcgaagaagttccctgccccgatgagcccccgccgtgcgtccccgactatccccaggcgggcgtggggcaccgggcccagcgccgacgatcgctgccgttttgcccttgggagtaggatgtggtgaaaggatggggcttctcccttacggggctcacaatggccagagaagattccgtgaagtgtctgcgctgcctgctctacgccctcaatctgctcttttggttaatgtccatcagtgtgttggcagtttctgcttggatgagggactacctaaataatgttctcactttaactgcagaaacgagggtagaggaagcagtcattttgacttactttcctgtggttcatccggtcatgattgctgtttgctgtttccttatcattgtggggatgttaggatattgtggaacggtgaaaagaaatctgttgcttcttgcatggtactttggaagtttgcttgtcattttctgtgtagaactggcttgtggcgtttggacatatgaacaggaacttatggtttcagtacaa

SEQ ID NO: 55591 - DNA, 706 bp, Homo Sapiens
  misc_feature (706)..(706): n is a, c, g, or t
agattttgatgggcgagttgttacaagatcatatttggaaaaacaagattttgaccaaatgttacaagaaattcaagaagtgaaaactcctgaagaactagagacctttatgcttaaacatggagaaaatattattgatactttaggagctgaagtagatagacttgagaaggaactgaaagtaagatgtattcataaaaataacataatgataatggcagctatttttttgagtacttactctacagcagacactaagtgcatccatcacatgcatgctttaacccactcataactccacagtgtgtaggtatttataagcaagaaaatgactgggttagataagttgaataatttacccaaggaaatagggaaattgtgatttgaaccagattctttacttttaaacactattttatgcagcctgcttagtttctaaaatagtcaaagggggttttttgtttgttaataaataagcattttgaaagttcctagagaaagatgaaaaggaaactttagactgtggtcaaaagttagaaaaaatagaatgtatatcttgtttttagccatttgaaattattttctgtgttgtgtgtttctattcagttggatgttattgtgaatttattgattatgttactgaaatattatctgatcctgatcagggtgtcttttaaatgtctcagtgttctcaaattggcattan

SEQ ID NO: 55592 - DNA, 683 bp, Homo Sapiens
cttcaagttcctgaaagctataaaagtttctcatgacttgagtggttttttccctgcccaccagaggagaaagcccttgtagaattctgcagtgttacaagtgttccctacaaaaactgaaaccatcagctcctctttaacaagttggctttttaaaagcacgtaattacaatttaatggtattctgtaaagtggtgctctaggcataatttaaattctttttaatgactatatttcttcaaaactttgaaagaaaaatgtgttctttttgctgcatcctttgtaagaagactgccaacagaggaaaaaggactttacaaattaagaccatcttggtttcatttccacaaagatgagaacaaatcatggtgttaggaaaggatccttataagaatacaagaatttgaaagcccttggtggttatcactactatatttcatatttccacagaagtgacttagccaagctctgcattttgagcctgctgactttcatttacaaggaatgaaaggctgaaaatccatgctgctgtgtctgtagataaaggtcaaaccatgtttgagttcttcactgttgtgtccacctacataaaactgagtaagtattgaataaaaaaaataaaaaaaaaatcttgattctgcggccgcaagcttattccttttagtgagggttattttatcttg

SEQ ID NO: 55593 - DNA, 632 bp, Homo Sapiens
aggccaagaattcggcacgaggcttgtcactgtattttaactgtgtaacaattattgaaggcgaaaatagaagttgggtcatctttgaacacctaccttttatcaatgaatatttttagactgttcttcagtatctgagtcagagtttattgtaatttgttatttacaccaaggtggcatcttagtctaccttcagtgagacttgcgtttcaggggaggggcgtatgtgcatcctcggtctcagttatgtaaacggtctgatctgtaaaatagtggtagcacatgccatgtgggatagttggtggagatgatagatggagttaagcacagggcccagcctgtcagcagtagctactattattgttgcccatttcccctgcaactgaggtgagaggttttcctgagtttgaagctgactggcccacagttaaacgtaacagaccagtttttcagggtgtcagccaacctctattagtgttcttaagtacagtttctgttataaaagttcagattattccttgaaaatttggatctacctcccattattatgagtaatacatgcttatagtaaaaaaaaaaaaattgtgagaaataaatattaagaagaaaaaaaaattaaaaaaaaaaagaat

SEQ ID NO: 55594 - DNA, 592 bp, Homo Sapiens
gttcagaccatggaacctctgatccaagcagcccagctcctgcaattaaagaagaaaacccaggaggacgcagaggctatctgctccctgtgtacctccctcagcacccagcagattgtcaaaattttaaacctttatactcccctgaatgaatttgaagaacgggtaacagtggcctttatacgaacaatccaggcacaactacaagagcggaatgaccctcagcaactgctattagatgccaagcacatgtttcctgttttgtttccatttaatccatcttctctaaccatggactcaatccacatcccagcgtgtctcaatctggaattcctcaatgaagtctgaagatgcatgtttccagcattagtttgattcccaatgtgagcaagaaggaagtatatacagtaaagtaaattcaaggatctgttaaatctggtaaaagtagatcaaatcagagattgacagcctgtggagggtgctgaactatacagaattagacacaactatgtcattattttttgtacctactgctcagaataaaaacacttgaaatatggaaaaaaaaaaaaaaaaaaaaaaaaaaaaggac

SEQ ID NO: 55595 - DNA, 670 bp, Homo Sapiens
  misc_feature (635)..(669): n is a, c, g, or t
gtccggaattctcgggatattcactgcgctggccctgacgaagctggacatcctggacgtactgggtgaggttaaagtcggtgtctcatacaagctgaacgggaaaaggattccctatttcccagctaaccaggagatgcttcagaaggtcgaagttgagtatgaaacgctgcctgggtggaaagcagacaccacaggcgccaggaggtgggaggacctgcccccacaggcccagaactacatccgctttgtggagaatcacgtgggagtcgcagtcaaatgggttggtgttggcaagtcaagagagtcgatgatccagctgttttagtcacagactgagctgatcccaacaggccctggcagcgtctggacttgtgtaaacagcagcagtcacgttcctcggccgccacaaccaacaccaaagcaggaaaaccattttctgtacttttatatttctgttcaacctgttggtttctacaatgattttaaacattggaaagccagccttgtgtatatttttaaaaattatattcaaaatgagccaaagtgctcagagaccttctatgacacattagtgtcacatggttgcgtgtccagccgaagcagtgtaataaacatctccaatggccactggnnnnnnnnnnnnnnnnnnnnnnnnnnnnnnnnnnng

SEQ ID NO: 55596 - DNA, 503 bp, Homo Sapiens
ccatcttattcaagtcagagcacttttttttaaatagcaatacaacaggcaagagaatactcaaaaatatttaaaactgtattgataccaagagtatgttttaaatattttctaataaatacttgagcggtttttgtctggcaggcttccaaatttgccaaaattaagcgttcagtattttcaacacatacgctttttactggtttatactgaactatctgatgagaattcctgtgttcccaaagcaactgatgtttacaggtcttgtgtttctcctcctcctttctaaggatgagggaatccacaacagactttctctagaaaacactaatgatggacaactttttggtgtcatcaatgagttggctactaccttgatgtaaaaatttgtaaggaaaattttcaccatttcgagtgtcaagtgtatttttaactgtctggtttgtacttttatgacttttgtactaccaaagcggagttaaaaataaaaatgttaaacgcaa

SEQ ID NO: 55597 - DNA, 468 bp, Homo Sapiens
tagagagtgggggcttccgctctctgctcatcaatgcagttgaggcctcctgtatccgaacacgagagctacagtccatggccgaccaagaaaagatctccccagctgcccttaagaagaccctcttagacagagtgaagctggaatcccccacagtctccacactgaccccctccagcccagggaagctcctcacaagaagcctggccctgggaggcaagaaggactaaggcagcatctgtcccctctgtgattcagagcccttagttgagagcccctgccgcccctgccacccccctgccccgctcccaccattgcccctcctcagctgtgcaaggagaaagcatgcttaggaagttttcaggtccttgtgataaaacctccttaaatctgttcagaccaagcaatgcgagcttcctctcctgtcccatgttggaagttgctctgaaggggtggtagatgctggaa

SEQ ID NO: 55598 - DNA, 670 bp, Homo Sapiens
cctttaaaggtttatttgaagatgctgttaaagtacagaattttgtgtacaggtagatttttccgtccctcattaatagtgccttcttaattaatacagactggtgttagctataacaaaactccagtaagccaaagaatcccaagttctttgtggaaaaaaaaaaaaaatcttttagggtcagattttcccttctaatatcattgaagatgatgttgcattgatttattcataaagtattttaactataggaactctagaagataatggttaggcaagtgatttttttttaaatatggttggcgtaagttgtattttgaaattcacttattttaaaatcgaagaggattgtaatcatggaaatagaatgtttgtatctacctgcccacattttcttaaaaagatatttcatatacagataatgaagaccaagctagtggctgcactgtaggtctgctgcttatttgtatttgttgtgcttctgtttatgttgtagaagctgaaattctagcaacatgcttcaattctgttattttgatacttatgaaaatgtattaggttttactatattgtgcttttgaaagccataactcttaagaactttgtttttgcatattgtttgctaattctttactttaataaacctcaaaacctgaaaaaaaaaaaaaaa

SEQ ID NO: 55599 - DNA, 573 bp, Homo Sapiens
gcacgaggaaaaaagaaaaccatgcctgctcagggtggctgcataatacttcctcttggctggcttcatctctggcaatatacagaccaactgtgcttaaattcctggcaaatggatggcagaaatacctttcaactctcctatataacactgccaattactcatcagaatttgaagccagcacatacattcaacatcatctgcaaaatgccacagactctggctctccttcatcttacatcttgaatgaatatagtaaactaaatagtagaatttttaattcagacatttcaaataaactggagcagattccgagagtttatgacgttgttacaccaaagattgaggcgtggcgccgagcattggatttagtattgttagtacttcagacagacagtgaaataattactggacatggacacacacagataaattcacaggaattaacgggctttctatttttgtagtgttactggctaagtctttggaaaataatttttcataatatgtcatgctaataataaatatattgatagccaaaaaaaaaaaaaaaaaaaaactcgagggggggcc

SEQ ID NO: 55600 - DNA, 813 bp, Homo Sapiens
  misc_feature (66)..(66): n is a, c, g, or t
  misc_feature (140)..(140): n is a, c, g, or t
  misc_feature (777)..(777): n is a, c, g, or t
  misc_feature (786)..(786): n is a, c, g, or t
  misc_feature (791)..(791): n is a, c, g, or t
  misc_feature (802)..(802): n is a, c, g, or t
gaatatttttgaacacccactgtgagctcagggctgtgttaggagcataggctgagggggagaccntcttgtgtgttattaatcctggcacttttccagatgattaccacatgctgagggcacctgacacagagcccggngcagagcacttgcccactagaggtttgccactgagactgccagtgaagaacaaatcaatgcaagggcactgaagcttgtcgttcttggcgaagggacaactctacacgaccagctctcgaaaggctgtcttttgaaaagcagtctcttcacctgtgggttttgattaagacacactctcctccatcctgaggatccaaattgtacatataaaggtgtccactggatgacgcaactagcagccgtggcaacttctggatcctaagggccaaggaaaacataaaccgtgatgacaacgaagatgggcgatggattcgcttccaatgacaaagcccccctcaccctagctgtcaccagattctgcctttgacaaacccttagcccactgatctggtctgggcttctggctattcctttgcattctggccttgggatctactttcaggattatttcttgtctttgaacgtgacagtgtggatgaggcaagtgagtgtagatgctgcgaccctgcgagaagcaatagctagtgaacacattagctccctacatgggacgcagtctccctctgacatgtgtctctgcccttaaccaagacagaaagggggtaaatggaggattggcttactgtctttgctggntagttttgngaaantttaaaaatgntcaacttttga

SEQ ID NO: 55601 - DNA, 510 bp, Homo Sapiens
  misc_feature (75)..(75): n is a, c, g, or t
ttggaggaaatttaaaactggggccttgaatatttattttttgaaactaccatgttaaatactgaagtataattntgggggagttataaagttatgataaacattcatctgattattttaaacaatagttgtggtagataaacatactggaggtgagtcaaattgaattcatatagtaacatgcagtctgaagtcctagttacttaataggtactcagcctggagtgaaaatcctgggtactgactttgagaggagtgagtgtgcatgttgtcaaagtttctgaacacagttcacatagccttattagcaaaagttttaagaaatggctctatcaaagaagcaattgcagctttattcagaaatataaaaggggaatttatgtacatgtcataagtggtacccacttcccctttttactgtagggtggataactcttaggatttaactctttgaatattatctcttggaataaagcatgtgttaatggtaacaaaaaaaaaaaaaaaagg

SEQ ID NO: 55602 - DNA, 690 bp, Homo Sapiens
cattctaataatttgatacagaaattagtaaaggcatttttttctttttttttccagtaaatacattgggtctataaatgtgcatttgtaagggccacaaaagtgaacgtgtggtactgtagtaccacgtgggagacctctggttatggtttagtcctagttcctttgttactcctgtgagcaccgagaagaactgggcgactcccagtcccacctgtgctgtgacagtcccacgtggctatgacagactgtttagtacttacccttctcaggttcctcagtgcaggggtgcatcagggcctcaataataggggtatacctgggaggatccagcagtaatccccagggtactaggattactagtactctgatggaactagtcttccttccttattcctcgaacatgcagtacataaaaaggggaaaaggagaaaaaaaaaagccttactttgttttacttgccatttattgtaaggaaactttaaagcattttttaggaaatactcaaaagcaaggttggaaaatgttttatctttctatagaaagttgggtacagtatgtaactgcgggaaacccactgcccctttgtaagctgtggaacccaaactgtatggggatatttgatgttttcagaaagaggaagaaaatatggtccaaattaaattttccaaagataaaaaaaaaaaaaaa

SEQ ID NO: 55603 - DNA, 637 bp, Homo Sapiens
ggtcccgagaagtcaccaaggccatctggagactcctggctttctgaactttgcgcgttaagccgggacagctgctttgctgcccggagagtagtccgcgccaggaagagagcaacgaggaaaggagagggactctggcgtcccggcaggcgagaggcgaggctgagcgaaagaaggaaggacagacggacctgtctgtcagagttcggagaacactggctctcagccctgagacacaggcctcagttaggacgctcggcgcccaaatctcatcagttttattgcctgctcgattatatagaaaaatacaaaaaatctgcattaaaaatattaatcctgcatgctggacatgtatggtaataatttctattttgtaccattttcttgtttaactttagcatgttgttgatcatggatcatactccccttgtttctttgggtgagaagggatcgcagtttggaaactccggcggctgcgtgcggggtttcagtcccagctgtaggcttgtaaatacccgccccgccaaaccgcatagagaacgtggcagcaagctgagggtctttgtttgggtttattattacggtatttttgtttgtaagttaaaaagaaaaaaaaaaaaaaaaaaaatgcggcatt

SEQ ID NO: 55604 - DNA, 501 bp, Homo Sapiens
aagggtacagagaaacggatgtactgtttttcagtatttggggagggtggtttgagcagcatttattgacaatttcattagtggggatgtttctattgaaaacagggttaggaagtcataaaatgttcctgcaatataaggtaataataccaccagcgtttatcttactgttttcatgttctaagtgcatgcatctgagtaaaaggatctgggctgcagtccagtctgagagatgccagcaaaggcttcctaggccagtccagtccagtaaatccctctttgatcttctcttccacacagacagcagtgatgagcatgcccatgaactcacatgattattttggggaaaatgaaagagttgtattccttttgaggtagtaattccactttcaggggcaaatacattttgattgttttatcacccttcagtgagttgtttttgttctttaatcaaggatgtatgtttgaagtaagaagtaaagcataaagtatttgattttg

SEQ ID NO: 55605 - DNA, 603 bp, Homo Sapiens
atgccacagcgagaccagaaagaggagtcgccttaaggtatccctacaaagtcacctttctgataaaaaggagggaaaaaaaagttagatatctaaaataagcctagaatctcacacacagctgtgacttctaagtgaaactcttttctccctcatgtccttaaatagtcacagaatcacacacagcctgacttttaaagacaagcttggctacaggaaatgaaccaaccccaaagactcttctaacctgtctcctgactgggctccttcagaaagtgttctcctgttccatctgtagggctgcttactactggaacctaaaacaaaacctgttgtttgtaccatcactttttctggtgtttcctgtgcttttgtgattccaagtctgttcataagttctgaagataaattatgtgaaatcatattttggcatatgggggtggaggatgaattctttacagactttttaagatgatccatttgtaccacagaaaacattttggaagttgttatatatgagtatataaatttttcttttcatattttacattaaaataaagctttattcagtcattcccgccccacaaaccaacaatcccaagg

SEQ ID NO: 55606 - DNA, 562 bp, Homo Sapiens
ataatggcacctcagcagttccagtatggataggggttcctgttttactagcttttacatctttttatttaaaacaaaacaacacaaaaaaacaatgtgcccccagatgtcagaatgaggcgactagggcaccatactcactttccagggctgggggaagggggacgcaggatcatcccctcccaaggagatctgtgggggtcccaccgtccatctggacttctcagcctgtttggctagaactcaggcctggagtctgggtctgccccctccccggctccttggggctctctggtctcaggccagctggcgatgggtggctagagtgatgaactcaagccctgtggccacagttctgggagccttcaaccctggctcatgctgccatagtctccacggtgcccttcacagagggcttggtagtggcagaatggccatgcccaggtgtgtgttgagaccattgacaactgctcgtgtacaggcaccccacagccccagagcatggggcacagcaggcatgcgagtgagaggatgaaggggaataaagtcagtacaactcgtg

SEQ ID NO: 55607 - DNA, 869 bp, Homo Sapiens
  misc_feature (759)..(759): n is a, c, g, or t
  misc_feature (787)..(787): n is a, c, g, or t
  misc_feature (818)..(818): n is a, c, g, or t
  misc_feature (865)..(866): n is a, c, g, or t
aggaatgaaggcctgcagtgaggatggagtggtcggcctgaagcctctctagcaagtggtcaggacgctgattgttctgcgcaggttggaggtaggtggtgagtctgagaaaggggccagaaagactccccagcaactgctggcaaagggtgaagggcacgttcccacaggattcaagccagctgcctttggaggggagacgggcactcagtttaggcgctcctacagcagggtcagcaagacaagcaggttgcggcaagggtctgcgcactgctgtgtaaatgtaggggcatcggggggcagaaagaccaggggagaagtgtgcatcacccttggggttaagggacagttgtctgctaggtgttgcttcctggagatggctgaaaagccagtccagtctgcagggaccaggccaccacccacctgatgtgggagcatttcccccaatccctgctgggctgctgaatctgggggacatagggaagctgaggctggtgttctgagtagtggcagagctgagccacagggcatgtctgaggtcagccccgagcaaaatggaatagggactcagggtgggtcaggtaactggaaagcgggcactgtgcacgcagcccttgaggggagccagggtgggtgggggatcccccactgtgtgcagaaggcagcagccttggaagcagggtgtgctcctcggtgtggtcgctcgataccagaaaatgactctaaaaactgaagagtgtttgagtttcattcacacanaacatggacatcatctttgaggctctgntccagagagacagggccatccctcatgtctngtattggggttggagataaacaaaagtataaatcaaacaacctgcgnntta

SEQ ID NO: 55608 - DNA, 504 bp, Homo Sapiens
ttttttttttttttttgtcttttcaacttttcatagaagttggttgtaacttgtaaacatgtttttaaattaagaattaagataaagtgtagtacccgttccgttacaaagtgccaagacttctaatgtggttggttgccttttttttttttccttcctttcattttgtaaaaccttttttttttctagtttgttttattgcttttgtgacattggaatttgtggattttctctctctccccccatccctgccatcaccagaccctggggttcctctgatcgtgactctgtttatcccacactgttgcctgctcctctgaggaaaagtatattatttatatatatatatatatctatatataaattttgtttttaaggaggaaagagaaaaaaaaatctaaaaagtgctttaaaaatttgggagagggggctcgggggagaggacgaagacagaagttttgaatctccaaacgtgggggtctaggtggaccgggcgggggtggg

SEQ ID NO: 55609 - DNA, 564 bp, Homo Sapiens
aagacactcaaatatgtcttggagttacagttaatactgtatcgtttaaatttgagaaaaaccaactttaaaaaatcacatagatacagttgtttactgctagaaattttatttaaattagttgatactcttggttaggtaatgaaaaacaatggttttatctccattatgctgtgatagggaagagtaacacagttcaaatggcaaaggcatacctgacaattaaaatgcatagttaaaggctaatacttcctgaacacaagaagacaagtctctacttgatactactctccacagttaaatcattgatactttgtgccatacagtgaaaacagaaccatctaggtgttcacggattgtatttttccttatgaaaggtagaaggttagagaaaattattcccaatacaattaatacaaataaaattggttattaggtgccttttaattaggcagtaagggcatatgaagcttcattacctatgagaattttgtcaaaattatttcccagttaccatgttttaaaacagcctctcagaattccccacttctaatttctcctttc

SEQ ID NO: 55610 - DNA, 550 bp, Homo Sapiens
  misc_feature (463)..(463): n is a, c, g, or t
  misc_feature (476)..(476): n is a, c, g, or t
  misc_feature (513)..(513): n is a, c, g, or t
tcgacggactgatagaaggaagaacttatggcatattttcacccccacaaaaatcagttaaatattgggacactaaccatccaggtcaagaaaagtcacatgccatagccatggtattgcacatcattcatcttgcattctttgagaataagaagatcagtaaatagttcagaagtgggaagctttgtccaggcctgtgtgtgaacccaatgttttgtttagaaatagaacaagtaagttcattgctatagcataacacaaaatttgcataagtggtggtcagcaaatccttgaatgctgcttaatgtgagaggttggtaaaatcctttgtgcaacactctaactccctgaatgttttgctgtgctgggacctgtgcatgccagacaaggccaagctggcttaaagagcaaccagccacctctgcaatctgccacctcctgctggcaggatttgtttttgcanctgtgaagagccnaggaggcaccagggcataagtctactcacttatatcngtttggcctggaacataaccatgtttggttttacaac

SEQ ID NO: 55611 - DNA, 701 bp, Homo Sapiens
  misc_feature (42)..(42): n is a, c, g, or t
  misc_feature (48)..(48): n is a, c, g, or t
  misc_feature (73)..(73): n is a, c, g, or t
  misc_feature (445)..(445): n is a, c, g, or t
  misc_feature (663)..(663): n is a, c, g, or t
ttctgtcgtttccttccgtcggtttgcaacaaaaactccagnattaanatgagcaagtgctggctttcatggnaaagcttacgaattctttcctttttatagtcaagatagccaatgtaattgtactaaaaacacaaataggatatatgtacttactgcttcaaacaaaatagatacaattttatagccagtagagagaagagctgttaaactgacttcttcagattagaaaataaatatttgaaattccaagttagaataggaacctagatgttgacataataaaccagatgttcaagaacaattaggctgtcaagtccatgaagaagtctacagaaaagcaggcttgagttttgggatgaaatgattggggagtgtaaattgcagcaaaagagttccctgaatttgcaacctcttcccattaaacaatattgtaggaagaggnggtgtttggtaagcaatttacctggtttcctgctccacggatgacaactttagtagaggctgaatcacaatcttctgaaaatgcagctgcatgtcctggcttcagtgctgtattgtaaagggcaagaatatcacctgaaatagacaagatgttaagatttacatttccgttgccttgagagttccctgttactcccacttctccctatggtgaccttntatagaagaccataaataaaccactacagcccactgta

SEQ ID NO: 55612 - DNA, 699 bp, Homo Sapiens
ggatccggagccccaggttccgccccagagcggtcctggacaaggccagaccaaagcaagcagggcctggcacctccatcctgaggtgctgcccctccatccaaaactgccaagtgactcattgccttcccaacccttccagaggctttctgtgaaagtctcatgtccaagttccgtcttctgggctgggcaggccctctggttcccaggctgagactgacgggttttctcaggatgatgtcttgggtgagggtagggagaggacaaggggtcaccgagcccttcccagagagcagggagcttataaatggaaccagagcagaagtccccagactcaggaagtcaacagagtgggcagggacagtggtagcatccatctggtggccaaagagaatcgtagccccagagctgcccaagttcactgggctccacccccacctccaggaggggaggagaggacctgacatctgtaggtggcccctgatgccccatctacagcaggaggtcaggaccacgcccctggcctctccccactcccccatcctcctccctgggtggctgcctgattatccctcaggcagggcctctcagtccttgtgggtctgtgtcacctccatctcagtcttggcctggctatgaggggaggaggaatgggagagggggctcaggggccaataaactctgccttgagtcctccta

SEQ ID NO: 55613 - DNA, 805 bp, Homo Sapiens
cccacgcgtccgagcagccacaatccagccaaaagaggatcgtagatatttgctctgatcaactagatgaaaatatagcagaatggatttagcccactgctctgttttatccaactgagtctctgaccagcaattggtgcataattattacagcaaaagttaagaaatgaaactgtagcaattatgtaaatgaatgtgttggcctcttaatacctgttactagtggacttcctgtgaggaagttagttttttgttttgatgaaatgctttcgttttttaaatcttaattctgctgtccacatcctcccaaagtgtgcttacttcatttgtttaatttaaatgaactttcctccttgtatgtatgaggtgacttggtgggtggggtgggtggtttttgtttttgtgttttttctttcttagggcatctgtaggcctcaaaggacctttcctttaggtcatattcctcagaaagtcttcaatcttcccttgtttatgttgtttgtttttcttaaagaatattttcaaagcttaaatttgtatattaatttaggactatttagaagtataggctgtcgttggcggcagcagtatattctgaaatgtctcatagatataattccgactaagatgggctgcgacacgccaccccccccccccaccacccacccacccccacccacccacaccaccacacccccacccccaccccccccacacccaccccccccccccacaccccccaccccccaccccccccccacccccccacccaccccccccaccccccccacaccacccccccccc

SEQ ID NO: 55614 - DNA, 520 bp, Homo Sapiens
tgaacagcagaggcttccctcagatcaaggagccaggagcagatgatctatctctgtggccacacagagagatgtcaccttatgcaatttgcatatcatattcaattcccccaactgctctttctaatttattcaactggggaccaggctggtctcatgccaacctaggagatgtaccatagcagtatgagcagaattcctcaggaggaacaattagcaaaaactgcagttgcctctcgataggcctgagcagagagaggaacaatagctctcacgtctctcctcatcagattctaactaagcagatgttctcatgcttttttcttcttcctatgttctgtatactgacacctcttctcagtggcatatgaaatatgaaatgtcatgtgttgtgagtttgtataaatataaaggaatatatatacacagtagcaaaagagaagatctcatttacaaatatctatggcgtttccttgttctgtgttgatctgttttattgatacaaactgaattttcttaa

SEQ ID NO: 55615 - DNA, 597 bp, Homo Sapiens
gatatagaaaacaccttagcttgttggttattaatagagctctaattttaactgtgaaatcatggagtttctttaaatgttttcctagagtgtttgttatcatgaacattggaaatagcattattccttttcttctaccacatgtcttgaacattcacatgggttaaagaagatggaaactgatactactgacaatcaagctgctttctgactttcataattttctttatattgtggatagcattttgaaggtgaccgtgattctgtaggaagagctgtaatcaatatttttcaaactctaagagtacagaggttagtaagatttcttttttttttactttttgttacgtcaagtagcttattaagaaaaagattcatgacttaaattcttaattctcagttgatacaaaggcttataatcatgtgttttaaaattttgatttcattttcgttccttgaaggttaaagaatggaaactggggataaaaattaatacactgcagctttgccaaggtctgtgatatggttgtaaccttttaaagactactaaagtcataatttgaaatttttactaaaataaaacatatgtgtctatgg

SEQ ID NO: 55616 - DNA, 340 bp, Homo Sapiens
  misc_feature (1)..(2): n is a, c, g, or t
  misc_feature (28)..(28): n is a, c, g, or t
nntttcaagaagggtctcctgcattgcngcctgaagtgttatagtctactcatgtagagaccacattctgcacagaaagacgtcttcagtaattgctttattcaatgtaccttctttagcgtttcactaaaaatgtaattaatttccttcagtttatactatgtcatagtatttatttttaagcccttgtaaagtataaactttcaacctgtgagacggcaaagatctctaccaattgaaagctagaaatcactgtgatcacaattgatttagaaaattaaatgcactagagaccaggggtgtgcacagagacacaggccccccaccgaggcttgcatgc

SEQ ID NO: 55617 - DNA, 579 bp, Homo Sapiens
ctatgtcattgtatttattcttatgcttttgtaaagtataaactttcaacctgtgagacggcaaagatctctaccaattgaaagctagaaatcactgtgatcacaattgatttagaaaattaaatgcactagagaccaggggtgtgcacagagacacaggccccccaccgaggcttgcatgctaacagagactgttggcttttctttcccagtcatgtcccgtctgcaggtcgcgtgtggagcatgtccagcacgtctatctgccaacgcacaccagtcttctcaatctgactgtaatctaatctgttgtgcttttgttggacttggcatgtttccatgaactgcactattataaactattaaaatgatagattgtggagaaagtaattattccaacacccatctgccatgcgatgttaaaaaaaaaaaaaaggaagaaaaataacacagctactcctcactgcaaaaacatatccatgcgtagaatcaacaactccagtcatgggaccaggaggagctctgggacgcagacacattccttggatgttgattttttttatgatctagtaaaggaatagg

SEQ ID NO: 55618 - DNA, 642 bp, Homo Sapiens
gtcaaatacaaaaatggtaactaggttgacagatactttgtatttttcttttgaattcagacctggaatgtaagtaagtgacaatgcttatggaaagccagttagttagaattggaaatctgtcttgtcattttacaagcattagattcctttcctgtgtgaagaaagcctcagtgaaacaggtctttgccataactttatgaagtgctacagaaagcacaaagaattgattcatgttcatcaatacctgctgagagtactgtcccaggaatatccagtggatggattcatcatccaggaggttcaaaagtaagatggttttcaaatcatttttgagactggttgcataacagcagggtacctgaaagagccttctgggagttagtgaactaggtagattgttttgttcacataacgccaccatcaacttaaagtgaattgtctttgttataaatgaggtcactatggacttaccctaaagatcttctgtacttctgtcttccataggacaaatgataagtactacatacctcatctcttgggttattattgtagtcttgcattcatgattatgaatttaaaaataaataccaattatggaaatagtactaaaggcttgccgcgcatgaaacattaattggt

SEQ ID NO: 55619 - DNA, 976 bp, Homo Sapiens
  misc_feature (628)..(628): n is a, c, g, or t
  misc_feature (635)..(635): n is a, c, g, or t
  misc_feature (641)..(641): n is a, c, g, or t
  misc_feature (672)..(672): n is a, c, g, or t
tctgcttgatagaaaagcaaatgttgaacacagagctaagactggtctcacaccactaatggaagctgcctctggtggatatgcggaggtgggccgagttcttttggataaaggtgctgatgttaatgcccctccagttccctcctcaagagatacagctttaaccatagcagcagataaagggcattacaaattctgtgagcttcttattggcaggggagctcatattgatgtacgtaacaagaaggggaacactccattgtggctagcagcaaatggtggacacctcgatgtggttcagttactggtgcaagcaggtgcagatgtggatgcagcagataaccgcaagataactcctcttatggcagcatttagaaagggtcatgtgaaggtggtgcgctacttagtcaaagaagtcaatcagtttccatcagattctgaatgtatgagatacatagcaaccatcactgataaggagatgctgaagaagtgtcatctttgtatggagtcaatagtacaagccaaagatagacaggctgctgaagcaaacaaaaacgccagcattttgttagaggagttagacttggaaaagttaagggaagaaagtcggaggctggctttggctgcngaaaaanaaaccnacaaccccccaaacaaaaaaaccaaaacccnaaaaacaaaactcccgggcttctatgtcgggggcgggagaaagagggaatgaaagggccctggggccaagctggtttcctgaacccccctttttttgtaaaaaaggggaaagaatcgcgccggccctcctcaaaaggggaggcgcgaattaaatttcccaaaaaccccggggtaaacccccgctttaaaaggaaatccggcgtgccgaacacccggggaaattttcaaccccccccctaaagggcggccgggcttttttttttttttgctgcgacccacagagggaaatttttcttagggaaaa

SEQ ID NO: 55620 - DNA, 901 bp, Homo Sapiens
attaggagaaatcccaaattataaaagccacatatgccgtgacctacgtaggaaaagatgtatttgtgcatcttctttctgggtagttaaaaattactccctcttttctctagcattttgacatttcagactcaatgctctgatctctagggagtgtgattattcaaactaatgagaggacaagaagacacagttttagaatctactgctgctaaagcacattaaaaacaaatcctggtttttaatgtatgcatagtttcatatttaatgaatatgctttcattaaatagggaggtagatttgaaaaaactgttataaagaaatgtgccttttggggaatgaatacttttgttcatgtctagcccactgggaattttgttttcaccttatactgagtcctttttctaatgtaaaaatatttcttccaagtttgatttctgtatcagggtaacattgagaacacacatatttctgtttgaggatttgtgacttcctatggaaacagtcttgcatctatgtatttacaaatgaaatttaaagtattcttaaagctttgccttaaatactgcttgcatactgatttacttaatgctaagcatggcaggggttataaatttaaatactataagacctggctgaatcccagatgtatcaataaattgttatagtaacttatggaaaatgctattaaaagataaattttcatacattgtatttttagtcaagtaaaatatgggatgaaaattaataaagtactggcaaggggaaaaaatatgtattacccttgtaaaaaaaaaaaaaaaaagggcggcccgctccagaagatcccctccaagggggcccagctttaaccggtaccccaacttttcttggacaaaggggccccccaatagtgaagccc

SEQ ID NO: 55621 - DNA, 665 bp, Homo Sapiens
agcacccaaaaccaagcctttaaccccaacaatgtgtgtatcttttgcacagcaaaaactgcgaggccagaactagtttatctgaacacctcagctgctgtaagcttctcctctctcaccccgtaaactgacaagcatgatgaaaaaagaagcagatccaagtttctgcctcttttaaatgtacttgactttgcaaggcaagtagttttacagccatttttgttcacacttttcaccccacaacttggggatctagctgagacatttctacctcgaacaagtcacatgtaccacaggttcctgaataattcctgcagggctggtgacagacataacagctctggttttataatatcttgggtatctctaaggccaataaggataacattatctacccagagagtttagaagaaaagtaggagtccaaaggaagagtaaacaagaatggagctgtgttcacactgaatttggggtcaatctatttcccccaccctctctcctccccaacccttcaggaaccctttagtttattaatcttatacagaagaaactaacttagaaacaaaggattcaatatttgcttatttattctttgttaacatgagagtcccatgtctgaaaaccaaagtccaatttctgtctggccttttgtctcatccttcttg

SEQ ID NO: 55622 - DNA, 763 bp, Homo Sapiens
ccgcccttttttttttttttttttttttttttcatatttgcttatttattctttgttaacatgagagtcccatgtctgaaaaccaaagtccaatttctgtctggccttttgtctcatccttcttggcaaaagtagcttttgaactgatataaaaaaaaatgctgagtaacagaaaagtattaatgtgcttgacaccatgactgaaatactatgatcttgtttgtcaataaaaagcagctatctgtgaaccaggtaactgtgtgttttggaagatctgtttattaacagtaaataaataagccctgtacagaacacaggcactaggttgacagactcgtcttttgtaggacatttcttcctgctaaccagtactgaagggcttgtttttttcgtaactttacacaaggggtactattggaaaatatagctttctcaagacatctgatgtcagtttcccattgttttgcttcacaaacatcaacaaagtaaacctgaacatgcttagcaatttccgaaagtgttctttgctgacattacttttgacatactgtgtcaaaattcttaaggtctcccctcctttggtaaagtaggcaaaaccttacaaggaaaacactataatacacggaaatatactgagttagatttccagtcacctgctctatggctctaagatgcactacatccataatggttcctaggactgtgtccacctgatggtttggagtacggaaaaccagcccctatggcttaagagtcatctccc

SEQ ID NO: 55623 - DNA, 618 bp, Homo Sapiens
  misc_feature (431)..(431): n is a, c, g, or t
acaaaatgcttgtccaggactcagccatgcacaccttgagcagcgccggcaggaggcacggaaggaactgtgctccgttctcctcactgtcatggtgccaccagtgtctgatgaagggcagagtgacccagactgcaggcagtaactgacttcacacagtccctggcatttagtcatctgtgattgttttatcactctggactgtgcagagccacctgccaccgagatctgcattccgactgcctatgaacgggtgtgggggccgggggctggcttgctgaagtcttcaacttgcactcggagctcctttgatacctcagagctggctgtcaggtggcagctcacacccagactcactggccacacctcagcagggggggagtcgagtgtcagtctctttctgtgaaggctttttttttcctttggcctgngaatttttcccatttttatgaaggggttttaaattgtttcattttgtgtgctgtgcttcaaagccttaactgtcaaatcttgcattatcttgtttgtacagaaatatactggcctagcagaggcaaaaaaaaaaaaatgaattttattttacttgtcacacctgtcttaataaactggagttttgct

SEQ ID NO: 55624 - DNA, 581 bp, Homo Sapiens
ccgcccgcgtttttttttattttctctgttgacttaggaacacatcataaattcacaccaactgacacgttgctgacgtctgtacttgacataaccatttttattcatacaggaagcattaaatataaaagatggtcagttttgaagagcaaagggtgctgaaatgacttgtacggttggctggtgctttctcaaatggattgccatagttcattactagtaaagaaaaggaaaatgtgatttacgttgtcatttttcctattaaaaaaaacccttaagaatggggcacttgagctgtccctgcaatgttttcatatctagtagtcattttagggaaagtgataatctgtagaatgaatagttatgttttgatatgactgatactttctttgttaaaaggttgtattaagtcttcaatttcaagtgtagcttaaaagtgtaaacattatgtgattcatttgaatacaagaatgcctatgaaatacccactataacagcattccttttgtgtttagaactatagaagaaaatgtcttcaaataaagtagttttcagtcaaaaaaaaaaaaaaaaaaacgcgg

SEQ ID NO: 55625 - DNA, 513 bp, Homo Sapiens
ggcccaggccatgagcacagcagccatgcttgggcagaggtgccagagggtacctctcaggacactggcaatagcggctctgtagagcacccttttgaaaccaagaagctcaatggaaaggccctgagcagtcgggctgaggagccgccttctcctcctgtccccaaggcatctggctccactctcaacagcgggtctggcaactgtcccaggacccagtctgatgacagtgaggagaggagcctcgaaaccatctgtgccaaccacaacaatggacgcttacaccctcgtccccctcaccctcacaataacgggcagaacttgggggagctggaggtggtggcctactcttccccaggacactcagacactgaccgtgataactcgtccctgacagggacactcctacacaaagattgttgcgggtctgaaatggcctgtgagacccccaatgctggaacaagagaggaccccactgacaccccagccacagatagtagcagggctgttcat

SEQ ID NO: 55626 - DNA, 594 bp, Homo Sapiens
  misc_feature (476)..(476): n is a, c, g, or t
  misc_feature (519)..(519): n is a, c, g, or t
ggtctacgggctggcagctaccatgatccaagagggcctgacttgggagggcttccagacagctgaaggctgctaccgtaccgtgtgggagcgcctgggtctggccttccagaccccagaggcatactgccagcagcgagtgttccgctcactggcctacatgcggccactgagcatatgggccatgcagctagccctgcaacagcagcagcacaaaaaggcctcctggccaaaagtcaaacagggcacaggactaaggacagggcctatgtttggaccaaaggaagccatggcaaacctgagcccagagtgagccgtctgaactgtgggagggaagtgctaacagcccagcctccagcctggcctttcctccttcccctctgaacctcctgcaaccctgagccatcaggacaatcataccccttcccttctctccacccaattgtgccagtaaatgggggttgagggtgacctangcagcattagaatcacttatttatttctttcctcacctgttcnctgactgcgtgaaatgttcagggaggtcagttgatttccccaggtacattcatggtgtgacagacacatgggtac

SEQ ID NO: 55627 - DNA, 1116 bp, Homo Sapiens
  misc_feature (14)..(14): n is a, c, g, or t
ggtccggaattccncgggatgaattcaagccgcagctgtggcccctctgatggggtccctcgcacggcacggtccatgtccctcacgctgggaaagaatatgcctcgccggagggtcagcgttgctgtggttcctaagtttaatgccctgaatctgcctggccaaactcccagctcatcatccattccctccttaccagccttgtcggaatcacccaatgggaaaggcagcctacctgtcacttcagcactgcctgcacttttggaaaatggaaagacaaatggggacccagattgtgaagcctctgctcctgcgctgaccctgagctgcctggaggagcttagtcaggagaccaaggccaggatggaggaagaagcctacagcaagggattccaagaaggtctaaagaagaccaaagaacttcaagacctgaaggaggaggaggaagaacagaagagtgagagtcctgaggaacctgaagaggtagaagaaactgaggaagaggaaaagggcccaagaagcagcaaacttgaagaattggtccatttcttacaagtcatgtatcccaaactgtgtcagcactggcaagtgatctggatgatggctgcagtgatgctggtcttgactgttgtgctggggctctacaattcctataactcttgtgcagagcaggctgatgggccccttggaagatccacttgctcggcagcccagagggactcctggtggagctcaggactccagcatgagcagcctacagagcagtaggaaacctccacctagccagtgccctgctctgagacactcagactaccacccctttccccagtataacgtcaggcccaagtgtggacacactgccggccatcccatcaggtcatgaggaaagggtctttttaacactcggcactttctgtggggacctattcctacacagtggacttgatgttccttggaggattcacaaaactgcccctgggggaaccatccagtgggatggagaaagtcacccttccccaggaaatctattgggaagggaagggtctcctgcccctaattcaggggggctgggggggaaactaaacacccttccttgggggttgtggggcaaaagaa

SEQ ID NO: 55628 - DNA, 606 bp, Homo Sapiens
  misc_feature (510)..(511): n is a, c, g, or t
  misc_feature (520)..(523): n is a, c, g, or t
  misc_feature (532)..(533): n is a, c, g, or t
  misc_feature (541)..(541): n is a, c, g, or t
  misc_feature (565)..(565): n is a, c, g, or t
  misc_feature (577)..(577): n is a, c, g, or t
ttgcaggttgaattatctatctggatattactagagttgtaaaacacaacttggaaactggaatttatgtgaagaaccaaacaacttaaaccagcatcacttttgtcttcaatttgccttccagtgattttagtttacaacctgcgttttgttatttgaaacacacacacttatatataaacacatgtaattttactattttattgtctttcctttaatcgatgaattgattaaatttagacaattaaaacatttctaaagtgagactgaaaataatatagaaaatctcattgctacttgtgattatcaaaaaaagtatgtattttctttctaaagttatctataaatatgtttttgatatgttggacatgaattaccctgtcatgaagcgtttaaattgttaaaatgctgattttcttattagtttgttaattgcctgttactagtacttgaccaatacattgtgctatatgtaaatgtgtaaataaatattgtaattttctccccccnnaaaaaaaannnnaaaaaaaannaaaaaaanacacccccccccacaccaaaaacnaaaaaaaacaanaaaaaaaaacaaaaacctcgggggggggg

SEQ ID NO: 55629 - DNA, 757 bp, Homo Sapiens
  misc_feature (686)..(686): n is a, c, g, or t
  misc_feature (689)..(689): n is a, c, g, or t
  misc_feature (724)..(724): n is a, c, g, or t
  misc_feature (745)..(745): n is a, c, g, or t
  misc_feature (756)..(756): n is a, c, g, or t
atgaaaatttacagttttacctgttcatatctagtgccccacagtgtgtgtcaaccaaaggtggcagtggctacatctgcctgttggactggtacaggttacaatatgtcctcttccattgcaaattaaagtccaaatagagaaatacttaggttttagaacacatcagaggtatttctgctgtatttttcaccttaaaaattgacacagagtttactaatagaggagtagagattgttgaccatttttaaaaaacgatagccactctttttcttttatgtttaaaactgaagttttgccaaatgggaaaattactgttacctctaccatcttaatgtagtaactttagattttaaatttttatattactattttcctttttgttgttcacatagtcttaaggcacctatacttttaaattgactttttcatttgatattatctatatgtatgtagttgtgataatgattattttaattatattactttatactcttaatttatttagagtatttctctattgctgaatacttaagtagttttaaattttattatgataaattcctgggagggggattatttagtgaaataatatgaagaactttatgacttatgtttgccttattgcattcccaaagagttgtaacattttacagtgttaccatttgagtaggggttttatatgntgntgctaatttagtaaacataggagagaaatcaaagnttttctgatttgcttttatgngatttatctgna

SEQ ID NO: 55630 - DNA, 619 bp, Homo Sapiens
gcacgaggtgggtcaagtttctggacaccaagtctctgggaactagtgtttgattttaaatggcatgtggcccttccttgtttcagtgacttagaaaagtaaaagccatttaaaaaagttagcaagattttttatcgacttcccaactgggcttccagccttgttgaatgaaatcatctatctctgattgggcgcaacgaactgcatttctttggacttctgaatccatgtttgtgctttctctggcccgtgaacacctcggcgattctgttagggatgggatgagtgggaggaagccctttgagaagggggagccggccctgtcatgcgcaggttttccactcatctgaggaagagccagggctctgaatttagcctaacactcatcttggctgtgggcttgggaagaaatggccattatttacagattgtatttggtacatattgtgtgatacttgaaaagataaaagggactgccagcccctaactgaaatctgaagctttttatcgcttatttttcctcgccctgtctcctcccttccacctttctccttgcattgtgatgatctagtaggcacgtctgtcaacaggacacatgcctcctctgactataacctct

SEQ ID NO: 55631 - DNA, 1076 bp, Homo Sapiens
  misc_feature (783)..(783): n is a, c, g, or t
  misc_feature (785)..(790): n is a, c, g, or t
  misc_feature (792)..(796): n is a, c, g, or t
  misc_feature (798)..(798): n is a, c, g, or t
  misc_feature (800)..(801): n is a, c, g, or t
  misc_feature (803)..(803): n is a, c, g, or t
  misc_feature (805)..(806): n is a, c, g, or t
  misc_feature (814)..(814): n is a, c, g, or t
  misc_feature (838)..(838): n is a, c, g, or t
  misc_feature (853)..(853): n is a, c, g, or t
gttccctcctgtcctgtggtcctgcccctgggatgggggtgccttgctccagcgggctgcagatcccagcactggcgtgactgacggctgaggcctgcctctccttcccaagcccccttccttcatccttgggggtctcaggctgcccccatcatgggggtctgggccctgcccaccctcctgccctcccccagccacctggctgcatttttgaagctgcctggcccccaggggccctgacctgacctctctcctctcccctcaccctcctgcccctggccactgcaggatcaggaggggagaagaaggagcctctgctgcctcccaggctgctgggactgggctggttttgtccttgaagtggtcaggatacaggacaagggcagccccaccccatccagcctgggctccccgcagacccttgctgctcccgtggcctggacacgctggggagcttctcacacctacccctaccgtccagcctggcctcttccctgaatcagcttcaagatggcaccagctctttgggcctaggatactgccgggccccccaagggggtccccagcaaccaggcctggcctcctggtgtctgcggtcacagtggcccctgggcaggggcacccaggctgaccctgaggtgctgctgctgggtctgtcttggctctggggtgtgctgggagggtcaccaggtcccttttccttcctgtgccctctgaaagctaaatgtctgtgtggctgtggagctcgagggtctgtgaataaaggcggcggcactgggaaanannnnnnannnnncncnncnannccccccanacaccccaaaaaaccaaaccacancaacccacaaccaanaaaaatctcaaggcattttttttccgggggcgggaaaaaaaagggaattgaaaagggccccaggggccataaagtgtgttcctgagaacaattttttttggtaaaaaaggggaaaaaattgggccggggctcccctaaataaggagaggccgttattaatatttcgaaaaaaccccggggtaacaccggccttaaaaagaaacccggtggcaaaaaacccggg

SEQ ID NO: 55632 - DNA, 647 bp, Homo Sapiens
aaagcataaagaagctgtaactcttctttctcagcagagaggagagattgaatttgaagtagtttatgtggctcctgaagtggattctgatgatgaaaacgtagagtatgaagatgagagtggacatcgttaccgtttgtaccttgatgagttagaaggaggtggtaaccctggtgctagttgcaaagacacaagtggggaaatcaaagtattacaaggatttaataagaaggcagtaactgacacacatgaaaatggagacctgggcactgcaagtgaaactccgctagatgacggtgcttcaaaattagatgatctgcacactctgtatcataaaaaatcttattaaattgaccatatctccagacaagattgttaatcagactattctgaatttggggcactggggaagatggtgacaaagactacaaaatcaggggaggctgtttgttgcctaaatgaaaggcgggtacctcagggcttcatgtgaacaattctcaatgcataaaacaccctgttttctgtggtagaccataattagctattgcatgtaaagcaattttgattttcttgaacttgtaagcaccaaagcatgtgtttcccaaaggggtattactgggctcttaagtaccaaatgaaaccctact

SEQ ID NO: 55633 - DNA, 836 bp, Homo Sapiens
  misc_feature (772)..(779): n is a, c, g, or t
  misc_feature (781)..(783): n is a, c, g, or t
  misc_feature (785)..(787): n is a, c, g, or t
  misc_feature (796)..(798): n is a, c, g, or t
aacaagatttaaggagcctctgttttggaagggctgtctgtgattgaacgtgaaatgtgtagtgccattgggaccacgaagggaattcttgcacatgctcgtgctggtgtgggcatgggactggctggaaacgtctgtatgcagggagccagggtgagggcagagtgtggtgacagccgaacttggagtaatgtccgtgtagaaaaaggaccatgttcttatccagccaatactgggagtgctgtctccacaatttcagggcatctgaatgtttgatgtggttttgtgtgtgtgtatgtatgtgtttaatattgaagtggatcatgagatgtaaagaaaacaataatggcaatgacttatattcaaatctgtatttgtttctttatcaatgtaatctgctgaggaccttttgtctaagattcagtagtgttttaaggttctgatatcgaattaatgaagtaaagttgttgatggtggtgaaacaccgtagggcatgtggttcaaagagaagcaggagggcaagggaaagttaccctgatcttagtttgtagcttatgacttatttaatgaatggatgcccagccaagctcagagtaggcgcccaaagcattgtggattattttcctgttttgtctttttttttttttttttaagccatgacatcccagaagaggacagtgaattactcctaggtcggctcttatagagtggccatagtgttctgtcaaaacacttgcttccattttcagagataaaatcattgattacaaannnnnnnnannnannnaaaaaaaannnaaaaagggcggccggctctaaagtactcctccaagggc

SEQ ID NO: 55634 - DNA, 734 bp, Homo Sapiens
cgggctggtgctggaccaggcggaggcagagggtgtgtgcaggaagtgggaccgcaatggcagcgggacgctggatctggaggagttccttcgggcgctgcggccccccatgtcccaggcccgggaggctgtcatcgcagctgcatttgccaagctggaccgcagtggggacggcgtcgtgacggtggacgacctccgcggggtgtacagtggccgtgcccaccccaaggtgcgcagtggggagtggaccgaggacgaggtgctgcgccgcttcctggacaacttcgactcctctgagaaggacgggcaggtcacactggcggaattccaggactactacagcggcgtgagtgcctccatgaacacggatgaggagttcgtggccatgatgaccagtgcctggcagctgtgagcagctccggctcagccctgctgccctggcctgtcactccccacccctgccggagacctcccttccctgggccccttctctcctgggcagccacaccacagagcggggaggggcaggtgggggaatggaggctgcaggactggctagaccaggtccctgccggtccaccaggcggaggtgggacaaaggtcctaacaggagtcactggctcaggaccccagggagaaacgctctccccacccacgccatgctgaccagagatcttgcagcccctgtggatgcccccgccgagggtccccgatccccgcacccggactgctgc

SEQ ID NO: 55635 - DNA, 763 bp, Homo Sapiens
agatcgaacctggtcattgtggaaaaagcaggatacaatctcacctgagttcgagccagtttttagtctttttgccttcaccaacaaaattacttctgtgcacagtagaattatttggtcttgtgattggagtcctgacagcaagtatttcttcactgggagtcgagacaaaaaggtggttgtctggggtgagtgtgactccactgatgactgtattgagcacaacattggcccctgctcctcagtcctggacgtgggtggggctgtgacagctgtcagcgtctgcccagtgctccacccttctcaacgatacgtggttgcagtaggattggagtgtggaaagatttgcttatatacctggaaaaagactgatcaagttccagaaataaatgactggacccactgtgtagaaacaagtcaaagccaaagtcatacactggctatcagaaaattatgctggaagaattgcagtggaaaaactgaacagaaggaagcagaaggtgctgagtggttacactttgcaagctgtggtgaagatcacactgtgaagatacacagagtcaataaatgtgcactgtaatggacttaataactacatgcttgcagtcactggtatcttaaaatattatcatgtaaacaggtcatctttaccttcataactgaattgagtttctgggtttttttttttttttgagatggagtcttgctttgtcacaacctccacctcccaggttcaagcgattctctttcttcagcctcctga

SEQ ID NO: 55636 - DNA, 727 bp, Homo Sapiens
  misc_feature (707)..(707): n is a, c, g, or t
  misc_feature (723)..(723): n is a, c, g, or t
tattttgaacttaaagctaatttacatgctgaacctgactatttagaagtcctggagcagcaaacatagatggagagtttgagggctttcgcagaaatgctgtgattctgttttaagtccataccttgtaaataagtgccttacgtgagtgtgtcatcaatcagaacctaagcacagcagtaaactatggggaaaaaaaaaagaagaagaaaaagaaactcagggatcactgggagaagccatggcattatcttcaggcaatttagtctgtcccaaataaaataaatccttgcatgtaaatcattcaaggattatagtaatatttcatatactgaaaagtgtctcataggagtcctcttgcacatctaaaaaggctgaacatttaagtatcccgaattttcttgaattgctttccctatagattaattacaattggatttcatcatttaaaaaccatacttgtatatgtagttataatatgtaaggaatacattgtttataaccagtatgtacttcaaaaatgtgtattgtcaaacatacctaactttcttgcaataaatgcaaaagaaactggaacttgacaattataaatagtaatagtgaagaaaaaatagaaaggttgcaattatataggccatgggtggctcaaaactttgaacatttgagcttaaacaaatgccactctcatgcattctaaattaaaaagntaaaatgattattagntcag

SEQ ID NO: 55637 - DNA, 868 bp, Homo Sapiens
cggctggaccggtccggaatcccgggatcgccgggatggaaagtggcagaatgttcattttcatcgctcggggtcaccaacagtacccatcaagccaccctgtattccaaatgggaaagaaaacttctcaggaggcacctctttgtggcaaaacatctaaggcctgaaaaccattcacatatgggtcttctaaatttcaacagtgccacttctgcattctctgttctcaaggcacctggatggtgaccctgggccgtcctctcctcctcttcatgcatgtttctgagtgcatgaagttgtgaaggtcctacatgtaatgcatatgtgatgcatcatcttatcatatattccttcctatacattgtttacacttcaactacggggatgttccacacaaacttaaattactgttggcaaaacaatagggggagattagacaaaaaaaaaaatccacaatattccaagtacaactcttcatcaagtttctctgttaatgccaagatttaacagacttaagaactattgttctctgaatgacagttgtaagagaaatgtaaattttttagaactctttgctgttaatctgttttggtttgtttggtttttttttttttttttaaggtaaaaaaaaatacaccttcagtttcctggtgtgatcctggttaaaatggatgatttttcattgaaagttttgctgattaacaattaaagtgggatgatatgtgggcaaaatcacttatgaaagtagaagcaagaatcagttggtttgctaccacataaagccatgctgtttttggtcaaactgtgtaaactggaaaaattcacatcatttctgagtttaatcactttaggatatattcaccatggt

SEQ ID NO: 55638 - DNA, 470 bp, Homo Sapiens
  misc_feature (18)..(18): n is a, c, g, or t
ggcacgagctcaggtatncgaggacccccaggtcctcctggatactgtgattcttctcagtgtgccagcatcccatacaacgggcaaagctatccaggttccggctaacacattttctaagtcgccagtgctgcttacagtttgaatacatgaaaatcctgtttctgagatgtttgcgcacgtgcttattaggaaatgagtctgtatggaaatctcaccacagataatggttaacgaaccgggtcgacatcacaaaggagggtggagactctttttactaacttgaatgagacaaaagcagtggtgtcagtttataatcctgatgcatttcagtaataatgtagaaaaacattattttaaaaaagttccaacacacagccatgaggagcctcagttttgaaagaggtgcataataaaactactaaccagaggagtctatgccattttaagaaaaacaattaacctggtta

SEQ ID NO: 55639 - DNA, 734 bp, Homo Sapiens
ttttttttttttttttttcagtaccaaatgaccaaaattttttatttgactaaattctattcatgcatgagcatgacagtctcccgtttatttgactttggcaataaaaaaacaagcagccttgtacagaacagtgaaaatgccaaggacgaggacagtctacagttttactgtagaatatatatatatgtatacatatatgtgtatatatgtatacatatatgtgtatatatgtatacatatatgtgtatgtatatatgtatatacatgcatacatacacacatgtatatatacatgtgtatatgtgtatacatacatatatgtgtatatatacatatatatgtgtatatatatatatattttaaaaggcctctctccctttggccatatcaactctcagttcaggccattaaatacagacaaattttcaaattcacttctttacttctccaagatcttcgatgctgtcatcatctacctctggccatttttcctgaatgacatcaattatgtcatctgtaaaatctccctgaatgataatttcatcctcccctgttactgaggcaccacaggagaatttttgagcaaaaaatctttgtgcttctttaagatcaatttcaaaagttgcaaggccacatactcttgtcacatatttcttctttgctctgggaattttggctatagtaccttttgtggtacggtctctttttttgttttatttgacccttccact

SEQ ID NO: 55640 - DNA, 764 bp, Homo Sapiens
  misc_feature (643)..(643): n is a, c, g, or t
gggaggggggcgtggggtactgtattaaggttagtttccaacaagaattgatgtaattagaagaaattgacttccttacctattgcctctgatatttacttgcttaaatttttttttattggaaatccagaaaaagtggatttagagaacaacactaactcccacctaatctatgacagagatgtagaagagagtacctgtgaaaaatgtgaaagtatctgaaaaatgtaacctttggcagcctgagcatagtcaaccagaaaaactatctgaattaaaataattggtccataggtactattttatttggtccataaggattattttttcaacttttttttcaagtgtattattatgtcatttcccacgtaggttactgatacctgaagactttttccacctttaaccttactcgttgaggagctttgtagtctaataaaagagaaatataagtaaatgttagatatatgggtggataatggtaactatgtgcttaaagaggtataaaagaagggtagggagcagataagacaaaggaagggctatattataaggaagaatattccaagtagggaagagaaaaagatatgttatccatataatattttatgtgcagtagaagacatgttctatagaagagacngaagatgaaactagatgggcacccagatcataaagcaccgtatgtacttagggagttggaattatctttaaaaactaatcatagaatttcaaagcagggggaggtaacatttttttaaaaa

SEQ ID NO: 55641 - DNA, 859 bp, Homo Sapiens
  misc_feature (11)..(11): n is a, c, g, or t
  misc_feature (475)..(475): n is a, c, g, or t
  misc_feature (702)..(702): n is a, c, g, or t
  misc_feature (717)..(717): n is a, c, g, or t
  misc_feature (721)..(721): n is a, c, g, or t
  misc_feature (723)..(723): n is a, c, g, or t
tcaccagccgngagcatggtgtatctcactcactgcacctccactcccagttcaagcgattcccctgcctcagcctgccaagtagctgggattacaggcatgcgccaccatgcccagctaattgtattttagtagatatggagtttcaccacgttggccaagacagtctcgatttcctgaccttgtgatccccctgcctcggcctcccaaagtgctgggattacaggcatgagccaccacgcctgtccggttatttgatttttataagaaaattttactattattttcagataaatttatgtcactgtcattcattacattttaatttttgaaactgatgtctttcccagaatttatgtactctataacggtgtgaatgattaccagtattaagccattttctcatctgatatattgagctatgttttatgtaagtattgcttattcaagtagttttaaaagatatgtaattggnttgttgtttcatgtcctacacagtaagaacaagagtatgttaacctttttgtcaggatatttgctatttcatatctttgaaatagagtagtagctctatttctaactaaattctatttatgtaacaacacagctaatttactcttggatctcattctccctttttatcctgagttaccatcagtgctaatgttcctcttttgggtatagttctccaggagaacttgncctatatttctttgngtgngnttttttccttccagcttaaacaaattaaaactaaatatctaaaccttgtattcagacattaaaatttaggagagaaacaaatatccctgggtcttggctttaactctttgaggccttttacaaatataattttatg

SEQ ID NO: 55642 - DNA, 703 bp, Homo Sapiens
ctttaaaaaatagacatgtttctaaaagtagctgtaactacaaccaccatctcgatgtagtagacaatctgaccttaatggtagaacacactgacattcctgaagctagtccagctagtacaccacaaatcattaagcataaagccttagacttagatgacagatggcaattcaagagatctcggttgttagatacacaagacaaacgatctaaagcagatactggtagtagtaaccaagataaagcatccaaaatgagcagcccagaaacagatgaagaaattgaaaagatgaagggttttggtgaatattcacggtctcctacattttgatccttttaaccttacaaggagatttttttatttggctgatgggtaaagccaaacatttctattgtttttactatgttgagctacttgcagtaagttcatttgtttttactatgttcacctgtttgcagtaatacacagataactcttagtgcatttacttcacaaagtactttttcaaacatcagatgcttttatttccaaacctttttttcacctttcactaagttgttgaggggaaggcttacacagacacattctttagaattggaaaagtgagaccaggcacagtggctcacacctgtaatcccagcacttagggaagacaagtcaggaggattgattgaagctaggagttagagaccagcctgggc

SEQ ID NO: 55643 - DNA, 540 bp, Homo Sapiens
ggagattgtgttttaaacaatacatactgtactttttaaaggttgtattagcacatgcaaacagttcaccttaaaaaaacagaatgagtcataaggagtcagacatgccattaatcagctcttaattatcttccataaaagagggaaggaaaaaaatagagataacacgaatctgtgtataatccaaaaggttctctgtgacttggaatgaagccagaaaaagaatctcattttgtttcacacactggcacctggtatggagatcaacagttgctcaaaggaattttaaataattataatgtgttaatagataattaattgggaattgattctgcaaggcaaagtcaaacatttgttttataattgtgcagttcttgcaagagatcacctatactttttttcccccatcaggtataatgggtctctcccaaatggcgatagaggaaggaggaaaagtaggtttgctttgtttaaaagacctaaggcaaatggggtgaagccagcactgtgcatattgcttgtctcctcaggctgcaaggt

SEQ ID NO: 55644 - DNA, 793 bp, Homo Sapiens
caggtgcctccatggcaggctctgaagagctggggctccgggaagacacgctgagggtcctagctgccttccttaggcgtggtgaggctgccgggtctcctgttccaactccacctaggcccagctactccagacttctatgctttggtggcccagcggctggaacagctggtccaagagcagctgaaatctccgcccagcccagaattacagggtcccccatcgacagagaaggaagccatactgcggaggctggtggccctgctggaggaggaggcagaagtcattaaccagaagctggcctcggaccccgccctgcgcagcaagctggtccgcctgtcctccgactctttcgcccgcctggtggagctgttctgtagccgggatgacagctctcgcccaagccgagcatgccccgggcccccgcctccttccccggagcccctggcccgcctggccctagccatggagctgagccggcgcgtggccgggctggggggcaccctggccggactcagcgtggagcacgtgcacagcttcacgccctggatccaggcccacgggggctgggagggcatcctggctgtttcacccgtggacttgaacttgccattgcgactgagctctttctcagaagctgctacaagatgacacctcatggtcctgcctcttcgtgtgcttttcccaagtctttctattccaactcagggctgtgggggtggtggttagcctaacgtgtttatggccaaaaataagtggtttacacgtttgtttattacaaccgtttcacacg

SEQ ID NO: 55645 - DNA, 696 bp, Homo Sapiens
cgcatatttgcagaaagtgtggacggggctttagtcggaagtccaaccttatcagacatcagaggacacactcaggatagaaactttatgtgtatagggaatgtggtacagcctttagccaggagtcatacttcatcagacaccagaggacacacacagtgctgtggctttttcagccattgctagataccaaagtggagacattctgtgtgtgattatgcatgagactgtactggtaagacttgtatctccatccacctgaaggagaattgctggctcattttcaggagccctgcccttcctcactgtggatggtgggttgtggaaacccggtcaggtaatgatagtggcaggaggcagtcaaatgcccaggcagataggggtgggtacctggtgaaacccaaccttaaagctgaagacagtcccggctaaatcctcatactgaattgagaacctgtcttcccatttggtgtgctttcctccgattgatcccaacccttcacctattttacgtatacctgccctttcctaattggtttttacactgctgtgcccaccttttgagtggtgcctttgcatacttacaaatcagtcaacgtgtattcccctattctgagcccataaaagacccagactcagctgcagtgaggagagaaatcaccctgctgtgggggttggggaccactccctgcatcc

SEQ ID NO: 55646 - DNA, 641 bp, Homo Sapiens
acttgattgaagaggccattctttaaatgtatcttactgctcaatttcaccattgcctattgtagaatgcgccctgcccgctcagcatttgcctctaggcagaccaggactccttcccctccccaactaatcttccttctcctgtatcttattccctagggccacttgcacctttcaaaatggataaattaaattcccctgctccccttctaccaactttaacatcatatccttggtgtatgatgccctacttttcattgttttgcctaaataagagtatgcttgggaattttaggcttagggctgggaaaagatgggatatggaatcgtcagctatagattgccggacaagaaattttaggagcagtagacctttcaaccgccctcaataggatggaactgactgtccccacaacctatttccctttcagtggcttgctccagccaaggccccttatttaagagatctttgtgcgctctgaaaaccatgcatatgccagaactaggtgctctgtttcatgaaggcagtttgataactgaatggactttggaagtgcccagtgtttgactattaccctggtgcgatgatcacactgggcgtatcattgtcacatgatcccatgtttgttgatgaaaataaa

SEQ ID NO: 55647 - DNA, 591 bp, Homo Sapiens
  misc_feature (60)..(60): n is a, c, g, or t
  misc_feature (71)..(71): n is a, c, g, or t
  misc_feature (96)..(96): n is a, c, g, or t
  misc_feature (100)..(100): n is a, c, g, or t
  misc_feature (117)..(117): n is a, c, g, or t
  misc_feature (178)..(178): n is a, c, g, or t
  misc_feature (197)..(197): n is a, c, g, or t
  misc_feature (388)..(388): n is a, c, g, or t
aacacggatcatggacatgcctgcaagccctgggaaagtcctaccaccccggcctgccanttggtcatccngtaataagtgtttgatggggtgccntttnaccgtggactcagagancaagatctactgtgtccgagattaccacaaggtgctggcccccaagtgtgcagcctgtggncttcccatccttccacctnaggtaagatgcccttccagacatgctcccaggggcttctaagacatgaatatctccctgggctcatttacaagatccatgtcctgtccttacagcaaggtatccttttaaaaatctcaactctggcctggtgcagtggctcacgcctgtaatcccaccccttttaggaggcccaggcaggaaaattgcttnaggcctggagtttaagaacagcctgggcaacatagcaagacctcatctctacaaaaaattgttaaaaattggccaagtgtggtggcatgtgcctgtagtcctagctgcttgagcccaagagtttgaggctgcagcgagctatgatggtgctactgcattccagcaggtgacagcaagaccttgtctccaaaaaaaaaaaaaaa

SEQ ID NO: 55648 - DNA, 916 bp, Homo Sapiens
  misc_feature (700)..(700): n is a, c, g, or t
  misc_feature (705)..(705): n is a, c, g, or t
  misc_feature (707)..(708): n is a, c, g, or t
  misc_feature (737)..(737): n is a, c, g, or t
  misc_feature (739)..(739): n is a, c, g, or t
  misc_feature (795)..(795): n is a, c, g, or t
  misc_feature (797)..(797): n is a, c, g, or t
  misc_feature (821)..(821): n is a, c, g, or t
ttcagttcccgaaattatccaggcacattctgtgcgctactgaacttcagaaagcaccagtccatccagtgtgcagaggctggtaagtaaaacaggccagccgtgggcacagacagtttcaccagaggccccggggcagagggtcttctccagctcttccagggcggggctcatctgttcctgggccagaggtggacctgtctgcaggcttgtaagggtggggagacgccagcctggcccatgggctgtccacacccaccccccgcagaccgcgctgctgtctgcaggggatgccaccacttcctcctggcctcgggtgcacaggtgaaacatgaagaagctattggggcggaaaatggctctcaccaggctgctctcgggttaatgaaaactcgtcaaattctccatgcagcagcagccagccgggcacatgctgtcctgccctgcccgactgtgtgcagggaagcaggtcccctgggcctgggcggagggactgcgtgcctgtcagggaaggccgaggctccggacaggcgggaagcagccttctccttaatcaccccatgtggaaaccaattaaagattcgattctctcagacccggggcattttagccttggttgaatcctcctggaattcacagggaagtggctttgccctctgccctcgctgctggaaggcaggggccgttctcgccttggttntctangnntgtgtgcggcaggagctgactgcccctangnctagatctctgcacaacttcgctcagggacacctgcctgtgtgcatgtctcatggngnggaatgtgtttcctgctcacaggntaccgtttggtgtcatgcagtttactgggatgtacaaaagcagctggtgatcttttgtgagagctgcacagaagcaggaagtctttatttgggtt

SEQ ID NO: 55649 - DNA, 658 bp, Homo Sapiens
agacaagggtaaagacagtacaaattgctccataatctcacaagctggaaattaccaacaccatttagtacttttgtgtatttcctcacagcctttttcattgcatatatgtaaatacactgtattttaaacatggttacaagcacattgaactttatatcatttttctttttcatttgacataacattatggcaaacaaaaactttaaaaaagcacatgggctttacaagtgagcatatgctttgcaaacatttctgtcagctaccagtaaccaactgcaaaaactcatattctacccaaaacagaaattgtgccagtcggggagtcctttgatcaccatgcagtaaacctcgccaaaatattgtaaatttaaacaaactaaaacccaaccacttgaaaaaatttaaagcacttaaattgctattggttcaaggaagaaataaagaatgtactgacaaatatttagaaagcattgaaaactagaatgccacatacccaaacctatgggagacaagctgcactattctcatagccttaaatgcttctattattaaaaagggagagagaaaaggcaaataaactaagcattcagcctgagtgcttaggaaaaaaaaaaaatgtaaagataaaggccgaaatcaatgaattaagaaacga

SEQ ID NO: 55650 - DNA, 668 bp, Homo Sapiens
  misc_feature (590)..(590): n is a, c, g, or t
  misc_feature (644)..(644): n is a, c, g, or t
ataaattgtaccactatgactttatccatgtaaaatagctatttattgaattttcttttaaaagctggatttactgggttttttttttctctcagtttaaacatcttaacagagaatttgttactgtttattaaaagaattgcatttggaagcaagaaaacaaccggatttgcaatcatgtgaagaaacaataatgcctttattatcaagtgttaagcacaattcttataacaaactgtgataaattctttttgtttttttttcctttgccccattattttcttatgaacaaaccaaaaattcatggtgagcagttgcagtgttggctgatatatcttttatgtacagggaatttgaaaaggacagtggattcatttagaagtgtaactggtgctgtgattatagcaatacatttgttagttgtacttcatctttttcatgctagctttttaaatgtttagttttcctcttgtcatggtcagctgctgaatttacttgaaggatgtagaatactgtttaaaaaatactaaaatttgtacaattagatcaaagaattgtgcaatcatttcctttttaatttttatactatntaatttaaccaaagtctctagtgaatatttcaactttgaatgtaaacttaacanataaacctgaccaccaaggagatg

SEQ ID NO: 55651 - DNA, 767 bp, Homo Sapiens
tgcaccatttgcttcagactttgaaggcattgcagacatgccatctgattttgagaagggtacgaaaccgtttaaaccactagaacaacttatgggggtatttccagctgcaagtggtaattttctacctccatcatggcggaagctcatgagtgatcctgattctagtataatttgacttctatcctgacaagatttcgctatttgatttgaatgggaagaacatatgcatggcaaaggtgttgctctcttgccattcgtggatggagcgaagggctacgagctgccctagaacgagggtatacccagacctcactctcccaaggaaaggaggacccaaggaagaaaacaaggcctttgggagggtgatgtctatattatgtggggaaacatcacccactccatgacttcattttagagctgtaccagacaggttccacagagccagtggaggtaccccctgaactatgtcatgggattcaaggaaagtcttctttggatgaagaagccattcttccagatcaaatagtatgtgctcctgttcctatgttaaagggatctgacacagaacactgtagtcagtattaattttaacagacccacagtttgctgaagattacatttttacaagctgtaatgcttccaggagcaatgaaagccagcagcagtactgaaacctagtgactggggacaatccagcacatggacggcagtggacgcctcagcttggctttaaccgtgaacggaggcctgtgcacctggttcca

SEQ ID NO: 55652 - DNA, 588 bp, Homo Sapiens
ttgatatcacagagaagatactcggaggattgttggaatgtatatagtttagtaagaagtgggtaagaaagagggtcttaattactgagcacttattatgtattaggttctttgccagatgtttttacatatataaactcatttcagaaaacttatttaaagtaaatggggccgggtatggtggttcatgcctggaatcctagcactttgggaggctgaggtaggaggactgcttgaggccgggagttggagaccagcctgagcaacatagtgagaccctgtctcaataataataataataataataatagtaataatgaagtaaatgggataaggaaagaaggataattatctttaaagaggggtttccaccctccctccccagttacttaaggaactaagtgagtacatctccagttgcccatgaaagcataaatttgttttcctcagctgaggcaagtggtagagtatacaggattacgaagtaacatgtaaaaggcaggacgcaccataaagtgtacaatgcctatggttcaccttgagaaaccacatgattgggacccctgaggttactgactgactacaagg

SEQ ID NO: 55653 - DNA, 760 bp, Homo Sapiens
caatatccacaacagtcgcttgaacagattggcacccgaattgccaaagttttggaaaagaaccagacgtcctgggtcctctccagcatggcagccctctactggagggtgaaaggccaaggaaagaaggcaatcgactgcctccgccaggctctgcactatgcgccacaccagatgaaggatgtgcccctgattagcctggccaacatcttgcacaatgccaagctctggaatgacgccgtcatagtagccaccatggcagtagagatcgcaccacactttgctgtgaaccacttcactctgggcaatgtctacgtggcaatggaagaatttgaaaaagcactggtgtggtatgaatccacattgaagcttcagcccgagtttgtcccagccaagaaccgaatccagaccatccagtgtcacttaatgctgaagaagggacggcgctctccttagtgcacttcttccttctctctttctctttactcatgctctaaaaaaaaagaataagaaaagaaaccaatcattgtcagtatctactattaatgatgtgtgtgaaaataactaagacttataacaggacttttacatatgtgggaattggtttgtttttgtttttacgtttctcctttcccccaccaaccctcagaagaggcaccttccaaaacacacatttcttaaaaggaaagtgcaccttccagaaaattgtgaaaatactgaaccaaagaattttctggagctgtgctctgtctccaaaaac

SEQ ID NO: 55654 - DNA, 461 bp, Homo Sapiens
tattcctttttctcttttttcaattctatgaatatgtattattttaaagttatatttttcacacagagatgatgctatattacaccttcccttttttgttggtttcttaaactctaatctcatgacagattataccttccttattacttgttttatcttactcagaatctttgaatatatttttctgcccagaattatctaaacaaaagggagaacaaaagaagtatgtctcacttgggaactgaatcaactctaaatcagttttgtcacaaaactttttgtatttgactggcaatgctgattaaaattaaaaatgcacagaaaaaaaaaaaaaaaaaaaaaaaaaaaaaaaaaaaaaaaaaaaaaaaaaaaaaaaaaaaaaaaaaaaaaaaaaaaaaaaaaaaaaaaaaaaaaaaaaaaaaaaaaaaaaaaaaaaaaaaaaaaaaaaaaaaaaaaaaaaa

SEQ ID NO: 55655 - DNA, 499 bp, Homo Sapiens
tctattctgcatactatgcccacagaaaaggaagaaaactttttaaaatggagaatcgcatgttttcaatgaaaacattcacttggtatttcatttgtaagaaaaaaaaatggtgcttttataaagaactttggggaaacactttgctgaaatgttgggactctggaactagccaagaaaagagaatattctctttgtctacatgttcctaaatctttactccaaaacaactccaaaaacaactcacaaagcatgaaccaaactttcacagcataatttcaagctaaggaattgtaattctgtacttaatatattcatgtttgaaatgaatgctttgaaccacaggagggagatgttgtcaaatgctacagtgtgaacatgtattttgaatattctgtaacagggcaagtttccactctaagcagctatttaaaaataaatatgaggattttggtaataaatgcttatgcttaagtacaaaagtaaaaaaaaaaaaaaa

SEQ ID NO: 55656 - DNA, 795 bp, Homo Sapiens
ggatgagagaattttccatgtaactccttttccttaagaaaaagaagcaaaaatccctcatgcagtgccatctgactttatggtgtttcacattatatagttactttttttaataaacgcataagattaactcttcctgcaacccaaggtggatacttggatgtttgatttttatttatttatttatttattttttggggcagtctctctctgttgcccaggctggagtgatgcgtgatttctgctcactgcagtctctcccacccgggttcgggcgattctcctgcctcagcctcccaagtagctgggattacaggcgcgcaccaccacgctcagcctgatttctaggctgaaaaggctgggactcaggtactttccccagttgggactgaactttctcatcagagaatgggcctcagaagcaatgttcccaaacttgtggttgggtcatcgtggaaaagaaacctcaaataagaaaaataattacaataagaaatggattttcttttttcccacaacagttatacattataaagaacagactgtcgtagaaaactgtctttgcttccaaatcagcagaggaccattgtatgtattgtcaggtctttatataagagtgaaacctttatttatgcttcttgtgagtagagaataaattttaaaactaattagatgaaattaagaacagagtattggaacatctctgtgttttccggaatgtttactcaggtccatgaatgctgtgatgctgggaacttagggaagattcaccaaaatttgagagtgataaatggc

SEQ ID NO: 55657 - DNA, 458 bp, Homo Sapiens
  misc_feature (266)..(266): n is a, c, g, or t
  misc_feature (310)..(310): n is a, c, g, or t
  misc_feature (379)..(379): n is a, c, g, or t
  misc_feature (420)..(420): n is a, c, g, or t
  misc_feature (426)..(426): n is a, c, g, or t
  misc_feature (438)..(438): n is a, c, g, or t
  misc_feature (449)..(449): n is a, c, g, or t
  misc_feature (455)..(455): n is a, c, g, or t
ggtgcagtgcagcttcactaactgtttgcagcagctctactcagaccttaaatgcattgacattcactaaatttctgtcagaagacctcttttatcataccatagtaggtgttcaaaattaggtgattctatgctaatcctctcccccagctcaaactgacacaaaatatgccattctgtatttctagactagaccacttttctgaattccagatttttcataaatttcatgtaggactcaccacctcaaattaaaccaaatcttnttacccctccttctcccatcccctcaacctaaactgtcttcatntcctgtattggcctatttgcaagtgaccatccaagagccatcctggagttcctccttccagcctttctnctcttgtctagttagtcaggcaagtcttggcagattgcggnctccgnacctgaagtttntcaaacagtancccctngac

SEQ ID NO: 55658 - DNA, 560 bp, Homo Sapiens
  misc_feature (6)..(6): n is a, c, g, or t
taatancactcctcaaatgttttgaagattgttgcaccttggaactaccagtgtgcacacaatctggctcaatgtatatattggcccagcaaggcaaagaactgaagttccaggatggaagaacctgtgttctcctcataatagtatagaataatttaagataggcaagaaggacagcagtaaatgaagaccatggaagaaaagaaggaatgccaaagatcgaggaaatctaccaagactagtagggtagtccagaagaagctgtttcagggcctgttgccagctatgcctttgagaacctcgggatcccaaagaatgaggggaatttcttcagaaagacaatctcggcatgcattatttctttgttttgaagattcactcatgttgcatgcatctgtagcttgtgccttttttattgcctagtagtattctgtcatatgcctatcttacaatttgattatctattcacctgttgatgaatgtttgaattttttccatttgaggaattttatgaataaagctgctataagcatgaaaaaaaaaaaaaaaaaaaaaaaatg

SEQ ID NO: 55659 - DNA, 499 bp, Homo Sapiens
cccctctcctatcatgcagagtggtggcaactataatccaagttcagtgtggtgagtgacaagaatcatatgcactttggggctatcacttgtgccatgggtattcgcttcaagtcttactgctccaaccttgttcgcactttgatggttgatccttctcaagaagttcaagaaaattataactttttgctccagcttcaagaggagctgctgaaggaattaagacatggtgtgaagatatgtgacgtgtataacgctgtcatggacgtggttaaaaagcagaagccagaactgctgaacaaaattaccaaaaacctagggtttgggatgggaattgaattccgtgaaggctccctagtaatcaatagcaaaaatcaatacaaactgaagaaaggaatggttttcagcatcaatttaggattctcagacctgactaacaaggaggggaaaaagccagaagagaaaacctatgccctgttcattggtgacacagtgcttg

SEQ ID NO: 55660 - DNA, 1120 bp, Homo Sapiens
  misc_feature (721)..(721): n is a, c, g, or t
  misc_feature (1005)..(1006): n is a, c, g, or t
  misc_feature (1100)..(1100): n is a, c, g, or t
ggtcggaatttcgggaatcgtcgaccccgcgtccgcccacgcgtccgcccacgcgtccggaagaatacaaatcatattcccctgaagccctctggagatacctcacagctcgccatgattggttaaacattatcttatggattggagaatttcaaacccagcatagttatgcttcacttcagcagaacaaatggccccttctgactgttgatgttattaaccagaatacttcctgtaacaactacatgaggaatgaaattttagataagctggccaggaatggggtttttttggcatctgaactggaagactttgaatgcttcctcctaagactgagccgtattggaggtgtaatacaggataccctccctgttcaaaactacaagaccaaagaaggttgggatttccattctcaattcattctctattgtttggagcacagtctgcagcatcttctttatgtctaccttgactgttacaaacttagtcctgaaaattgtccctttttggaaaaaaaagagttacatgaagcacacccttggtttgaatttttagttcagtgtcgacaagttgccagtaacttaacagatcccaaactgatcttccaggctagccttgcaaatgctcagattttgattcccaccaatcaggccagtgtaagcagtatgctattggaaggacataccctcctggcccttgctactacaatgtattctcctgngggtgtcagtcaggttgttcagaatgaagaaaatgaaaactgtttgaagaaagtggatccccagctattgaagatggcattaactccttaccccaagctaaaaactgctctcttcccacagtgcactccctctagtgtcctgccatctgatatttacatctaccaccttattcagtcattatcaccctttgatcctagcagattgtttggctggcagtctgctaaccactagctataggagatgcatggagtcatctcccacatttctctagccctgacctggnntataaatatgctatagtggaacgtcctgattttttgctaattatttacataatgggccggccatcattttgcatttggggaactttttcctggnccggggatttattccagagc

SEQ ID NO: 55661 - DNA, 420 bp, Homo Sapiens
gtgaaaaaattaattctttatatgttaatatgattgatattcggtggtgcttaaaaaaatcagtgtgtttttaaagaagtataagggaaaaggaaaactcatatgtccttctgtcactctgagacatacactggtaacatctgtgcaagcccctttccaggattctgaatgtacagtatatatgaatgcatacacagagaaatttacattcaagagtgtactatacttgttcttctataacatcagaaataggtttttactcagatgtcttcatgtcggtaattatagaactacataattatttttatagctgtattatgtagatttaacaggttcctcattgataaaacaatgtttttttggttgtttattcagtatctgaataacgtttctatggacatctgtaaacatgtatgaggg

SEQ ID NO: 55662 - DNA, 439 bp, Homo Sapiens
aaataccatacctcagaaaatgaggtttactatggaaatactgaaacagtctttgcagctgtgtgacaagtcactctactacatactgatttggagacctccgctaaatagttttatcactgcagactaaaatgtgggacttgtatcttctttgtttttaatgcacacacatacatgttctgtgcatgtatgtggttactgtgtatatgtgtatgagtgttgtatatgcatgtgtgagtgtgtgtctgtatgtgtgtacaactaaagaagctgcagaaactttgtaatactttgtgaaaaggattatattataaaggtttgtactgtctgagtgcacagctactggaataaatttagggaatctcaggaacaagcatataatttgtccaagatttatttcttctcagaagtgtaagtgcagtttttaattctgtatatt

SEQ ID NO: 55663 - DNA, 672 bp, Homo Sapiens
ataaagtttggtaatgcagcttttactgtctacatggtactgtacattagtttttaagcagaaacacaagaaaaatgggtataatttcaaagtagttcttggcagatggctagagaatactgcaagtgaccctgtatcccgaatacacagatatccctctattacaagtttgggattagccataattctgacatggtgtgttcaggtatgggtatatgttgtcagtctacacttgtggaagcaaatatcttgtttaatcaagatgatgtctagtgtcacctaaataatgcaaaaagtttaattctggatgaattcagctttactcaagatccacatattcaagtatcattccacagatattcacagaacacagaaatatctgtgttctgccttatgcctgtggctaagggatgcaaagtagaattgctttacattgactatatatgtgacatgtacgttgctgttttttttttaaaataactttatcatgatattcaggtagatcctgggttctagaatatttaaaacaaaaggataaaatgataaaccaaagagtcaacttgttaacttttcttttttaagagatgggttttcactagtatgcccagtctggactccaagtcctgggctcaaacgatcctccagcctcaggttcctgagtagctcacattt

SEQ ID NO: 55664 - DNA, 889 bp, Homo Sapiens
  misc_feature (786)..(786): n is a, c, g, or t
  misc_feature (798)..(798): n is a, c, g, or t
gcatttagtatctagaagccattttgatccaagaagctacttaagtgtcaaagtcagcatgcagcacatgtagcttttctgtaaacaagggtgtgatatgaaagctgcttttttaagaagagtaaaagcacattccatatacgtaagtgaattttaaaaataaattgaggcaaacagttaagttttatttttagagcaacaagttaactgtaaatattttaatgttagtttgctcatctatgatctgagatcatgccgaagtgagaaaaatctccccaaaatacaatttaatgcattgggaaaaaaaaactttaacagtaattccagccacaatctttagatcacccttgtaatgtgttacgggtccatttttcctggaatcgtttaatctaaagcagtttcccctgttttggagattttgtagttaattttaattttggctattgtttggaaaagatgagctgtctgtgtagatatgaagtatagttttttccataaaacagatgtttattttgtattaaaaaataccactgtacttgttttacaccatttgtatacatgtggtgatattaatgctaaactgtaaaattcaggaattaaaatgtgaccctgtaattccataattgatgtttgtgtttggtttgttgtaaatataaattaactccattttgagatatgtcaattttacagtatcttttaaaagccaataaaattatccataaatatttattataaactgctagatcataccccaatttttatgaaataattctaaacaaatgcggngtcaatggcacntttatcagttgactaccttataagaaggtaagcctttgggggaaaatcatagcatcacaggtatgggaggctttttctcaacctttttcaa

SEQ ID NO: 55665 - DNA, 646 bp, Homo Sapiens
  misc_feature (636)..(636): n is a, c, g, or t
atgcaggaactgaaaaatagtacaaattctagttcctttggcttgagtgacgagcgcattagtttgggtcagctgtcatcatcgcgggctgcccatctgagtgtggacccagatcagcttccaggttcagtgctttctcctcctcctcctccaccacttcctcctcagttttcatctctccagccaccgtgttttcctcccgtacaaccaggatctaataatatttgtgactcagataatccagcaactgaaatgagcaaacagaacccggctgctaataagaccaattatagtcatcattcaaaaagccagagaaataaagatattccaaacatgttggacgttctaaaggatatgaataaggttaagcttcgtgcaattgagcggtcacctggcggtagacccattcataagaggaaaagacagaattcacattgggatccagtttctttaatatctcatgcacttaaacagaaatttgcatttcaagaagatgattcttttgagaaagagaatagatcttgggaatcttccccattttctagtccagaaacttcaaggtttggacatcacatttcacagtcagaaggacagcgaactaaagaagaaatggtcaaacacaaagctgttgaccanggtatcagca

SEQ ID NO: 55666 - DNA, 375 bp, Homo Sapiens
ttgtttgttgggactatggccctcctgagtggggtgttaacactaaagcttccagaaacccttgggaaacggctagcaactacttgggaggaggctgcaaaactggagtcagagaatgaaagcaagtcaagcaaattacttctcacaactaataatagtgggctggaaaaaacggaagcgattacccccagggattctggtcttggtgaataaatgtgccatgcctgctgtctagcacctgaaatattatttaccctaatgcctttgtattagaggaatcttattctcatctcccatatgttgtttgtatgtctttttaataaattttgtaagaaaattttaaagcaaatatgttataaaagaaataaaaacaga

SEQ ID NO: 55667 - DNA, 469 bp, Homo Sapiens
gtcaaattcaacaggatctttaaaaacagtttattcttagaacacaaggatgatttaaaatccaaccgattatattaataaattaaagagaaagccagtgtgattgatcatcttgaaaagttgaaaagcatttaataagatttaacctgcatttttaacattcttacatcccttctagccgtcaaactctgatcgacttacacttaagactgtgtctttggtagcctaccctattccacttttattacaaaggcagctcttaagacataaatccatctcttcaggctcgaactgcaaaacacacgtcgagaggtgacaatgttgggactgtcaaaaagaacttaaagagtgggataaccagccgggcgcggtggctcactcctgtaatcccagcactttgggaggctgaggcgggtggatcacaacatcagaagatcgagaccagcccggccaacatggtgaaccccat

SEQ ID NO: 55668 - DNA, 582 bp, Homo Sapiens
gggacattggcacccccatgtttattgtagcactattcattagccaagacatggaatcaacccagaatcaacaggtgcatcaacaggtgaatggctaaacaagatgtggtattatacacaatgggatactattcagccataaaaaaagaatgtcctttcatttgcagcaacatggaaggaactggaggactttatagtaggtgaaataagccagcaatggaaaattaaacaatgcatgttctcactcatgtggaagttttaaaaagttaatcttatagaagtaaaaattaggacagcgcatactagaggctgagaagatagggggaaggaagggatagggagagatttgtgggaggatgcaaaataacataggaataagccctagtgttgtgtaccactatagcatgactatagttaatatatactttaaaatagaagaatattgaatgttcccaacacaaagaaattataggtgtttgagatgatggatatgcttgttaccctgagctgataactgtacattctttgtatcaaagtattctaccccacgaatatgtagaattattattcgtgaatttgaag

SEQ ID NO: 55669 - DNA, 713 bp, Homo Sapiens
ctggaccggtccggaattctccggatcctggcccgacccctctgcttcacctccagctctgctgctcctctactcttgggtcgagatccctttggagccacagcgaggaaccctgtggtcctcaggcaggtgtaccttgagtcagccaggagccctcttttcctgtgtcaaagcctgccctcgggctctgctcacctctggtgaccctccaagatgcccctgccctcagtttcccctcatgatctggcctctgcccccttctctagccacagcctctagtacactttagcaataccaccagactagttagagttccccactcaccaagcaagacatgcagtttcatgcctctgtgccttcgctcatgctgtttcttccgactggaatgccttcccctgctcctcctgccttgtctgcctggcaagttcatctctcacgatcccctcaaaggccccctcctccaggaaggcaacccctgtgcccctcccctccaggctacctctgcactttgtcaatgcttctcttgtggcacttatcacactgtattttacttgtttacatgtttgtctccccttctagactgtgaatccttaagggcatggactgtatcttatgcatctctgtatttctgcgcctagcacggtgcctagcacacagtaagcgctcaataaatgttgaatgaatgaatgatttaatcaaaaaaaaaaaaaaag

SEQ ID NO: 55670 - DNA, 1017 bp, Homo Sapiens
  misc_feature (871)..(871): n is a, c, g, or t
  misc_feature (940)..(940): n is a, c, g, or t
ttacaattatgatgagataccccagtgatttaatgatgttagaaagaattaaatgggagagaattgctaacagctttcttgatctcttaactatggagatgtcattcatttatttctggggtgaaaattatagcttgctttttgacattgctgctagtattgttctttgttgctttaaaaattgtctctctttagaaaaactcttgagcagttaaacagttttttttctgattcatatcattgcttttaataacatgtaaaggctgtgtgtagagcaaactatataaaatgagtagaaagggcttactcatgttaattggcatccttgatgattttagttgagattccttaacatttattttagatcacatctttacgtaacttatttttcctaatgttttccatcgtgtcttaaaatgatgctggtatatcaggagattgcagtattatagtcatactccccaatccctagaggagaggaaagactaattcttgttttaagggcccctggagataccttttattaaggttgaaaaaggtcaacacagcctgaaaataagaaaaatatatactagcaattactaattttctaaatgtgtgtatctctgctgtactaatgtgtgaacaatatgtcgtgcataatactgtagctggtcgtggtatgtcaatacattctgtgagtgtgtacagtctgagtgatcagttttctatttttatgtgtaaaaaaaataacttgtcgtatcccatttaaaggccaatttctgtattcaggcaggcatatgtacatacatgaataaagcccacaaaagtgtgcacatgtattcagtaacagaatttgtcccttttatttttgaaggtcagaaagggctgntttgatttgggtttttttttttatccatctccttgagtagggtaacataattatccacaaaggctgaantataggtaatccagtaccattggcatatttattaaaatatgcccaggggcctaagtaacccatgcccatttagtccc

SEQ ID NO: 55671 - DNA, 539 bp, Homo Sapiens; identical to SEQ ID NO: 10315

SEQ ID NO: 55672 - DNA, 548 bp, Homo Sapiens
tttttttttttttttttaatagaagggattacaggcatgagccaccacacctggcaagggtacctgacattctaagatatcaagacacttaatatgtgggctattagctgcttatttaaatgttgaccaaattgtctgatatatctgattaatcatgatttcacttcatttcggaagaaaaattatccatatcatttttaaagacgcaaatgactttggatttttgcatagagtacaatagacacttcaaacaatagattctaacattctctgaaacacttgagatgtttgagctaccatttatatgggttatttatatttagtctaagtaacacatacatgtttaattgattctgttttcatggatagattcaactaagtcttccaagcaattaattttttgttcgtcgtcgtttttccttcatacgttatctagttatgcagcactggaaacagactgaagatcataaaccagttttatcagacctatgtgtaataagactcctgttaatacaaaaataaaaagctaaaagcaactttgtctatga

SEQ ID NO: 55673 - DNA, 878 bp, Homo Sapiens
ctgttggggagattatctacataacaccagaaacacattggggtggattgggggtatccttatgggttcttttcagggaaccattgctggacaaggcacaggagccacctccatttctgagctctgcaagggacaagaactagagccatcaggggctgggctcactgtggccccaccccaagccgtcagcctccagggatctacaccctgccttggctgctacagctttttcactccactgccctaggggagttcagcaacctaatgatctctatctctgaacatctcttcatcccatgctccaagtccagcaacctgcaccctggaaccaggagtggaccctacccgagctgtctgtattaatccccatcccccaccaccaatcttaaaaagccctctgtccccctaccctaaaccccagttaggtacccatgctgggcaggtcagttaacaatttatgcacaggtactagttttattgtattaccgttccagggtagctttgaaaaaagtatctcaaaaaggcaacatgggccgagcgcagtggctcgcgcctgtaatcccagcactttgggaggccaaggtgggcagatcgcctgaggtctggagttcgaggccagcctggccgacagggtgaaaccccgtctctacaaaaataagaaaattggccaggtgtagtggcagacgtctgtgatcccagctattcaagaagctgaagcacgagaaattccatgacccagaatgccgaagttgcagtgagccgagattgtgccactgcgcctcagcctgggcgacagagtggtattctgtttcaaaaaaaaaaaaaaaaaactccaggcatccaatgtcggggccggaaaaaaaaaggtaatgtgaatc

SEQ ID NO: 55674 - DNA, 759 bp, Homo Sapiens
cagcttgaagaagaatacccacacctacttctacaccagctttgcagcctacatcttcggcctgggccttaccatcttcatcatgcacatcttcaagcatgctcagcctgccctcctatacctggtccccgcctgcatcggttttcctgtcctggtggcgctggccaagggagaagtgacagagatgttcagctacgagtcctcggcggaaatcctgcctcataccccgaggctcacccacttccccacagtctcgggctccccagccagcctggccgactccatgcagcagaagctagctggccctcgccgccggcgcccgcagaatcccagcgccatttatgaggagtcaaatcctaaggatccagcggcagtgacagaatccaaagagggaacagaggcatcagcatcgaaggggctggagaagaaagagaaatvatgcagctggtgcccgagcctctcagggccagaccagacagatgggggctgggcccacacaggcgtgcaccggtagagggcacaggaggccaagggcagctccaggacagggcagggggcagcaggatacctccagccaggcctctgtggcctctgtttccttctccctttcttggccctcctctgctcctccccacaccctgcaggcaaaagaaacccccagcttcccccctccccgggagccaggtgggaaaagtgggtgtgatttttagattttgtattgtggactgattttgcctcacattaaaaactcatcccatg

SEQ ID NO: 55675 - DNA, 1134 bp, Homo Sapiens
  misc_feature (821)..(857): n is a, c, g, or t
gaggtgggggttatcttctttccggcttcaccgttgccatggacaaccttaaagcagacaccagcctcaaatctaatgcaagcactttagaatcacacgagactgaggagcctgcagctaaaaaacgaaaatgcccagagtctgactcttaacccttttgagaattgctctgaattttgttctcaggcattatacagttagtaattaaactttaaatgccattactacttgttttttcatatcccaagaataagaacatgtctatgtacccgtttctaggaaggaggagtatatgccttttgtctatttctgacacagatgcatttggtctgtcaaaactgcaaccatggggtatgtagtatgaccaactgcatttaacaaaactcctctaagtacttctaaatattctgtgcaaatatcttgagaacttcaacatcctaaaaatgtgtttctacaagactttatattttaagctaagtggaataatacaacgtaactaaaacatggcgggtaccgaaaggagggcaattcatggaagaaatttcctctgttcattccgttctcttcaacctaagcaatatggatgtgtgagtgtgtgatttattatggtaccaaaaatgtccaccttctttcctgcagtggaataagcttttttgaaatgctgaggttttattttaatagttgacaacctgggaaagttctgagtatttattttactgctcttttttgtgcatagaaaggtttagtagggtacttttttgcattaatttgccaatactcttattctttgttctaaataaagtgactagaatttttaaaannnnnnnnnnnnnnnnnnnnnnnnnnnnnnnnnnnnnaaaaaagggggggccggctctagagaatccctcgaaggggcccaaagcttacgcggtaccagcttttcttggaacaaaggggccccctataggggagtcggaataatacgctaaggcactgggccgccctttttacacacgtccgggactggagaaaaactgccaaccttggggaaactttggtgaaaggaaaccttaactttcgggggggggggaacataaattgggaacaaactaccttgcgagaaaaattataggcgtctaagggggaaaaata

SEQ ID NO: 55676 - DNA, 680 bp, Homo Sapiens
  misc_feature (9)..(9): n is a, c, g, or t
caccatggnaagcattgggaaaagcctccttagcttttgaagctcctcattgttcttgagtgtgcatggagcccatgactgcggggttttgtagacacctcagggattacatgactggtacccctgacaaagtcaaggctgctggacaaaatgagtccgaggatttcaggggcagctgggcgcaggagctggtgggctgttgggagtgcccctttactgggcaggcttccttcctcctggtgatggggggttcctcagcacaaaagtgaaggggtggaggggctggaggagcaggaatctctcttgttgataggtatgaggccttgaagtccttttctttgtcccaggattcatggacgcttcggggctgatctttgagttttcaagcatggggtgcagagacgtttaggtaaactcttaccgtcctctctcttcgtcagggcttcccaggaatcaacaatgcccaagaaggaagggattgtagaaatagcttaaccctttcatttaccaacgtggaaattgaagcccagggaagggaagggaccggtcgtggaagggagagccatcagcagaaagagaccctgagatcttcgcctgggattcccaggaagtccagcccgagctgattcacagaacaaatgcatgcaaaccttgctatcaataaattacacatgcactta

SEQ ID NO: 55677 - DNA, 579 bp, Homo Sapiens
tgattaaagatgcttgccaggttctattccttagattgccaccagaatatgaaaaagaactacatattgctttagaaaagatacagaaaattgaaggattaatatcataccgagaccctcatttttggcgtcattctgctagtattgtggcaggaacaattcatatacaggtgacatctgatgtgctagaacaaagaatagtacagcaggttacaggaatacttaaagatgctggagtaaacaatttaacaattcaagtggaaaaggaggcatactttcaacatatgtctggcctaagtactggatttcatgatgttctggctatgacaaaacaaatggaatccatgaaatactgcaaagatggtacttacatcatgtgagataactcaagaattacccctggagaataaacaatgaagattaaatgactcagtatttgtaatattgccagaaggataaaaattacacattaactgtacagaaacagagttccctactactggatcaaggaatctttcttgaaggaaatttaaatacagaatgaaacattaatggtaaaagtggagtaattatttaaat

SEQ ID NO: 55678 - DNA, 613 bp, Homo Sapiens
tttcctttcccttcccttctccactggccagcttgggcctcatcctcatgtcatccttctaggaaggcgcctgccccatcttgtctgccggcagcatgcatccaaggccagagctcaggcctgcagactgggctggtgcctcctccgcttcagggtatgggagttggtgaaggggctttcaaaaaataataagaaaaaaaaggtaaagtctttggtagcttctatccactcagatcctggaaggcagcaaggttttgtggatctagattcattaggaatgtcttcttgtcagccaggccaggacccgggcttgccaagagcagaggccctcccagcaaccaggataccaccactttgggggctttgtgtacagaggtccgggtctgagacctcataggctgcagaaatctggggcagccaccatcaagaagcccctctcaggggccagaactcctttgccagcgtggatttctcaagtcgggactgcataattaaagcagttgcagttttattttttttacagcttttttcccaaaaatgatttgtagttgtgtgtgcagcacttcgccctgatatgtgtgctctacaataaaaaccaaatctaatataaaaa

SEQ ID NO: 55679 - DNA, 466 bp, Homo Sapiens
tccagtgggttttttggaggccagtggcatgaaattcatcctcagtactggaccaagtaccaggtgtgggagtggctccagcacctcctggacaccaaccagctggatgccaattgtatccctttccaagagttcgacatcaacggcgagcacctctgcagcatgagtttgcaggagttcacccgggcggcagggacggcggggcagctcctctacagcaacttgcagcatctgaagtggaacggccagtgcagtagtgacctgttccagtccacacacaatgtcattgtcaagactgaacaaactgagccttccatcatgaacacctggaaagacgagaactatttatatgacaccaactatggtagcacagtagatttgttggacagcaaaactttctgccgggctcagatctccatgacaaccaccagtcaccttcctgttgcagagtcacctgatatgaaaa

SEQ ID NO: 55680 - DNA, 707 bp, Homo Sapiens
  misc_feature (566)..(566): n is a, c, g, or t
ctgatattgaagatgaggacatggaagaacttcttaatgacacaagactcttgaaaaaacttaagaaaggcaaaataactgaagaagaatttgagaagggcttgttgacaactggcaaaagaacaatcaagacagtggatttagggatctcagatttggaagatgactgctgattccagtgccacagatgaacccacaaggacatagctgttccctaactgggtggatggctccagtttgcttttaacgaaaatcacaacttcaggagacatctgaaaagaatgatgtctctgaaagctgtcctttcagatgagggagaaatgaaggatttcacacttcagaatattttactaaaaacattccagtcttggccgggtgcggtggctcctgcctataatcccagcactttgggaggctgaggcaggaggatcacttgagcccaggagttcaagaccagcctgggaacacagcgagaccctctcattaaaaacaacaaaacaaaacaattccagtcttggagtagtctaacagaagaaaatgtaaaattatttgagtgtaaataatanatgtcagtatttatcatgatgggtcacatatagacatatgttcatattatatatatatatatatatatatatatatatatatatatatatatatatataagctcttttttctgaggctattttatagttatttttaaacat

SEQ ID NO: 55681 - DNA, 688 bp, Homo Sapiens
gcatccttccacaattagggatgcttttatcccccatcactaattgcagttgtttgataccaaaataaatttacgtagagatccttaacttaaaataaattaattttttcaaaaaacataaatctggaactgttgtttctatatttgataacaaatacagtatattttatttataagccatggtctactgatactgtatgaggactttccttatatataaaagttgcagggattgtgttttattagctgctttaattatgttaattttagagagtttttaaatggaaatagaggacatttatgaaacgctggaattgcagttacaaattctttttgttgttgttgttcctgaacatgccttggaataattctaccattttttccccctccataaatctttctaataaagcatagaaaaagcctatatgattttaaatgcttctcttaagctggtaaacagatttgagttatgagttcattgttattgcttcaagatgaaaagacagtgatataatttttctatttcaacttaaaagtaatagttaatatgctaaagtagtacagaataaactttattgctgcttactaactacaaaatactgtagatggcatctgtatgattcaacatataagtaaaacaggtctgagggctttgtagatgattaaagtctccacttcatgaaacaat

SEQ ID NO: 55682 - DNA, 610 bp, Homo Sapiens
  misc_feature (573)..(573): n is a, c, g, or t
  misc_feature (576)..(576): n is a, c, g, or t
  misc_feature (579)..(588): n is a, c, g, or t
  misc_feature (602)..(603): n is a, c, g, or t
ggattgaggccaagcacgacaagtacatggcggacatggacgagcttttttctcaggtggatgagaagaggaagaagcgagacatccccgactacctgtgtggcaagatcagctttgagctgatgcgggagccgtgcatcacgcccagtggcatcacctacgaccgcaaggacatcgaggagcacctgcagcgtgtgggtcattttgaccccgtgacccggagccccctgacccaggaacagctcatccccaacttggctatgaaggaggttattgacgcattcatctctgagaatggctgggtggaggactactgaggttccctgccctacctggcgtcctggtccaggggagccctgggcagaagcccccggcccctatacatagtttatgttcctggccaccccgaccgcttcccccaagttctgctgttggactctggactgtttcccctctcagcatcgcttttgctgggccgtgatcgtccccctttgtgggctggaaaagcaggtgagggtgggctgggctgaggccattgccgccactatctgtgtaataaaatccgtgagcatnganaannnnnnnnnnaaaaaaaaaaaaanncccatgt

SEQ ID NO: 55683 - DNA, 588 bp, Homo Sapiens
cattgttaagatggcattactcccaaaattagtctatagatttaatacaatccccattaaaattccagtgacccttttacagaaactgaaaagctgaccctagaatttatatgggattgcaagttactgaaggtactcaagtctgttcaaaacaatcttgaacaagaataaagttgaaggactcacattttccaatttcaaaatttactgcaaagctacttcaatcaaaacagtgttgtgctggtataaaaatatataaagcaatagagtagaatggaaagtccagaaacaaattacgccaatacactatggtcaattgatttttgacaagggttccaggaccattcaatgaagaaagaacagtgtcttcaactaatagtgctaagacaagtgaatattcacatgcaaaagaatgaatttgtacctgtacttcataccatatataaaaattaattcaaaatagatcaaagacctaaatgtaagagctaaaaccataaaactttgagaagaaaatacaggaataaatcttcatgaccttggatttggcaatggtttcttagatatggcaccaaaagcacgagcaacaac

SEQ ID NO: 55684 - DNA, 854 bp, Homo Sapiens
cagagccgaagcccgagctgccgccgcagccacagccgagggcactatggcttctggagttacagtgaatgatgaagtcatcaaagtttttaatgatatgaaagtaaggaaatcttctacacaagaggagatcaaaaagagaaagaaagcagttctcttctgtttaagcgatgacaaaagacaaataattgtagaggaagcaaagcagatcttggtgggtgacattggtgatactgtagaggacccctacacatcttttgtgaagttgctacctctgaatgattgccgatatgctttgtacgatgccacatacgaaacaaaagagtctaagaaagaagacctagtatttatattctgggctcctgaaagtgcacctttaaaaagcaagatgatttatgctagctctaaagatgccattaaaaagaaatttacaggtattaaacatgagtggcaagtaaatggcttggatgatattaaggaccgttcgacacttggagagaaattgggaggcaatgtagtagtttcacttgaaggaaaaccattataaaatgacagtcaagtgccatctggatcttaaggagcttccatttctccagctcagtccattggaatagtattaggttttggttttttgttgtatttccccctttccactgggcccttccaacacaatgaatgaaggaaatatcatttatttaagcagcctatcagtgattgccattagactgttgaatactgttacttttatatagaacccaaggaatgccttcctgtcatattttagccaaaacaactggttatatgcctcccttgcagcaagcactacaatgtatgtgatcgtcaatgtgaatagc

SEQ ID NO: 55685 - DNA, 762 bp, Homo Sapiens
ctaccagaagctatagatatatataagcgaatactgctagataacagggaataccttgcccttaatgtttatgtggccctctgctactacaagttggattactatgatgtgtctcaagaagttttggctgtttaccttcagcaaattcctgatagtaccatcgcactcaatcttaaagcctgtaaccattttcgcctttacaatggcagagcagctgaggcagaactcaaaagcttgatggacaatgcttcttcatcctttgaatttgctaaagaactcatcaggcacaatctggttgttttccgaggaggtgaaggggctttgcaggttttacctcccctagttgatgtcattcctgaagctaggctaaacttggtgatttactaccttcgtcaagatgatgtacaagaagcttataacttaattaaggatctggaacctactactcctcaggagtatattctcaaaggagtggtcaatgcagcccttggccaggaaatgggttcaagggatcatatgaaaattgcccagcagttcttccagttggtgggaggatcagctagtgaatgtgatacaataccagggaggcagtgcatggcttcctgtttcttcctgcttaagcaatttgatgatgttttgatttacctcaactcatttaagagttacttctataatgatgacatctttaactttaattatgcccaagccaaagctgcaacaggcaataccagtgagggcgaagaggcgttcctcttgatccaa

SEQ ID NO: 55686 - DNA, 442 bp, Homo Sapiens
tttggttgttagacagttcatgcacaaagccaaaatttgtcctttatgtatcttctttccatagtgcttactggagccttccaaaataatgtctcctcaaggtgacagcccctcaggaatttgaaggcaatggtcacaccctcacccactttcctgagttttttctggtttattaacgtcagtctttacagtcagtgctcattgacggtggttttctctggttgtttcctgaacacgtagtgctcttaaagcaatgccctgaggagaatacaattctccaggggcattctgattggcaggtgaagcacagtgccatgttcccagcactgatttgggaagtggcttgtcacatcccacagtgaactcagtcaactggaatgcctaactctctttcataagacctcctgctacattatgtttctcccagactgtactcaggtcc

SEQ ID NO: 55687 - DNA, 552 bp, Homo Sapiens
gggaaggtcttcaggcaggcctcaaatcttttggcccatcagagagtccacagtggagaaaaaccattcaaatgtgaagaatgtgggaagagtttcggtcggagtgcacatcttcaagcccatcaaaaagtccacactggagataagccatacaaatgtgatgagtgtgggaagggcttcaagtggagcttgaaccttgacatgcatcagagggtgcacacaggagaaaaaccatataaatgtggggagtgtggtaagtacttcagtcaggcctcaagtcttcaacttcatcagagtgtccacacaggagagaaaccatacaaatgtgatgtgtgtggtaaagtcttcagtcggtcttcacaactacagtctcatcagcgagttcacactggggagaaaccttataaatgtgagatatgtggtaagagcttcagttggcgatcaaatcttacagttcatcacagaatccatgttggtgataaatcctataaaagtaataggggtggtaagaacatcagagaatccacacaggaaaaaaaatctataaaatga

SEQ ID NO: 55688 - DNA, 469 bp, Homo Sapiens
ctcagctcacagggcttccaggatcatggcctataaaatgcttcaagtagtcctgtgctcaacattgcttatcggaatatctgtatgataatcagaataactgatgcaagatgtgttctacacactcagagatcatgacttgtgtttccttttcttgaaggctcgtgaaacatggattgctttgaaaacaacagcacagtattatttggatatgaataccttcacctttgacatgtctactgcccagtaaatatgttttcctggttaaagcaggaggatgaagatggcagaggttggaatggcattgtgccaaaaccatgggttttagagatctgagggtatatccatgctgtttactacattatttattatgtctgtctcaaagttgttgaaaacagtagttatgaaaacccatgtaggaacctggaataagacattctcaataaatggtagttctcaaaaaaagaac

SEQ ID NO: 55689 - DNA, 612 bp, Homo Sapiens
gggttatgttgaacttactacctgttatgtgcaggttattatgtaactattcacagattgcttcatatattgctttatcttcccatctaacttcttaaagttaaaatccggacacacatgttgattatctagaccagtcattctggaaattgtaacactcccacataaaccccaggagactttttcagaatgcaatgtttctaaatgtactgttactggcagtttactctccagcatataaggttgcattttaacttttagattatgaactgtgcaaactttacccaaaactatcttgcatgattccctcctaaatatattccttgattaagtaaatctggcaaatcactgtttgagctagttacataaaatttgttatcaagagaaggcttttctacaagtttccagattaacataaagaaaagagggaatcacagggcatttaagtgcaccttcccattactttccttaaatcacctcatagttaggctgggcgcggtggctcacgcctgtaatcccagcactttgggaggccgagacggtggatcacgaggtcaggggactgagatcatcctggctaacacgatgaaacctcatctctactaaaaatac

SEQ ID NO: 55690 - DNA, 847 bp, Homo Sapiens
  misc_feature (568)..(614): n is a, c, g, or t
attgcccttttaaaagcatgtacgtgaatgctttttgaggcacagaagtatgctaagctttaacattttgtatttatttacaacccttttctaagggaaggttacttctcagtgcagatggagaaactgaagcactaaggataaatgattagtttccaatcacatcatttttttccacagacttgctgggactagctttcaggtattgacagccagccccatatattaaggtaaccaggttgaatcttccaatttgagaacccatgtatgggttgcagtgagccgagatcatgccactgcactccatcctgggcaacgggaacgaaactccgtctcaaaaacaaagaaggatataataaagttaatatataaaccatgtatgtggttaggaataaattcaaattcaccagtctccaatggtgattacttttactacatagaaaaacattttagtgacttacagaggatttttatttgtgaatatttcagtaaagtttgtgttgattgttgataacactgttcatctactgaagcactttaataaaaataaaatgagctggaattagannnnnnnnnnnnnnnnnnnnnnnnnnnnnnnnnnnnnnnnnnnnnnnaaaaagggcgggccgctctaagagtatcccctcggagggggcccaaagctttaccgcgaaccccagctttttcttggtaccaaaggtgggtccccttaataaggggaggtccgtaattaaataaagcttaagggccccctgggggcccggcccgcttttttaaaccaacaccctcccggggggaacttgggggggaaaaaaaaccggggccttaaaaccctttgtgggggaaa

SEQ ID NO: 55691 - DNA, 849 bp, Homo Sapiens
acttcatgaaaataagcaaagaccacacattttttactacaaaatgtaaaggataaatgtaaatcctgcataactaaaatcacaaacctattcctcaaaagaatttaattttatatttatgagggggcccttcactaaaaagtacatgtaaaagtacatttgatgacaatagctgcttagtttcctgttaagagaagaaactttatcttttaattatgtgctcttaatatttgaagatgagagttaatacctgagatgtttttctgcaaccaaaattcattaaatttggctgccttatcctttttttaagctaatgaaactacaggtttgaaaaatgacaaagctgttcagatgatgctattaaagaaatgtgtgtactaagcaaaaatatataaatagtgacaaatacacattaccaagcttatcttgcaagggagttattttcatctaacatagaaagtgtgttttatcagacaaatgcttttattttcattctaataatttgatacagaaattagtaaaggcatttttttctttttttttccagtaaatacattgggtctataaatgttgcatttgtaagggccacaaaagtgaacgtgtggtactgtacgtaccacgtgggagacctctggttatggtttaacgtcctagttccttttgttactcctgtggagcaccgagaagaactgggcgactcccagtacccactgttgctgtgacagtcccacgtggtatgacacgactgtttagtaattaccctttcaggttcctctagggcagggtgcatcaggcctaaatataggggttaaccggggagggctcacgcggaacccagggctcgcatcc

SEQ ID NO: 55692 - DNA, 711 bp, Homo Sapiens
cgtccgagaaattattgcatctgtggaacatatatctggagttactatactttactgaagagcaaggcataaatttagactaaaatccatccagattacactcattctttaggctactcctggatacttcatttaaatttgattttcgaggtagtgagatgtcggcaaggtttgtcctgtatattaggaataaaggaaaagttctaaactgcctctgcaatgacttgtagtcagtggaagagtatcactttcccctgatcatgaccactaaactgtaaattgatataaattagttttctctcgagttacacccaagtaatgaagacttaagagaaccttggttgaaataaatttccaatagtttggagactcataaataccatgcaggtgtaaccactgccaataggctgtttctatgcttatttcctattttgatttttactttgaagataggaatatctaaattatatctctagggagaaaatgttgtaaaaaattaaaagtacatccctgattgtaaaataaagttcaaaaaactgatttcagaaagtctcaactaccaaatgttttcaatatattagttttgagatgctaggattatactgtgattcttatgtttatagtaaagtctggaaagcagaaggatagtttttttagcctggaaacttatttatgttgccttggtgagtcttctatcattttttaaaaatt

SEQ ID NO: 55693 - DNA, 685 bp, Homo Sapiens
  misc_feature (685)..(685): n is a, c, g, or t
gggtgttgaaaggctcattcaaatcaattgggaaagcacgtaaatgaacaattcataaaagaaaagcattgcaaatggccaagagcatagaaaatgtgctcaatcttaccagtcattataaggaaataatgaaatttgtgtatatatgaaatacttaaaatatatataaaataaaacaattatttgccttttttcacctatcagattaacagattatatgtgttaacaaggtggggagaatttacaactcctgatatgttaaaatctttcaggaaggtagtagaaaatatatgtaagatggaaattagcacttttgaccaacaattttagttttagatatttacctataaggatataataggaggtgttcaaagatgcatgtaactcaatgtagtattaattataattgtaaaatagtaaataacatttttgtcaaatcataatgttaggaaaattagtgatggcacatttaaccaattgaattatattcagttctgaataccgtgatgcatgttcaaattaattgatacaaaaatccaacaactttagcagtttgtttaccagttattgagtaccaactgtgttcaacattgttatttcactcatatgaaatgataaatgtatgtgcttgttatgatacggtcaataaaaccactttttatagggaagaaatactcgcaaaatn

SEQ ID NO: 55694 - DNA, 632 bp, Homo Sapiens
ttttttttttctttttcctttacaccctacttctgagcttaattcagttgatgttatgtccaaattcaggctgagtgctcaggctgaagcaactctgtagcccacagtccgtgctggccactgtcggggtgaggcacattctaggcctggcatcgctgatgccctctgcacccagtccttgagccaggccgaggacaggaagggcattgctggcctgtagctcctgttacccacccagagccaggcgccacactggaggctcccaggcgggagggcccaggcccacccacgggcgtctggccggtcaagctcccagcctgggccgtggtctcctggggacgccgctggcctcccagcttaggcccaggtgccaggtgtcatggggtctcctgcccatcttcccaaggatgccattgctgtcttcatcgtcttcccccgtgtgagacactggttgtctggtactcggcgacagtgtaccagacgcgcaccctatgtgaggtgctttaaggtccctgtcctcaggaagcgcagtctggtggaagagatgagcgctgaacaaatcactaaataacacaaaacaacaatgtaagcagcactttcttgtgtaaaaaaaaaaaaaaaaacctcgtgcc

SEQ ID NO: 55695 - DNA, 496 bp, Homo Sapiens
tcgtcagctggtccctgctagggagctattgatgtgcaatattagaaaggagacatgaaaaaaggagaaaaggaaagacagaagtgtatatatatattatttaaacaaacaaaaagaaggtgcgttactatttttttttcacccgggaaagaggtgagaggatgggaaggagcagccaggcgtgggaagcggcgagatcctcgggctgggggtgcccacgtttgctacctcccactgtgaaatcgctggtgctcacaattgtctctcacagtgtatgtgatttttttaaggaaaaaaaaaaaatccctatttaagattctgaaggtgctaccattattttgccacagactttgaagaaacttttggatgtggggcatcatccgcatctttctctctcctccaaatgacaaagtttggggaatttttgaattttcctagcatcgcccttgtgctcatcaggtaatctgctaaggaggaaaaaagaaaagaaaaaagg

SEQ ID NO: 55696 - DNA, 757 bp, Homo Sapiens
agctaactcgacacccagcacctcccccgcaaaccgattcgtcagtgttggaccacgggatccaagctttgtaaatatccctcaacagacacagtcctggtacctgggataaaagttgcagcgtcccaccatccaccagacagaccacctgaccccttctcaactctgtaacatggacgcaacctcaacccagcgcagttacaacttcactatcagcggaaggggagaaaaaccgattcaaatcaacttgtacatggaaacagcaagcattatggtcaaacagcaaaggccataaccttttgggatttttttttttttttaaaatactttagggactgttgtaatttctcatatggtgctggaaatggttgggctttgtaacatttgaagtgtttccatggtagcgtgagcattaggtgacgtggctagcggaggactacccttgctcactgacttcctgttgtaacacactttccttacggagcctggctgtttcacagtatttcgggaatttacccacacaggtgtgatcctccttgagcattgaggaggcacatggagaactaaatcttttgtagtagctgagatctgcaatatataacgggacagtcaaagggcaatgtttttctgtaacatattggaaaaagaaaatgcagttatattccttttttatttggtcctttaggttgtttggggtcagcaggcaagaagtaaagatattacagggcccggaaggacaatgaatccactcacttgg

SEQ ID NO: 55697 - DNA, 756 bp, Homo Sapiens
ctcgggcctcaggaattccgctgcggcccaaggcttgccgtttgacgaggagcagtcgcggtaggcggtgggcaaggctgccctgggcggaggccgaggcgcggctcggactccagcatggcgaccgcggtgcgcgctgtgggctgcctccccgtgctgtgtagcgggacggcaggtcatttattggggaggcagtgttccctaaacaccttaccagcagcttccattttggcatggaagagtgttctcggcaatggccatttgtcatcactgggaaccagagacacccatccctacgccagcttgagccgtgcactgcagacacaatgctgtatttcttctcccagtcacctgatgagccagcagtatagaccatatagtttcttcactaaattgactgcagatgagctgtggaaaggcgctttagcagagactggtgctggagcaaaaaaaggaagaggcaaaagaactaaaaagaagaaaagaaaggatctgaacaggggtcagatcattggtgaagggcgttatggttttctatggcccggactgaatgtccctcttatgaaaaatggagcagtgcagaccattgcccaaagaagcaaggaagagcaggagaaggtggaggcagacatgatccagcagagagaagagtgggaccgaaagaagaagatgaaggttaaacgggagcgaggatggagtggaaactcatggggaggcatcagtcttggcccccctgaccctggtccctgtggagaa

SEQ ID NO: 55698 - DNA, 582 bp, Homo Sapiens
gttgctggttctgacgggttgtagtctgccaggacaatgagttatgactaccatcagaactggggccgtgatgggggtccccgcagctccggtgggggctatggaggggggccagcagggggtcatggaggtaaccgaggctccggaggaggcggcggcggcggagggggtggtcgaggcggcaggggccggcatcccgggcacctgaaaggccgcgaaatcggcatgtggtacgcgaaaaaacaggggcagaagaacaaggaagcggagaggcaagagagagctgtagtacacatggatgaacgacgagaagaacaaattgtacagttactgaattctgttcaagcgaagaatgataaagagtcagaagcacagatatcctggtttgctcctgaggatcatggatacggtactgaagtttctactaagaacacaccatgctcagagaacaaacttgacatccaggaaaagaagttgataaatcaagaaaaaaaaatgtttagaatcaggaacagatcatatattgaccgagattctgagtatctcttgcaagaaaatgaaccagatggaactttagaccaa

SEQ ID NO: 55699 - DNA, 698 bp, Homo Sapiens
ggactagcctgcagtgttttagactgtttgaaattctgttctttaaaagagattttttttttcttcttactatcaaacaaagaactgctgctattccttggggctggcgcagcaggggccggtgaaatgcaggctgacgacggcgcgccaggggctgagctcgccccggtcggcgacgcgcacacaccttgagtgacagcgacctcttctctacaggttttcccagcgggagcgtggccctagcgggcgttcggttttcttgggaaatcgcggagggggctagccgggcgcagcgatccccaccccgggactccagccccggccgtgcgcgtcgccgcggacgggctctgcgggccacggggaaggtgcgaggaggcgcgagcaggctgtgagccgctgggcgctcccgcgagcccgctcctctccgtcgggagcagggcaaaggcgccaggaacagggcagaggcacaggcccaccgcctctgcggccgcctgatgtgcgagcagcccgcgacgaggcagggcacgctcagacgccccgctcctcccgccagcgcgcggcctcgctcctcctagaggacgctctctgcgcgggccctcggaggaggcggcggcggggcgagctgagcgccgggacaggaggttgtgtccccggccggcgccgtaccgcggcggagatgggcgagaccatgtcaagag

SEQ ID NO: 55700 - DNA, 743 bp, Homo Sapiens
cgcgtccgtagctctgatagaggagctggtggcttttatacttcttcctgggtttttgttggggtttgttgtttcgttgttttttgttttttttttgtttggttggggaagtattgtcttctacgtgtgctattttcagtagcagagtaagcacaaggttttaatcgagttgcataagacacctttgcatagctatttaattgcccaatgtaaaactttaatgccatttctaatgcttttattcatttttgaagtatgagtttgtagggacaaagaatgtatgttatcgtagacaagacccccagagactcttttcagcagaaagttatgcttctagttgccttaccatgtttcttgcaaaactgtccatggtcctcaagggtgttggaaacattatgtttattaaatgggcctctcttcctttgctgtgcacttgatgggtgaactggattggggtgtgcacatccaggaggaggaggagagacctgtagaagtttaaagatagtttgtaaatatcttctaatgcttgtttttagtccttttatgttggagaagttcatggtatgtagtttaatgcaaaatgaaaccattttatttcaatgttattaaaaaggtttgttttattaggaagttaatgtattgttgcagtgttttgtgcctgtttaaaggcttttgtttagcagagtgaatgtaaaatacagtaaaatgttaagattgtcatctactttttaaaaaaaaaatat

SEQ ID NO: 55701 - DNA, 630 bp, Homo Sapiens
  misc_feature (591)..(591): n is a, c, g, or t
gcaccaacagccacgggatcctcagcggcttcaacaagacggttctgcggacgctcccgcggagcggaaacctcattgtggtggagagcgtgctcatggcagtggccttcctggccatgctgctggtgctgggtttgtgcggagccgcttaccggcccacggaggagatcgatctgcgcagcgtgggctggggcaacatcttccagctgcccttcaagcacgtgcgtgactaccgcctgcgccacctcgtgcctttctttatctacagcggcttcgaggtgctctttgcctgcactggtatcgccttgggctatggcgtgtgctcggtggggctggagcggctggcttacctcctcgtggcttacagcctgggcgcctcagccgcctcactcctgggcctgctgggcctgtggctgccacgcccggtgcccctggtggctggagcaggggtgcacctgctgctcaccttcatcctctttttctgggcccctgtgcctcgggtcctgcaacacagctggatcctctatgtggcagctgccctttggggtgtgggcagtgccctgaacaagactggactcagcacactcctgngaatcttgtacgaagacaaggagagacaggacttcatct

SEQ ID NO: 55702 - DNA, 520 bp, Homo Sapiens
gttttatttaaaactgttttaaatatagattattgacttattcaactttgctgttttatattttcagtatcatttttcatttgttttttttttttttgtcttttcacttaccaagttctagggacatttaaaatatgtactaagtgtaggagtggttatgataccaaaaaatgtagctgggttgagattaatttcgttctgttttctcatgacagaaatcaggtttccctttccccacccctaagtgcctaacttaggtctgaaacagcctgtttattagtctgactctctcaaccataaaacataagctttatttaattctgcctttaaacacactcaggtttccccttaattttcatattattttctgcaggttttcttgagtatcttcaattcgttgaatgtggtttttggttttttttttgttttaacactagtcttcccttaattcattgctaactcaagccatccttactattaaacccaaatcagtcctttaagttcattatggcctttctag

SEQ ID NO: 55703 - DNA, 886 bp, Homo Sapiens
  misc_feature (857)..(857): n is a, c, g, or t
cccttgtgcacagagctccaggtgacctctggagagacatgggcattcacatggaaagctaaaacggaagctcaagtttcatactcaacataatcttctgtgtgacaaaggacaagccatgtagcctctctgtgcctatttcttcatgcataaactgggactcataatatttgtaaaatgtattgatactctcagggcaaattcactatattgctatacagttgagatcagtgttgtaaaattaaactgatctggttctaattgcctcaaaggccaaagcccaggcatttgaaatggaaagaagcagagaggaggctgacttagctgattggtatggaaacagttgggccaagagccagaatttccctttgtagcaacacggctagttttactttgagaagctctgctcagctgctttataacattaagtctggcggaatggatgtcactgtgcacaataaagttttcacaagtataaacaatggtgatgtaagtcaacattgctgtagccaggtgtgaaggttgtatggtgtgtgacgaatgtacatcatgtttgtaggtttggatgctaatcttgaattgtagtttaaaaaatacgtatttttgtaactctttgaaagtttatgaagactgacagctttccttgtaagcactaagagaaaaaaaagaaagagggacatttgacaattttaaagaaacaacaagaaattagaatgaaaatctgtgacaaacagcgtcagtgtggccatgtccacattcctacatgtctctctctacaagcacctctctaagaagcctgacatccccggtggaactctttatagtcatgtacacttgattccagatgagctctggcnccttaaccgggatgcctcagaataaaagg

SEQ ID NO: 55704 - DNA, 787 bp, Homo Sapiens
aggagctcaatgatagctgtttcctggattcctccctctatccagaactagctgatgtccagtggtacgggcaggaaaaagccaagcccgggaccctcgtgtgagccagcccggcctaatctgaccgcctcaacgccattctgagatcacctcactgcctctcatttgccatacccagacgcaccgtcaccctgcaccagctttggccctcagcactttttttctcctgtctcagcattccctcccccttgaaaacctgactgaggagacattctggaaggttccggtcccactgtgtgtcccctggcgctcttgcccatagagagccagacaccaatcctcaatggcaccttggtggcttccctctgccatgacagcccctaggccaggaaccatcaggggggccagccggcatccaattcctgcggataagtagcgttgggagagaacgggaaaggggacttgagttacagggtgacccagaaagacgattcagctgtgtccagcctgccacccatacgtaggccaaccaagcactttatgaagaggaggcctcgtggcatattcagtttacacctgaaatatcccttgatgggacagcttgtggcgatggctatgggggaaggggaggttgaaaaaggaagttctcgacaccagatatgcatcggaggaccacaatcagttctatgctgcccaagattaaaattcatcacaccctaaaaagttaaacaaaaaaacatcgtcctcgttggcctcagcgggggagctcctgcggcccgcttccttg

SEQ ID NO: 55705 - DNA, 577 bp, Homo Sapiens
ccgcctaggttcttcctgactgctttctccaactgttcacagcaaatgcttggattttatgcagtaggcattactacagtacatggctaatcttcccaaaaactagctcattaaagatgaaatagaccagctctcttcagtgaagaggacaaatagtttatttaaagcatttgttccaataaaataaatagagggaaacttggatgctaaaattacatgaataggaatcttcctggcacttagtgtttctatgttattgaaaaatgatgttccagaaagattacttttttcctcttatttttactgccattgtcgacctattgtgggacatttttatatattgaatctgggttcttttttgacttttttttttcccaatccaacagcatccttttttttaaaagagagaattagaaaatattaaatcctgcatgtaatatatctgctgtcatcttagttggaccaacttcccatttatttatcttaaaactatacagttacatcttaattccatccaaagaagatacagtttgaagacagaagtgtactctctacaatgcaatttactggacagtta

SEQ ID NO: 55706 - DNA, 975 bp, Homo Sapiens
aaaattagttcagaattgatttaaaatatttcagtgtgccatatagctctgtcccttggtttggttggccttgttttttcctgtgaagaatgaaagggcaaaggtgataccaaaatgaaacagctttggagtgatatctttaggagcctggaagccatttttgtaattttgttgtctatataaatgctacctttgcctggaggtagtgcgcctgtggctgtgtacatccagagggcaacagtaatagccaacaaccagacaaactagtgaagttaatctgtgagtgatgattttatgatacttatatgcaaattaaaggcagaagttagtttcttctcaagatgcctttttggctgaacattaccatttttctttccccagggtttgaaagaaaagggccttttttggatttaactatattctgtctgcattctattcttcatgcgtaggtttctactagaacctgtggaggggggacaccaaatttagattgagtcagtccatgctgataagaagcgtgaggaccttgttggacacagagcttctagatctttccacctgtagcctctaccctgttcctgcactttacctgaaactgtgcctctggtctttagacagctgttggaacatatcactcacccactcctctgttatagcaaagggccagctgggatggtacacgctgtgtaatcagacaccttctcgacaagtacagctgatgtttctcactgttgccttaccattctctgagccatctttgatgttgatttgtaaaaraaaacaaaaaacaaaaaaaaaacctagtagcaaaactcctgttaaacycagagcttgtatgtggtggcatymacatccttatttctagattacacaactktaccmactgtwatcttttctggccgcgwtgtggtcratgcktcataacgtgagcaactgggktgtaamattggacawatatmmaattggggattttgg

SEQ ID NO: 55707 - DNA, 1123 bp, Homo Sapiens
  misc_feature (908)..(908): n is a, c, g, or t
  misc_feature (1035)..(1035): n is a, c, g, or t
tcttggctggtttgctggaagaagaagttctgtctacaacagatcgtttcacagataatgcatggagaggggcagaggcttaccacttctttatacttgcacagaggcagctctatgagggatgtgtggacactgcactgaagacagctcttcacctgaaagactatgaagacatcatccctcctgtggagatctactctctgctagcactctgcgcatgcgccagcagagcctttgggacttgttcaaaagctttcattaaacttaaatctttagagaccctcagttcagaacagaaacagcagtatgaagaccttgctttagaaatcttcaccaaacatacttcaaaagataacagaaaacctgaattggacagccttatggaaggtggagaagggaaactgccaacatgcgttgccacaggaagcccaatcactgagtatcaattctggatgtgcagtgtatgcaaacacggtgtccttgctcaggaaataagccactacagcttctgccccttatgccatagtccagtgggataaaggaatgataaactgtatataactgtaaaatatatgtagcatatatacatggctatatgctgtatatgtaataaggtttatttctgtgagttttgtatgaaaatcagcctcattatttatagttgaatttttgcacaaaatatatgttaataaaataattcttatggcaatacaactgtgaaataataaggccgattttcatataaatgtatgaaaatcaaccatgttttatctcacccctctctcttttggttatcctggtttttgggtacctgactacatgggaaatatgtccaataaaatttttttctcacattgtcaaggtaaactgaaatccctttaaaaaatccttgaagggaattagggagntggggggaagccatgggaaatgggggcacaagctgaaatttacgagaattttttataaccccctgtttaacagggaagagttaaaccaattggtaataaatggaaatggaccttttcttcttatagngccctaatttttaatttaaaataaagtggcccaaaatgggctctcctctttattggggaattttccccccaaagggagggcgcatggg

SEQ ID NO: 55708 - DNA, 588 bp, Homo Sapiens
  misc_feature (565)..(584): n is a, c, g, or t
tgtacaatgagagatattgtctattaaatacattattttgaacagatgagaaatctgattctgttcatgagtgggaggcaaaactggtttgaccgtgatcatttttgtggttttgaaaacaaatatacttgacccagtttccttagttttttcttcaactgtccataggaacgataagtatttgaaagcaacatcaaatctatacgtttaaagcagggcagttagcacaaatttgcaagtagaacttctattagcttatgccatagacatcacccaaccacttgtatgtgtgtgtgtatatataatatgcatatatagttaccgtgctaaaatggttaccagcaggttttgagagagaatgctgcatcagaaaagtgtcagttgccacctcattctccctgatttaggttcctgacactgattcctttctctctcgtttttgacccccattgggtgtatcttgtctatgtacagatattttgtaatatattaaatttttttctttcagtttataaaaatggaaagtggagattggaaaattaaatatttcctgttactataaaannnnnnnnnnnnnnnnnnnnaaaa

SEQ ID NO: 55709 - DNA, 739 bp, Homo Sapiens
cgccctcctcgccctccccaccgacatcatgctccagttcctgcttggatttacactgggcaacgtggttggaatgtatctggctcagaactatgatataccaaacctggctaaaaaacttgaagaaattaaaaaggacttggatgccaagaagaaaccccctagtgcatgagactgcctccagcactgccttcaggatatactgattctactgctcttgagggcctcgtttactatctgaaccaaaagcttttgttttcgtctccagcctcagcacttctcttctttgctagaccctgtgttttttgctttaaagcaagcaaaatggggccccaatttgagaactacccgacatttccaacatactcacctcttcccataatccctttccaactgcatgggaggttctaagactggaattatggtgctagattagtaaacatgacttttaatgagtagtgtcttctttatcgtttgcgatttttactaccttttttcaaaagaaaaattgatgagttttgtatagctggtcagatacaaataatagtgacttcacagtttagtaattataatgggtacttgttaaacatttggtactaaattatgttgctgcaaagtaattaaaattagtatctagagctagtttctggtgaattattcatttattttgtactgttgttaggcagctctgtagttgctaatttaaccaataagtcaatttgctattcatgaagaaacg

SEQ ID NO: 55710 - DNA, 706 bp, Homo Sapiens
  misc_feature (706)..(706): n is a, c, g, or t
ttagataagattcctctttccagtcagtcctgggaaatgtttctgttgcagagttaggcggtagatgggaagctgtgatggcagagctactatctaataaagtaacaactcgtagttgaggcttcctttctgtgtgtgatgggggatagggagttagctcccctgttgtctcagcactaagaaattgaggtcaggccaggctggtcttgaactcctgacctcaggcgatctgcccgccttggcctcccaaagtactgggattacaggcgtgagcaactgctcctggcccaaaacatctctttctacatacacttgagtaggtggcataaaatgcactgtcaatatatagaaaacatgaaattttccaaatatttccgatcagagaatcacaagagcagcaaatgtggtttcatcaagtgggaagaaagcagcaatttaaaataactttttgggagactgaattgagtaataataaaacttcagtctttcgctaataataataataataataataataacaacaacttattgaatgtggccagctcactagatgaggaaagaggaaggcattttctgcattcttgcctagttttccttataagcaccactaagttaatagctctgtctttttggtgtttgcactatgtaatgcttttaatactttttaattgtgcttttttatgtattaaatgtttttccttttgcn

SEQ ID NO: 55711 - DNA, 702 bp, Homo Sapiens
  misc_feature (545)..(545): n is a, c, g, or t
ccagactctaatacgactcactatagggaaagctggtacgcctgcaggtaccggtccggaattcccgggtcgacccacgcgtccgtgttctaggatcttgtcatttttactaaaagtctcgtgcacatgtgaagtgccctctgagtttaaggtttggttaatactggtatatttttataagattgaaattgtgtccccatctttaacttaaacattttcattatcagggtcaatgtgctagaactgaattgtaacatttttaggcacagatggaaaaaaatgttattggctccttgaaaatgtgtgtgtgtggcgaggggaatagatccacaaaagcatgtatgtacttacaaaccaagctgtagagatcaagaaaagaacttaagtgttgatctcaagatttctaaattgtcaagatttacatggcattgtggtggaactagttaacacttagagcttttggtatgtaataactatttgctatggactgattaaatgtttcaaaagattgtgttcttcaattttggtgggttttgatttttggnttttttaactgcctctcagattatatttacttagtttaaatttctttgctttattcattaaagtataaaaacttcaggtctctgatatttattttcacttgtttactaattatttacaaaacaccctttgttgacttttattttataaatgtgtaat

SEQ ID NO: 55712 - DNA, 943 bp, Homo Sapiens
gccgagatcctgggcttttccacccctccaggccggctctccatgatgtccttcatcctcaacgccctcacctgtgccctgggcttgctgtacttcatccggcgaggaaagcagtgtctggatttcactgtcactgtccatttctttcacctcctgggctgctggttctacagctcccgtttcccctcggcgctgacctggtggctggtccaagccgtgtgcattgcactcatggctgtcatcggggagtacctgtgcatgcggacggagctcaaggagatacccctcaactcagcccctaaatccaatgtctagaatcaggccctttggacatcctgctgacacttgggccccttaacaccttgggctgctcagaccctccagatgaggtccagcccagatctgagaggaaccctggaaatgtgaagtctctgttggtgtgggagagatagtgagggcctgtcaaagaaggcaggtagcagtcagcatgacagctgcaagaatgacctctgtctgttgaagccttggtatctgagaggtcaggaaggggacctctttgagggtaataacataattggaaccatgccactcttgagccacaatacctgtcaccagcctgttgttttaagagagaaaaaaaatcaaggatatctgattggagcaaaccacttctttagtcatctgtcttacctccctgggacagctgttacctttgcagtgtttgccgaatcacagcagttacctttgcaatgttgcccgaatccacagcagttctgtttggagaaacgcttgggtttccgggatcccagagcccccggaaaggaaaatgtagggtgttgaaagtatttaggcctgcttgctcaggggaaaaggaatgggccaaaatgggaagggcattccaagccacaaaagggaaaaaatgggccacaaaccttggtgggct

SEQ ID NO: 55713 - DNA, 583 bp, Homo Sapiens
taattttgagaatttcacatttgaaaataagccaaaagcctgatgttcacattgtgcttttaaactccgtaacagctgaatacaacataacatagtctcccttgaaattccctccctttttcagtagaggataaatagggtgactccagctgttggaatgagaatggggatacccccaaaataagattctggtgaagaaaaagtcttgtactaagttcccctttaggtgtagccaagtctataatataattatgatcatgaatagactccagaatccacaaagagaagagggcttggatgtcaaaaattctttcattgtggggtaggtggtcggggatgggagaaagggaaaagtcagggaaaggggagaagaaagaaaaacacatttggccttaaaatagcatgcattctcccagaagcccatagtaaagaaaatgacagatcgtggtcagcagactcttatcaaattggtatgtaaaagatttcttcaagctccattttgcagagaccaccacttagagaatcaaaaaattcctgttttgatacttctaagttaaaatatatgttacagtttatctggtac

SEQ ID NO: 55714 - DNA, 634 bp, Homo Sapiens
gcgggctctgctgcgctcgcacctgcgcacacaccagcccgagcgcccacgtagtcctgctgcacgcctgttgctggagttggaagagcgcgcgctactacgcgaggcccgactggggagagcccgaagctcagggggcatgcaggccacccctgccactgagggtctggcgcggccccaggctccttcatcgtccgccttccgttgcccctactgcaaaggcaagtttcgcacctcggcggagcgcgaacgccacctgcacatcctgcataggccctggaagtgcggcctgtgcagtttcggctccagccaggaggaggagctgctgcaccacagcctgacggcccacggggctcccgagcgtcccctggcggccacctccgctgcgcctccgcctcagcctcagcctcagcctccaccccagcccgaacccagatcagtcccccagccggagccggagccggagcccgaacgtgaggcaaccccgaccccagctcctgccgctcccgaggagcccccagcgcctccggagttccgctgccaagtgtgcggccagagctttacacagtcttggtttctcaagggccacatgcgtaagcacaaggcctccttcgatcatgccgtgtcccggtgt

SEQ ID NO: 55715 - DNA, 577 bp, Homo Sapiens
tcaagaaaatgcatatttccattctggtctttctgggccagatttttatattggttttcagtaaatgtctatctataatatttcattatagagtccagtagcttaatactgacactgacttgatacagcatgaagtttctagtgccacacacagtatttagaaaacctttaggcgtgaatgactcatgtgggatatatgtaaacataatgtttattttatctcacaaatgcatgtgaaatgtataattacatcttaggaatccaaaatggtctgcagagagtgagcggaggcaccagatcaatgttggttctttgcactggtgagattctgcctgatgaatattaaagatatcctgctttctgagaactctatcaccagatggcagttgggatatgggaggaactaaagcatcctgttttgtatctgtccagatcattatttctgtctcttgttttttcttcctggttcaggatacttttttaaggggttgagaattgaagattttccaaaagcgttcatgaatttagagcattccacccaatataataaaacctgttaagaatgtcagtctttgtt

SEQ ID NO: 55716 - DNA, 808 bp, Homo Sapiens
  misc_feature (721)..(721): n is a, c, g, or t
  misc_feature (743)..(743): n is a, c, g, or t
  misc_feature (765)..(765): n is a, c, g, or t
ttttaaatatgtggggagatacataaagaacattgcttatttgttcttgaaaataacagtgattcaaatatttcattcagatttacctatgcctaatgaaaaaaatgatgcagaacttgattctccaccttcaaagaaaaaaagattaggttttttccagacttatgatacagaatatttaaaagttggttttattatctgtcctggatcaaaagaaagttcaccaaggccacagtgtgtcatttgtggagagatcttatccagtgaaaacatgaagccagcaaatctttctcatcatttgaagacaaaacattcagaattagaaaacaaaccagtagatttttttgaacaaaaatctttagaaatggaatgtcaaaatagttctttaaaaaagtgtttactagttgaaaagtcacttgtgaaagcttcttatttaattgctttccaaactgctgcaagcaagaagccattctccattgctgaagaattaattaaaccatatttagtagaaatgtgttcagaagttttgggttcaagtgctggagacaaaatgaaaactattccactttctaatgttacaattcaacacaggattgatgaactatctgcagacattgaagaccagctgattcaaaaggtcagagagtcaaagtggtttgcccttcagatagatgagtcatcagaaatctcaaatatcacacttcttttgggctatattcgnttcattgattatgattggccgngatgtaaaagaagaattattantttgcattgaaatgcctacttcaaatactgggctttggaaaaa

SEQ ID NO: 55717 - DNA, 553 bp, Homo Sapiens
gcatttcttctgcataaacaaagaattctacctgctggacagaaacctggaaagttctttggaattcgctgaattacagtttagtatgtcctgattacagagtgacaatatttatcaagcctttgttatattggattatcttctctcttaaaatacaactgtattataattgaaatgacagcccaaaattggatggtttaccaaaaccaatgaaagggatttcacacatcaatttttatttctgttttgaagagcacatgctatataataattgctagtagcaactgcagtaaaacaggtgataagttattttctctgaaaagatccagtcctagagcaggattcttcgatcattcatggcagagtgaaaaaggtttgtatggttcttgtccaaataactcagttcttaaaattcttaaaatgatcgtaaaccattatcctttaaaggtttatttgaagatgctgttaaagtacagaattttgtgtacaggtagatttttccgtccctcattaatagtgccttcttaattaatacagactggtgttagctata

SEQ ID NO: 55718 - DNA, 581 bp, Homo Sapiens
aacacgtgggggcggtgccggtcggagggctcctagtgcgccaggttgtgggaagtgaggctggcggtggcgacaaccgaggaggaggggcgggacgccgtggagcacggcgaccggctgagcgtcatggagggctcaggggagcagccgggcccacaaccacagcatcccggagaccaccgcatccgcgacggcgacttcgtggtgctgaaacgtgaagatgtgtttaaagcagtacaagtccagcggagaaaaaaagtaactttcgaaaaacagtggttctacctggataacgtcattggccatagttatggaactgcatttgaagtgaccagtggaggaagtctacagcccaagaagaagagggaagagcctactgcagagactaaagaagcgggcactgataatcgaaatatagttgatgatgggaaatctcagaaacttactcaagatgacataaaagctttgaaggacaagggcattaaaggagaggaaatagttcagcagttaattgaaaatagtacaacattccgagacaagacagaatttgcccaagataaatatattaaaaagaagaaaaa

SEQ ID NO: 55719 - DNA, 524 bp, Homo Sapiens
gtcctttttcgtgtgatggtgccttcagaataacgaatatttctgttctggacaatgattaaatcttatgagaaatatatgtaggttatattaattcttgtccatttttgctaagcctgtgaaatactttggctctgatacaacttaacttgaataatatcttatcctgagtcttcctccaaggcagtacatattcctgccaggactgtagtaatcctttgggaactacatgtgagtaagcacttgtatgtaagccattatactgctgtaactaatgcatacaaacaattcttctctttacatttatagtctaaaaggggatatgcagtgggaaggaaaattcctgagagattccagcatagctttgtcaattccgactgagccatactgttttccacaagggctcaacacatagtcagtattccgtgctttcagtgtgtgttcagattctcctcttactggttttcttagactgtattgttctataagcaaatgcccatgtgtgatttttaagatgtgctggg

SEQ ID NO: 55720 - DNA, 706 bp, Homo Sapiens
ctgctgtgaagaacacagtgtacggatcctccgcatattatctcaacagaggacagtagctcaggaggcagcttcaaacggtgacctgtggcctgggccatctcttcgtcatgtgcttcacttttccctgtttccctgtgaactggcttccatggttctgtagggtagtgagtcggggttgtggctgcagcagagcaggagatgcttgcccgagtgggagcaacccacccccgtgtccccaatgcctcactcctggcttctagtgcagccctttgtagactcacctcgcaagaaggaagatctgcctggagacctgatcccagtccagctttttgaccataggtcatctttgtccccttgctcctttgcatcatgtcataaaatttgaggatatcagctgattattttttcttccaagaatgaaaatcaagcagaattgattcctacacgaaaaaaaagcacacgaatgccaaacctttcctttggtggactggacactaaccagatgagagtaaatttcttatccgtggacgtatgtaagctactgctgctgtgtgctctccacagccatatttattgtattaaacaatcagcactaaaccttcaaaaattgcccagtgttcctagttaaatgttcagaggggaaaaatagatatattttaaataatgttttgctaatgaaaagagtaaatattttttgtttaaa

SEQ ID NO: 55721 - DNA, 671 bp, Homo Sapiens
  misc_feature (397)..(397): n is a, c, g, or t
agatacaagaatgtgaatggcataaagtatcacgctaagaatggtcacagaacacagattcgtgtccgcaaaccattcaagtgtcgctgtgggaagagttacaagacagctcagggcctgcggcaccacacaatcaatttccatcccccggtgtcggctgagattatcaggaagatgcagcaataacatgctggtcataactgtgccaagaaatcctcaccagcagttgctgattttgaaaacagccaccttttttcaggggaagcattcagcaaccctttaaagaaaaagaattaaatgcatgctttaaattttttctgtaattttggaatgatgtatctttgtagagttaatgattttgtacatttgcacatgtaatcatcatacccattttcanttacttgatataaggtgctaaacaaaaaaagctctaggttcttcagcacatttcccccaaaacaaaataaaattgagggcatgttgcatattgttgaattgtattgcgggggtatcaacctgggggggaggaagcctgtgcactgagattttttttttaaaatatgaatgtgaatgaaggtttcaacacatcaacttcaatttgttaaaacccaaaaaaaacccttcatttttaaactgggccccagccctcaataaagggagttaggttttgg

SEQ ID NO: 55722 - DNA, 648 bp, Homo Sapiens
  misc_feature (507)..(507): n is a, c, g, or t
ataaagatggcttcacatggaaatttaagttctttcagggtggagatttacttggttcatacaccttttgcctgaattaaagtatttcatgtaggaggacttttatcctttttgatagacagtttcatatatcttgaactcaatatctcagatctcttctactgtattactgaatagcatacatacatagacaatgttcgccattcactagatatttttttctattatcttacacttattcaagcttgtctgtgattaatggaattggtgtcagatgctggaatttattctgaccaatgaacacagctgactcaggggagtacaatctcctgccaagtaatagaaccaaacccaatatgcataaaagaaatacaatactccaggctttagctgaaggaagcaactacctgtgtaataacaaagcagcaaaaactatttctcatgtggctgcataggctgtatattatatctgatctctaatgtagcttactggtttgccttttttanaaccaaaattggaaattttcctttgtaaagaaaaaaagtcttatgagataattgcttgattaatgttttgaacaataccaagaaattgtttaattaaaataaatatttttgtttgaaattgaaaaaaaaaaaaaaaaaaag

SEQ ID NO: 55723 - DNA, 583 bp, Homo Sapiens
aggtgttagcagcttggtcgcgacaggtgcgctaggtagagcgccgggacctgtgacagggctggtagcagcgcagaggaaaggcggcttttagccaggtatttcagtgtctgtagacaagatggaatcatctccatttaatagacggcaatggacctcactatcattgagggtaacagccaaagaactttctcttgtcaacaagaacaagtcatcggctattgtggaaatattctccaagtaccagaaagcagctgaagaaacaaacatggagaagaagagaagtaacaccgaaaatctctcccagcactttagaaaggggaccctgactgtgttaaagaagaagtgggagaacccagggctgggagcagagtctcacacagactctctacggaacagcagcactgagattaggcacagagcagaccatcctcctgctgaagtgacaagccacgctgcttctggagccaaagctgaccaagaagaacaaatccaccccagatctagactcaggtcacctcctgaagccctcgttcagggtcgatatccccacatcaaggacggtgaggatcttacagaccac

SEQ ID NO: 55724 - DNA, 830 bp, Homo Sapiens
  misc_feature (791)..(791): n is a, c, g, or t
ctttgtttatcagtgaaattcaaggagaaaatgaggttaatgaagaggtatcagttaaatatccccttcttctcaccctgccaaaattagcagttggatttttggaaactctggaatattctgggtcattttgttttgtatgtttgttgtttttcgtcttccaaaggtgaaagctatgatacagttccacttaaattttagtgttttcttactcagctcaagcattaatttttgattaagtcttaatctgcatgacctgtgaatctgaatccatcatctccctttcctgccagcttttctacaaacattgaaatatgttatttggtcagcacttatttcctaggttcacagccttgggaggttgtggcatgtcctcccagtctggctgggaagagaccagctgtaccatccaaatgcttccctggtcttgatgatctcttccagagtcgatctgagtggccttttctgcaccctccccttctttctctttgaatggaattaaacccaatttggaaacaacattgacccagtcaaaagcttctaatggtttctttttcttcctccagttttagtttgcttttattaaaaaaagaaaatagtgcatggccatagctccttcagttctcttattgcagactaaccatcaggatggtatcaaagcacaaatactttggaggggaatgcgttgaactggggcaagtactctgtaacacaaagtgggaaaccacttcctggtgctgccgctcctgcccccactttaggtgggagggacgagttttgccctctagatnttaatccagctggtgtccaccggatgttgccctcctggg

SEQ ID NO: 55725 - DNA, 946 bp, Homo Sapiens
  misc_feature (667)..(667): n is a, c, g, or t
tgactttggagagaaactcctctctcctcgtctgcggcgtggacttgatcatggactggtgcctttgcattcagaaggagagctgtcagcgtagcaccgaattcaagaccaaggcgtgctacctgagctgacagctttttgaaagccgagctgtttctgaaccatgtacatacatgttctgaaactttctcatcattttatgagtactgttcattgagagatgacaatgtagatgaaattggaaataaaccaacattgtttacattccaggagacttgtagctcagccacacacgcagtaatgacctgtgcccgttcgcctctggcactgcccacccctctttttttttttcttctaattctgtactcacaaaagagaatctcattttcttctttcttccattcccttaaattctgagtactgtacatatatttctgggttcccacgatgatgtgaaaaactaccagactgttttttgtcttctcacaaagacaagaaaaatcagggcattttgtgagtgccttaagatcaaactaacaagatctgaccctctcccctcacagtgagccactgccccacttcagagggtaagagccaaaagcctcattgtgaaaggcactggacttggaccagggacaccatcagggccttggttttctcacgcatnaaatggagagtggattaatcgccaaagattcttctgatctgacattttgaaattgtgagagaaactagatgactgtaaacttggtcacaggcctggttctggcagtttcttgcggacttttttctagcattatgcccaattaaacatgccagtttcagtgtgcctcctcgcagggatgaaatatctaagtccttttctgggggttcttcacccaagaccttaaaaacttagggactccgaagcccttcccaaaacccgtttttggtttccggaaaaaaa

SEQ ID NO: 55726 - DNA, 587 bp, Homo Sapiens
ttttgaaaatttatctgggatgtggacatcagtgggccagatgtacaaaaaggaccttgaactcttaaattggaccagcaaactgctgcagcgcaactctcatgcagatttacatttgactgttggagcaatgaaagtaaacgtgtatctcttgttcatttttatagaacttttgcatactatattggatttacctgcggtgtgactagctttaaatgtttgtgtttatacagataagaaatgctatttctttctggttcctgcagccattgaaaaacctttttccttgcaaattataatgtttttgatagatttttatcaactgtgggaaaccaaacacaaagctgataacctttcttaaaaacgacccagtcacagtaaagaagacacaagacggccgggcgtggtagctcacgcctgatatcccagcactttgggaggccgaggcgggcggatcacaagggcaggagatcgagaccatcctggataacacggtgaaaccccgactctactaaactacaaaaaaataactgggcgtggtggcgggcgcctgtatcccagctacttaagaggctgaggcagaaaaa

SEQ ID NO: 55727 - DNA, 658 bp, Homo Sapiens
ttttttttttttttttttcatttccaggctaacctactttttatttaatgcaaattacagtaccagttaactatttccaaaccaagtcacatagaacaaaatgtatttacaagggaatggggaaagggaaaaaaaacattgagcatacttttcacaaaaaagtttatatttaaaatgaaaaaaaaatcagtcacagaggcattcaagtagtaataatgttatacagattttgcttttcctttatatcaagacagatttgcacaagtgtttgcaatagtttgtatacaacccacagtcctttatatatatatatatatatatataataaattttgttttttaggtttgtttttaagatggaagtggtcacgctaattggtatgtgtacaggcccaagtgatccatcggcaacacatttataaatgcaaattttacaggcaagcagattttcatacaactatctgtatctgcctgtagacagatatagttaaggaaaaaaaaacttaaaaattaacacaaggaagtctactttgtcaagctaaccccttatgtactggttgtcattttgcttttattgcagaggtgcaaaacggagcaacaaacttgaataaaacggcataacccttgtgaaaataatccaaaccccagggaatactttc

SEQ ID NO: 55728 - DNA, 594 bp, Homo Sapiens
ttttttttttttttttttgttttgattcgagcctcaccctggccttttggcttcccctgcctgagagagacctgaggaggggacagagcccagcccctctcctgtggctgagcaggcctctgtgtccatgacacctgtcttccgggcctgggggctgtgggtgtatgtcctccctactggcttccccggcccctgctgcatgatgctcttggaactcttctccaaggagtcagtcccccaggcctatcaggggatccttttgtatctgcactttgggttttagtttcaaagctccatcaggtacagcttgcatttcaggatgtgtggaaagctcgggtgagggctgccctggttcatcatagctccaccttcctcggaaggagtgggctgttggagaccccccatccatggcacactagctcagcactgcatttcccgagatgattcccaagacagctggtgcctcctggctttcctgtgccaggccaaggggcaccacagaggaccctggatcctttgcctcttcttggttgaaggatctctatgtatgtgtgtatataaatatagttttttatctataaacctcgtgccgat

SEQ ID NO: 55729 - DNA, 627 bp, Homo Sapiens
tcccttttagtagaagcccatggttgccctttgccaaactggggaggaggcaatgagccttggtggaaggaacctctctgttgatatttaaagaagtgagggctgtgggtattcattgttagaaatgccaatttcactttgaaaccatagtccaagtctctaggttggtagaagggaaaggaaggaagtggtcccagtgattctagatctggttgggaaacttctgcctcatgactctgtcctttgagtcctttggacagcagcacaaaacataacaatttttatttttaaacagacccattctttttgatcccacaggagctgtggttgggtcggccgtagccccgggatgtggtttaagtggattactgcctagctgagccaaaatgtttgcttgtacctgttggaccactacagcaaaccgctgcttacagtgcattgtgtatttctgtagtactgttttgcattttccatagagacagaaaactttgcaagtcaatcactgttgttcccatggtactgtaagaaaaaaaaaaaggaaaaagaaaaaaaaaaagaaaaccagccaatcattgcgtgtacagagctaaaaattgtaattaatagagcctgttgggaaaaaaaaaa

SEQ ID NO: 55730 - DNA, 567 bp, Homo Sapiens
gttattttttacaaaaaacaaacttgtttatttttataataacgatgtatttgatgtggaccaaattcgtaccactatctaaaatagcctcttttctcatagtgcagttgtagtttagaaacaaaacttggtcctctctccttgctttttaaagtaaatggctagatttagttgtcttagccaggtttcctttgaagagaaactcaaaaccattttgaaactgcttagttcagaatacatcgaagtatttaaaattactgagttgggtaatttactatcatttactttttacattacaagtgcaataatatttcacaaaatgaaactcccgaatgggtggagtatgtgattattggtacctggtccttctggtgctatttttatttaagtctttgtttcaaaccacctttccctgaatcttaaagataatgttttgcatgtgagtacatgcagcccagcaagaaactaaactgaactctcttctcctatcctagtccattaaggagaagaaccagcattgcttttgtgtttggtgtgaatattcagtcaataaaaatgatttaccat

SEQ ID NO: 55731 - DNA, 790 bp, Homo Sapiens
  misc_feature (790)..(790): n is a, c, g, or t
gtagcgtaatacacagacacttattatttgaaaagagttgagataatggcccaatgtgaggagtggattgcggatatccagcagtacagcagtgataagcgggtaggcaggactatgtctcaccatgcagcagctctcaagcgtcacactgctcagctccgcgaagagttgctgaaacttccctgccctgaaggcttggatcctgacactgacgatgccccagaggtgtgcagagccacaacaggtgctgaggaggctctaatgcatggtcaggttaaacccagcagcagcaaagaactccccagtgacttccagttatgagctgcactgatgtggacttcatagacacaaaggcttcgaagcacaagccaaatatgtcaatatttgtatgtaagaaactaattatgtaataggtaatgaaactgaaactatactatgcccttaaggagatccagtttaattcaaggtgatcttttatttacctgtacaggagtgtaaacttttttgtgcttttatttttcaattgtgagaaccactgattggtatgttcaacaaatttgtgtatacaaagaaatggataaatcactgctatataagggaaactaccttaggaaagaatgtttactgaatgtttattttattttatttttttttactatagagtgaggggttgttaacaaagaatatatattggtcattcttacaactactatttaaagtcagcaacttttcactgaatttgatagattttatgtttggcctatcttcatgctcacatttgatttctgan

SEQ ID NO: 55732 - DNA, 621 bp, Homo Sapiens
cctagttgacctgtctaagagaattatatatttctaactatataaccctaggaatttagacaacctgaaatttattcacatatatcaaagtgagaaaatgcctcaattcacatagatttcttctctttagtataattgacctactttggtagtggaatagtgaatacttactataatttgacttgaatatgtagctcatcctttacaccaactccagcctgggtgacagagcgagattccgtctcaaaaaaacaacagcaacaaaacaaaaccctcgaggggccactctcctgtctttactccttttcccttctctattctttcaccagaagccctcatttgaccagtgaactcctaggccctcttgacccgcacattagctgggcgatttccttgttctgctaattcctaattctgcttaaaatgtatttggatttctgtttttgaacacttatgatgccaggcactgtaatgcttgaaacccgatctttccctagagaatgtaacatacgtttttattcatttaatcacttcattatgccggggttaattatggtttattttattaattggtaataaaggccacatttatttttgtaactgtttaaaaaaaaaaaaaaa

SEQ ID NO: 55733 - DNA, 529 bp, Homo Sapiens
aatgacagcaggtatatgaggcatggaacacttggcttattgtaaagttttcaaaatatgcagtcctttctatccaccaggggttgggagttgtctttgtatatcaaccatggaagggctgttttggttcatcattctgtggtctacctgggtagacctgatgcagccgtgtttctgaggaaaggaagaacagcttttgttttgtgatatgtaatggtagatgtagtgccatggaatgatgcagatttcattcagatattcttggatcttggccccaggactcactcattcttccctatatgagcattggtagttacaggttttatccttcctttaattgtaagtcttttgaagccaaaaactgtatccaatttgtcactgtctcctaacagtacttagcagtgtctgatgcatcatagggagtttgtaaatgtttggataaataaagggaaaacaaaaacaaccacaaaaaaacctttattttgctttaataaaaatattttaactagttaaaaaaaaaaaaaaaaaa

SEQ ID NO: 55734 - DNA, 563 bp, Homo Sapiens
agtcccagttccagaatgaggaagctgcctcagggtcgccctgttcctccccttggacctgagacaagagtttctgtagtctgggtggaacgctatgatgatatagaaaactttcccctctcagagctgatgacagagatcagtactggtgtggaaactactgcaaatagtagcacttcactgagatctacaactcttgaaaaagaagttcctgtcatcttcatccaccctttaaacactggattattccggataaaaattcaaggagccactggaaaatttaatatggtcatccctcttgtggatgggatgattgtcagcaggcgagctcttggctttctggtgaggcagactgtaattaacatttgtagaagaaagagactggaaagtgactcctacagtcccccccatgtccgccggaaacagaaaatcaccgacattgtcaacaagtaccggaacaagcagctggagccagagttttatacttcacttttccaggaggttggactcaagaactgcagttcttagaccactgaatttctaagactgttgaactccagttt

SEQ ID NO: 55735 - DNA, 917 bp, Homo Sapiens
caactgctgtgcggcctgcbggcgcgcgctcccttatcggccaacggacgcgaggsgcgcgccatggaacagcggttagctgagtttcgggcggcgcggaaacgggcgggtctggcggcccaaccccctgctgccagtcagggcgcacaaaccccaggagagaaggcggaagcagcagcgactctaaaggcagccccaggctggctaaagcggttcctggtatggaaacctaggcccgcgagtgcccgggcccagcccggcctagttcaggaagcggctcagccccagggcagcacatcagagacaccatggaacacagccattcctctgccgtcgtgctgggaccagtctttcctgaccaatatcaccttcttgaaggttcttctctggttggtcctgctgggactgtttgtggaactggaatttggcctggcatattttgtcctgtccttgttctattggatgtacgtcgggacacgaggccctgaagagaagaaagagggagagaagagcgcctactctgtgttcaatccaggctgtgaagccatccagggcaccctgactgcagagcagttggagcgcgagttacagttgagacccctggcagggagataggacccagctgtgctgtcatgcagctaacctctgatgtggtcttcctcaccattggctatggatttgatttcaggtgtataggactaagggcagcttgcgggttagctctgtgactgcatagtttttctaccttctttccctgatcttttgctgccatttgatctttgatagttttggtgaaactctctaaaatacattcactgtgggtccgacgcaatttataaaaattatgtactcaagaagggagacctgtttgtttcatttctcatctgtttygggagatgattttagagcactagaaa

SEQ ID NO: 55736 - DNA, 572 bp, Homo Sapiens
gaataaaagagaagacctgtgatggggcagcagtgacgcgctgtggggggacaggtggacgtggagagctctttgcccagctcctggggtgggagtggtctcaggcaactgcacaccggatgacattctagtgtcttctagaaagggtctgccacatgaccagtttgtggtcaaagaattactgcttaataggcttcaagtaagaagacagatgttttctaattaatactggacactgacaaattcatgtttactataaaatctccttacatggaaatgtgactgtgttgctttttcccatttacacttggtgagtcatcaactctactgagattccactcccctccaagcacctgctgtgattgggtggcctgctctgatcagatagcaaattctgatcagagaagactttaaaactcttgacttaattgagtaaactcttcatgccatatacatcattttcattatgttaaaggtaaaatatgctttgtgaactcagatgtctgtagccaggaagccagggtgtgtaaatccaaaatctatgcaggaaatgcggagaatagaaaatatgt

SEQ ID NO: 55737 - DNA, 474 bp, Homo Sapiens
ctttttttttggtttcattctcataataaagagagtgtatactgacatgggcaggatgataaaaatcatggtttaatattttcttttgtaaacttaatgccaacaaggtctaagttatgtttacaacatgaagaaaacctcaaagttcttaatttttaaaatgcctagaagacaatatttagtcttggattatctatctgctaagacctccaccaatttcattaaaccaaattgaattattctattcttgggattctgtggccacttcacctttgacaacaacctactttatgtagcagtctcaactgtttacatgaaccatagcaaaaaaatcagaatcaaatccatctccttttaatgtttgcagaaagatgcaaacaaaaccaggtaagtatggaacaatgtgtaagtgaggttatcacactttgatgtaaaaatttctattttgtgtatttttaaaataaatcctcgtgc

SEQ ID NO: 55738 - DNA, 798 bp, Homo Sapiens
  misc_feature (606)..(606): n is a, c, g, or t
  misc_feature (764)..(764): n is a, c, g, or t
  misc_feature (769)..(769): n is a, c, g, or t
  misc_feature (786)..(786): n is a, c, g, or t
aataggttagctgacatcgcataatgtaataggtttgctaaagaatctaaccatcaaatataatattgtttccagggagggtgtttgttcagagttgcctgttagtagaatctggactgtccatcccagccacatcccacctactggacagtaggggtagagatgccaccagactacaggtgaccagattggcctgaaacatggtgtccagtaaaaacggggaggaataagtccatgactgctggagagcttggtggtaggaggagggtgaaggagggtgagggggcctctcatgggtcagaaacctccagggacatccctcagctggtaactctgctgttgtccggagggttcaggcttggtgtgccttcttctgtttgtctgacttttggctcctatggttcatctcctgccctgcccaccacagaaaaggatgctgctgcatagcttctccaatgtaccagtcattgaggccagcgcgcagcacttttaatgtttttagtgctagtaactgtgttttaactctccaggaataagctgggaggttagaaaacaagaaaaaagggggaaaaaaaaacctctccacccactttccttttttacagntacagaccctgttgagaaaaagaagcacccagatgggtgatggtgatagggcttgtggtggacacagggttgtggtaagattcctcaatgcttcgcgagcacctaagactattaccctggaactgactgctttctaaagcttgattcatgcctctaanccagnggttcttcaaatggggncccttaaaccat

SEQ ID NO: 55739 - DNA, 1109 bp, Homo Sapiens
  misc_feature (890)..(890): n is a, c, g, or t
aattctcgggatgtgagccctaggatccaggtcctctctcacctctgacccagctccatgccagagcaggagccccggtcaatttctggactctgcaccccctctcctcttcaggggccagacttggcagcatgtgcaccaggttggtgttcaccagctcatgtcttccccacatctcttcttgccagtaagcagctttggtgggcagcagcagctcatgaatggcaagctgacagcttctcctgctgtttccttcctctcttggactgagtgggtacggccagccactcagcccattggcagctgacaacgcagacacgctctacggaggcctgctgataaagggctcagccttgccgtgtgctgcttctcatcactgcacacaagtgccatgctttgccaccaccaccaagcacatctgtgatcctgaagggcggccgttagtcattactgctgagtcctgggtcaccagcagacacactgggcatggacccctcaaagcaggcacacccaaaacacaagtctgtggctagaacctgatgtggtgtttaaaagagaagaaacactgaagatgtcctgaggagaaaagctggacatatactgggcttcacacttatcttatggcttggcagaatctttgtagtgtgtgggatctctgaaggccctatttaagtttttcttcgttactttgctgcttcatgtgtactttcctaccccaagaggaagttttctgaaataagatttaaaaaccaaacaaaaaaaacacttaatatttcagactgttacaggaaacacccttttagtctgtcagttgaaatcagagcactgaaaggtgttaaattgggggaaatgtgggctggattgaaaaaaaattcccctcccaagaaaanaaaaagggaatgggaaacaacccctccaaaaagagggggcccgccccaaaaatcccctccaagggggcccaagtttacgcggtacccagttttttttgtaaaaaaggggccccctttaaggagggcggatttaaaaaccagggcccctgggccgccttttttacaacgcccccggagggggaaaaaacgtgcgaccttggagactccttggaaagagaa

SEQ ID NO: 55740 - DNA, 933 bp, Homo Sapiens
  misc_feature (669)..(669): n is a, c, g, or t
  misc_feature (812)..(812): n is a, c, g, or t
aggatcctgccaagtgggtgatggacacatatccatgggcagccagcccacaacagcacgagtggcctcccctgctgcagttacggcctgaggatgtcggcttcgacggctactccatgcctcgggagggatcgacaagcaagcagatgccccccagtgatgctgaaggtgacccgctgatgaacatgctgatgaggctgcaggaggcagccaactactccagcccccagagctatgacagcgactccaacagcaacagccatcacgatgacatcttggactcctctttggagtccactctgtgacaggggcccggagcccagcgccctcctcttctcctcaccgcattccacctgcatcccccacatcaccctgaagatgacttcctgagccagcccccagccacagccttagagctgcgggaacaccgagaccccccgtccttcagcctcgacctgggtgcaggcatcccgggccagctgcctgcggaccgcttccttccacagcgagaactgcactaccttctgttgtactttaattattgttttgccttgttgctgtgacctccctaagacactgaagatacttctcgggaaaggatcatcgccgttgaaatgaaaagagagacagagagagaaaaaaaaaagagaacccacatgaagctctganaccaaacagcatcctgccatgagcttcccagagacagaagagactggagcaaagtcggaaacacagagaagcacggcttcccctcagcacagaacctccagactgggtctcagagcccgtgcaacccaaccctcccaaaaagnccggccacagggaagaactggtgcctaaccagggttgctttgctttggtcaacgttcaaccgcactacaggagctaacgacacagggggaaaccttaaggagccaataaaccgtggcttta

SEQ ID NO: 55741 - DNA, 840 bp, Homo Sapiens
ccgcccttactgccgcgtccgctcccggtccctggcccctcagcggcatggcgtgcggggcgacgctgaagcggcccatggagttcgaggcggcgctgctgagccccggctccccgaagcggcggcgctgcgcccctctgcccggccccactccgggcctcaggcccccggacgccgagccgccgccgccgtttcagacgcagaccccaccgcagagtctgcagcagcccgccccgcccggcagcgagcggcgccttccaactccggagcaaatttttcagaacataaaacaagaatatagtcgttatcagaggtggagacatttagaagttgttcttaatcagagtgaagcttgtgcttcggaaagtcaacctcactcctcagcactcacagcacctagctctccaggttcctcatggatgaagaaggaccagcccacatttaccctccgacaagttggcataatatgtgagcgcctcttaaaagactatgaagataaaattcgggaggagtatgagcaaatcctcaataccaaactagcagaacaatatgaatcttttgtgaaattcacacatgatcagattatgcgacggtatgggacaaggccaacaagctatgtgtcatgaagctttgtcacatatctgggtaccaggtttgacctcaagagatggctgctgtacactttttgcaactggtttgatgtcacatttcagctccaactttgcatcctgagaacacttaaacgtttctgcaggtccattttatacaacttgaaagaccgtaaaactttctggttgccacaagcatatctttcttttctgctcatccataaacagctgt

SEQ ID NO: 55742 - DNA, 863 bp, Homo Sapiens
ttcttgtgtctccattttcactcttgaaaactgaaagcaatttgacttttatttttgtttttctaaagaacagctaggtgaaaggaggttaagctgattgtcactctgcctgcccactacctactccccaccatggtgtttcatgaaacatccccaccacctgaagtgatctttttaatccttgtgatagtaaatgcattgataattaacaggaaaaacatgtttttaaataatctacaaatgagaacccaaatggtagtgttttgtttgacagaagtaaatcaaatattatggtttaaatataatgcaaaatttcaggacagttaatttgggcttcccttaccctaagagggtttttcttataataaggagaagaggtgtggttcaaagaaaattaagagacaaaaccttcaggtacataatgcatgaaaatctttaaatgcctgcaaaaattaagttctgttataataccagccaattctgaattagccaatgccctaaaagcatctaacaatttaaggttatcttatgagtcctatgaaaacaattatttgttgctaaatttgagttttagctaccaacgccatgtttacgtgacaagaaattgttttggccctgtggtttatgacgtgctgctggataagcatttatgtaaaactgagtatttcaaagagaaccatttacaattggaatttccacctgtgtggctgtttgcagacctacctctgtcttccattttgcatcctgtcagtgctataattagtttgatcactttgtcctgtttttcagtgtctaccaatattagcttaatcactatggttctaactatttaaaaattaatggggcccgggccccggtgggcc

SEQ ID NO: 55743 - DNA, 1011 bp, Homo Sapiens
gacactttgcaaaaaaacttgatcctcgaagagaaggtggtgatcaaaggcattcctttggaccattggactatgaaagtctccaacaagaacttgctttaaaagagacagtatggaaaaaagtgtcacctgagtcaaatgaggacatctctacaactgtagtatatagaatggaaagtctgggagagaaaagctaaagaaatgggttctagtttcagaatgtttcttcatttaatctttcaaacatctttagcttttttttgcaagttataaatatttatttgaggtattttttgttctcaatcttgggtgctggagccataaagcttttttttccttttaatctttgtataaaggcagtagattaagaagtgcatttgttggtctttaaaaagtatttacaagtacataaatttgctttatttttaaaaatacaaaaaggaaaaatttaaattttttttgatgtaattaaaatgttaactatgtggtcagataatcccattttacaatagtaacagaaaattgtaattcttagttctaaaattcacaaattaaactcataagttttgttgcattttgttttttcttttccatttttaaaactaatgtgatgtctttagtggcaatagaaggtacttctatgctaaatacaaaactaaaaaggcaaaataatgaaccccaaattattttatttaaaatagcagtggattataaaattagcttgtgtttacatttatgccatttttggtgatagattggctttacattttaaaaaatttatttaaaaatttatcaaatgctttaaaatatgactcctacttttttattttgcaactcctctgttctgtcagagttgttatatacaagcagtgttcttatgtttactaaaacattccagcccaaagaaatttcagaatggtgagataaatgaatggtttcctcacataaaaaaggtaataaatgggttaaggttaacttccgaaagggagaaaaccagggggaggtggtcct

SEQ ID NO: 55744 - DNA, 632 bp, Homo Sapiens
  misc_feature (622)..(622): n is a, c, g, or t
atgcctacaacacagcagtcccctcaggatgagcaggaaaagctcttggatgaagccatacaggctgtgaaggtccagtcattccaaatgaagagatgcctggacaaaaacaagcttatggatgctctaaaacatgcttctaatatgcttggtgaactccggacttctatgttatcaccaaagagttactatgaactttatatggccatttctgatgaactgcactacttggaggtctacctgacagatgagtttgctaaaggaaggaaagtggcagatctctacgaacttgtacagtatgctggaaacattatcccaaggctttaccttttgatcacagttggagttgtatatgtcaagtcatttcctcagtccaggaaggatattttgaaagatttggtagaaatgtgccgtggtgtgcaacatcccttgaggggtctgtttcttcgaaattaccttcttcagtgtaccagaaatatcttacctgatgaaggagagccaacagatgaagaaacaactggtgacatcagtgattccatggattttgtactgctcaactttgcagaaatgaacaagctctgggtgcgaatgcagcatcagggacatagccgagatagagaanaagagacgag

SEQ ID NO: 55745 - DNA, 988 bp, Homo Sapiens
ggccgtatatagtgaaggggtgaggatattctaaacaaacaaaaattgaataatttattcacagaaactattaagattgtattgtaaagctcacagcaagctcagtgggcagcagctgcaacatctcaccggggaaattattttatttaacgtgagtgagatgtgggccggagaaggtagctgaagctatttataaaacgttgtgtaccttcttccgagctctctcccctttgtgaagggcgcagcaactatacccttgatggatggagatttatgcaatgtgttttactgggtagagtgacagaccttggctgtccctggaattgagaatctggaccttatttccaggcagagaacactgtcctcagaaatgggacttctgataatgaaacaggttgtccaacattttctaatacgcattctacagaacacaggttccaggaggcatcaggttggtgtgatgcagactaagggtttgtggtcaaatatccttaagaaacaaagttaagtcagtttcctttctgcaaggactttttcagccttcaatgtgtgctcgtgcatggtgaatccccaaaaaataatccttgagtctgtagcatttcctgaacttactgaccaggatactctattttgcagatcaccgcaaaaagctagggttccaccgagtatacttggttaagtgacttacatttctgaggcttcaaggataaaaactgccgccaaacctgtcattaataacaaagttcaaatggcccacggtcctccatgtgtctttgcacacaaggtctattaaaggagcacggggtctaactgggtatggccaggaaaaatcccccccccaggagggtgaactgggagtgtctaatacataaccgaggctgaatgcgccaactactaagagtggcgacgacactatgcctactcacaaacgaccgggagaacactagatgcgagggaacaacggatataatcgaaggaccgtctcatt

SEQ ID NO: 55746 - DNA, 463 bp, Homo Sapiens
  misc_feature (459)..(459): n is a, c, g, or t
aaaaaaaaaaaaaaaaaaagtatgacccagtagctaggcacctgtggccccgccaagttgacacataaaattaactgtcacagtatcatcttagaagtgaaagaagcccctttatcctgcagtgcccctctaccaccacctactgacaaagaacatggtgctatctggcatgggagaaatgttcagtttgctatggcttgtatgtgtcccctcaaattcaagtgttgccaatgtgacagcatcaagaggtggggtctttaagagatcactaggccatgagggattctcttaggactgggatgaaggcccataataaaagaggtttcggggagcatcctgctagcttgccttctgtatgtgagaacacagcaagaaagccctagtcaacaagtgccagctccttgatcttagacttcccatcctccagaactgtgagaaatacatttctgttccttacanatta

SEQ ID NO: 55747 - DNA, 677 bp, Homo Sapiens
atccgtaattctcttggctgaaaaacagtggtattttaagacagttttgttatacatgtgacttacttttgactcagcctgagaggaggaaatgtaaagagataagagatttggcccaaagcagcaagagactagtaaccttgagccaggacgaagccaagacaacgtgactcccaagtagcaggagcagaggtcggtcacctgtggcattctgtttcattcccttttaaaattatgagactttataggcagtgtaaaacatcagcaggcagcgatgtgataggatgtgcgaaaaagctggtctgataccatggctataattacagagctttagttcaattaggattttgtaaatgagcaaatgacctttttttccagtgccccttgtaatagttaatatgagtccatgcaatcttgtgatgccattctcctgaaggtgttgatttctggtacccagccagcttagctttggctgctggaagcacagtaggtactgatgattacttcctggaaatcttgacaggcttattgtaccgtgtaatggggaaaagttaaagtataatgtttggtgttaataaatgactgatgtgaaaataggaacatgtgtctttaatatcaaatatggctttatttgcagtgaaatctaaattccttattctacagtagtattttcttgc

SEQ ID NO: 55748 - DNA, 707 bp, Homo Sapiens
acgcgtccgctgtggatcacggggcctgccagcttgagtgtagagggaggggggactctacccttctcagccccaccagcccccctctgcccaaccacaattttcccttcctccgccttcctctccctctcctgtttacactccccaaatgcgcacaggctgttatcatgggtcctgagtcatcccacacacagcctgccccagcgtccctgcccccagctggccgcagggcccgccccatggagccccctgccgccctgggctaatgggagccagatggccgcctggtgactcagccaccgggcctgtgggaacccaggcgtcccgccttcccatgcccccacacccggctcctgctcccccagcagacacacacaggagggcctggccactgttgagggggcacacagggcaagggtcaccaagtcggggcctagggactcctcatgcctctgagatggaatggtggtatcctgccgtggccaagcctgaaggaccctcaaaactgcctcctggagtccacggttcctgacctccgagcctcagctatgccctctgggtcaaccagaattagagccagacagggaaagtgagagctggatggaggcagacaagatgctcagagcgactattaaagaacgaaagcctctgctacggagcgcttctgtcctctgtcaggccccgagcgaagtgcctgacaccgggtt

SEQ ID NO: 55749 - DNA, 576 bp, Homo Sapiens
gcgtccgctctagtgagaactgtctactttgaattgccatttactccctttcctcctttggccgatatgctcttggctagctttttataagttaatgtgtttccccaaaaagtttcactactttatattcatttgagtgtgatcctaaaacacctggatcaacagtacatctcatatgcaatctgcatcagctcctattctgtctggatgtctagaactgttggaagattttgacgtcttaagccctaggttttgctttgggaaataaggtttgaaatattgttcattgcattaagatttgtgtgtgtgtgctttgtaagcccagaaccaggttttggaaaatgcctgtactgtgaaagcaaattaggactctttctgagcctctttcattgtcagaaatagaatcactttccatcagcttccaggaaattgtgtatctggagtcgaagagatttgacatcaagaatccagatttttaaatgtaattgttttttaaatgctaatggtttgtaaagcaccttcagttcttcggatgaaaggtgctatattccctcagtgtaaattaataaaagatta

SEQ ID NO: 55750 - DNA, 576 bp, Homo Sapiens
  misc_feature (463)..(463): n is a, c, g, or t
cagccttggggaaccacctacacttgagcccaattggttttgaagtgcatttacaaggtttgtctattttcagttctttactttttacatgctgacacatacatacactgcctaaatagatctctttcagaaacaatcctcagataacgcatagcaaaatggagatggagacatgatttctcatgcaacagcttctctaattataccttagaaatgttctcctttttatcatcaaatctgctcaagaagggctttttatagtagaataatatcagtggatgaaaacagcttaacattttaccatgcttaagttttaagaataaaataaaaattggaaataattggccaaaattgaaaggaaaaatttttttaaaatttctctaaatgtaggcctggctgggctttgaccttttccgtttttaaatcactcacagagggtgggacaggaggaagagtgaagganaaggtcaaacctgttttaagggcaacctgcctttgttctgaattggtcttaagaacattaccagctccaggtttaaattgttcagtttcatgcagttccaatagctgatcatt

SEQ ID NO: 55751 - DNA, 499 bp, Homo Sapiens
tgaaagcactgtaaaacataagagaaaaaccaattagtgtattggcaatcatgcagttaacatttgaaagtgcagtgtaaattgtgaagcattatgtaaatcaggggtccacagtttttctgtaaggggtcaaatcataaatactttagactgtgggccatatggtttctgttacatatttgttttttaaacaacgtttttataaggtcaaaatcattcttagtttttgagccaattggatttggcctgctgttcatagcttaccaccccctgatgtattatttgttattcagagaaaatttctgaatactactagtttccttttctgtgcctgtccctgtgctaggcactaaaaatgcaatgattattgatatctaggtgacctgaaaaaaaatagtgaatgtgctttgtaaactgtaaagcacttgtattctactgtgataagcgttgtggatacaaagaaaggagcaagcataaaaaagtgctctttcaaaaggat

SEQ ID NO: 55752 - DNA, 503 bp, Homo Sapiens
gcccgggctttactaaaaatacaaaaattagccgggagtggtggtggagcgcacgcctgtagtcccagctactcgggaggctgaggcaggagaattgcttgaacccaggaggcggaggttgcagtgagccaagatcgcaccactgcactccagcctgggcaacagagtgagactccgtctcaaaaaataaataaaatagaagcagccttgtaactgtatttaccatgataatatattctgcacggtaagaattccttttacagacattctttatcaagaggtcggcccttctttttcaggcacataagccaaatgcaggcctgtgtgtagctgtgtgttttttctgtggttgccgcatttattccacctccagctggaccccccactgcaaatagagaacagcggtgggggatgggggttaaaaagtagagaacctcctttctgttcaactaatttcacgtgacagtgcatgtatttattcaataaaacctttatgttagctc

SEQ ID NO: 55753 - DNA, 578 bp, Homo Sapiens
atatattttatacttgagtagacaactttaataatccatatttatactatcgcagaagtaagcattggcaaacgttcagccattagcactcatttaaccctgttagcaatattcttttgaaaaaagtgccagtccttatgtgataaactaagaagcccattgaatataaaagtgtgtaggactgaaacagtgaccttatattattgctaagggaatatgagattaacttcctacaggggccaaaaccagagaaaggcttccagcaacttcgatgaaagtagtttggccacatgtcaagccaatgtttgtactatttatgtacctttttcataactggaattgccaaataagcatggagatctaaatgatgtacttgttagtgtattcattcatattgactgtaaaggattatttttcactcagtaccgatgtccttggaaatcttacctggaaacatgtttgcaaaaaacattattgggtctttcatctttttcttggtattacatatttgttcaataaaaattaaacaccctccctttttttgagtgagggcagggagtacctgaaataagacaatg

SEQ ID NO: 55754 - DNA, 784 bp, Homo Sapiens
ccccgcgtccgcccacgcgtccgacaaatgttccttgtgggagactttggcgagggtctgtgggtaaaagcaccagggggttaatcttggctcagtttcctaaaaagcattgattaatttaactggcttttaaatatccccttccgctgatatttgttgtcagctgcctacagtttaatatgcagcgttcacaaaacagctgccagtgctacaattaatgaagcaaaacttaatatgtaatcacaatctaaattagcatcaatactttgacattcattacattggtttgggggaagaaaagtatttctggtatgtttcattgatccccagataccttccaatctggacatgatggggctgattccagatggtttttctgaaatttcattaaggtaggtcagcgtcatttgtctctgtttaggtaaaatataaaaaccctgcccagtagcagtggcatcgcttggttcctgatgcccatgttccagaggaattcggataccacaaacagctaagacaatctcagcttttcttagacaatcttctatctcaaacttcagacattccagaattgtcatgatgtttacactgtctgagttaaaaatcctgttcaagaaaaaaaaagattttgtatcacttcttaaaaaggaatattcatagcacttgtcacaaatagaaggcaaccatgagataatacaagccagggagaggcttgtattacatgacaggtgtaattagtctgctgagccagctttacccaatgaagggcatatgtgttagagagatt

SEQ ID NO: 55755 - DNA, 560 bp, Homo Sapiens
tcatacattcatacagtatcatgtaagctgtgcaaaactttacttagactggcagtttgccatatcagttgcatttgtctttggtacaaaaaataaaacaatcgcaataatgtgcaagtatttgtcttcttccggtcaagtaccgaaatatgagttttctagagccatcttttttttgttgttttttgttttgttttttatacaatacacagactctgtggcatatatctacatttcaacatagtcctatatacattcaaaaaatctgaaaaagagttggaacaaaaaaacatttaaaccccataatttttccatctatatatcttgttttttctcattagggttttcatcatacaaaatattaccagttttagagtttccccaaaatacaaggcacaaagaatatgctttttttttcttacttgcacagacatttgtgtgtgtgtgtatatatatatatatatatatatatatttatatatatcatcttgagctctgacaatgaacatctaatatggcccacaggcacaagtgctgggtgtgccatatacaagtgagat

SEQ ID NO: 55756 - DNA, 499 bp, Homo Sapiens
ggcaaagttcggaccttatcagaaagccttgagggaaatagatattccttgttgccttttgctaatgaatcgggcacctctgcagctgcagaagtgaaccggcaaatgctgcaggaactggtgaacgcaggatgcgaccaggagatggctggccgagctctcaagcagactggcagcaggagcatcgaggccgccctggagtacatcagcaagatgggctacctggacccgaggaatgagcagattgtgcgggtcattaagcagacctccccaggaaaggggctcatgccaaccccagtgacgcggaggcccagcttcgaaggaaccggcgattcgtttgcgtcctaccaccagctgagcggtaccccctacgagggcccaagcttcggcgctgacggccccacggcgctggaggagatgccgcggccgtacgtggactaccttttccccggagtcggcccccacgggcccggccaccagcaccagcacccacccaagg

SEQ ID NO: 55757 - DNA, 796 bp, Homo Sapiens
ggcatggaggaggtcatcgtggcccaggtggaccatggcttgggctcagcatgggtccccagccatcggcgggtgaacccacccacactgcgcatgaagaagctgaactggcagaagctgccatccaacgtggcacgtgagcacaactctatgtgggcgtccctgagcagccccgacgccgaggctgtggagcccgacttctccagcatcgagcgactattctccttccctgcagccaagcccaaggagcccaccatggtggccccccgggccaggaaggagcccaaggagatcactttcctcgatgccaagaagagcctgaacctcaacatcttcctgaagcaatttaagtgctccaacgaggaggtcgctgctatgatccgggctggagataccaccaagtttgatgtggaggttctcaaacaactccttaagctccttcccgagaagcacgagattgaaaacctgcgggcatttcacagaggagcgagccaagctggccagcgccgaccacttctacctcctcctgctggccataccctgctaccagctgcgaatcgagtgcatgctgctgttgtagagggcgcggacgcgtgctggacatggtgcggaccaaggcccagctggtgctggcctgcctgcgaaagcctgctcaccagccgacagactgccatcttctgccagctgatcctgagaactgggaacttcctcaaatacggcagccacaccggtgacgccgacggttccagatcagcgcattgcctgacgatcaagggagaccagtccaagcagaacg

SEQ ID NO: 55758 - DNA, 667 bp, Homo Sapiens
tcggcgggtgaacccacccacactgggcatgaagaagctgaactggcagaagctgccatccaacgtggcacgtgagcacaactctatgtgggcgtccctgagcagccccgacgccgaggctgtggagcccgacttctccagcatcgagcgactattctccttccctgcagccaagcccaaggagcccaccatggtggccccccgggccaggaaggagcccaaggagatcactttcctcgatgccaagaagagcctgaacctcaacatcttcctgaagcaatttaagtgctccaacgaggaggtcgctgctatgatccgggctggagataccaccaagtttgatgtggaggttctcaaacaactccttaagctccttcccgagaagcacgagattgaaaacctgcgggcattcacagaggagcgagccaagctggccagcgccgaccacttctacctcctcctgctggccattccctgctaccagctgcgaatcgagtgcatgctgctgtgtgagggcgcggccgccgtgctggacatggtgcggcccaaggcccagctggtgctggctgcctgcgaaagcctgctcaccagccgccagctgcccatcttctgccagctgatcctgagaattgggaacttcctcaactacggcagccacaccggtgac

SEQ ID NO: 55759 - DNA, 638 bp, Homo Sapiens
  misc_feature (637)..(637): n is a, c, g, or t
catcactgtgatctttaaaaacctgcatttaacagtctaatttgaggctgggtgcagtggctcacacctgtaatctcaacactttgggaggccgaggcaggcggatcatttgaagtcaggagttcaagcctagcctggccaacatggggaaaccccgtctctactaaaaatacaaaaattagcccggcatgttggtgcacgcttgtaatcccagctactcaggagtctgaggcacgagaatcacctgaactcaggaggcggaggttgcggtgagctgagatggcaccactgcactccagcttgggtgacagagtgagactccatctcaacaaaaaaaaaatctaactgaagaactaagttgattttttatttgccataaaccaagcaaaagtaaatgcaataatttcgagatttatggtaaacaaatttgaggtatggataaatctttcacatattttttattgctctttagtaaagaaaggcacaagaaagaaaatatccagctctcttgtgttatctcagtgtggcgactgcagaaaattgacaatgcctgcctgtgtaaatgtatggcttactgtcaaagcttcattcttgactgcatgttgaaaatgtgattaaagtttagaggagatgttcnt

SEQ ID NO: 55760 - DNA, 985 bp, Homo Sapiens
gaaacatataactattgagttacaggggattttattaattataaaatgcaatcaatttaaattacgtaggtttaagactagtcccttggataagccccaagcgaatttgtcttcagattattaaaattagtgctgtaaatcagggtgggcaattcacagcctttctgaactgactgaactagagcttgcagtgaagtgttctgctgagactgagcaccttacagatatttttctccagaagatggtgctgggtaataaaatcatcacaattagggaatggttagtggtctctactgtggcaaatgccaactgttggaattcactttattgtagaaaaacccaaactgagactcttaagttttgtttagcaatgtgtttctggtatgaaacaaactactgtgtcactgtccaggtaggaaacaattctttcaactgggttttcagcataaatgggaactgatgtagaaggcaggatttagcccttctaggcaaaagaaaagctcagttgggtttcacgagtgttcctgtgcttatattcagtctgtgcctacatgttctcatgcatgtctaacctgatttacctcttacctgtaacctaccttatcatgtggcttttaattgacagtcactcagccatttctaagcagatatagtagtacctttcagaactcacattggcaagtgtaaaaagatgacttaaggtgaagtgaggacaaaatcacattctgcatactaacctatttttttctccctttaaggtgctaaacttgcacctcatgtccactcagtaacaagtattgggacgtagagcacagcctcactcagctctgaaaggtaatacagcctgtgaggragtgagccagcagtggcctttgcaattgtggatcttgagctctgctctcagcagatttcaggtgtaacattttgttaamtgtactgaaggkgtgtcycmagagaaagtgttcaaataaaaaastgctgcmaa

SEQ ID NO: 55761 - DNA, 722 bp, Homo Sapiens
gtagctactgtctcttttaaaaaccacgtacaaaacagaacaagtctcagttttcagtgcaacatttcaaaaaatatatatgctgcaatctaataattaaaaggaatttgtacctattatgaaacttattacattttttaagttagataatcagtttcaaaaggagtattcaggttatttaacttagtttttaaatggctgcatcagaaaaaaatgtctatttttttttattaaaatatttcatcacttgttaaaacatatttttgatctgagtttggtaaagtattattttacctgctgttgtactaccacagactgttgacttttagtttcttaaagagaaaaattgcctttttactagaaagccttcgtatattgcaatttttctgtttgggaaaatctaaggatttactgtggttagtcttacagaagaaatgtggatttgataaactagtgcctatgattttaacttatgtttgatatatagtagtaagggttttatgaatgtcgattattttgtgccaacagcccagaattgtcacttatatgtaagcagaaaacaatgagctctgcttccaaagttatttaattttctcagggtttgaatgtcatttctcgtaagtgtgttaataaaacgtgtacacgactgggcaacaaatataaatattcttagtcaaaaaaagtggagaacaacacacacacaacacaccacaaaaaacgcg

SEQ ID NO: 55762 - DNA, 701 bp, Homo Sapiens
tgaaaacatttagggacacccaaagaatgatgcagtattaaaggggtggtagaagctgctgtttatgataaaagtcatcggtcagaaaatcagcttggattggtgccaagtgttttattgggtaacaccctgggagttttagtagcttgaggcaaggtggaggggcaagaagtccttggggaagctgctggtctgggtgctgctggcctccaagctggcagtgggaagggctagtgagaccacacaggggtagccccagcagcagcaccctgcaagccagcctggccagctgctcagaccagcttgcagagccgcagccgctgtgggcagggggtgtggcaggagctcccagcactggagacccacggactcaacccagttacctcacatggggccttttctgagcaaggtctcgaaagcgcaggccgccctggctgagcagcaccgccctttcccagctgcactcgccctgtggacagccccgacacaccactttcctgaggctgtcgctcactcagattgtccgtttgctatgccgaatgcagccaaaattcctttttacaatttgtgatgccttaccgatttgatcttaatcctgtatttaaagttttctaacactgccttatactgtgtttctctttttgggggagcttaactgcttgttgctccctgtcgtctgcaccatagtaaatgccacaagg

SEQ ID NO: 55763 - DNA, 848 bp, Homo Sapiens
  misc_feature (1)..(1): n is a, c, g, or t
nttaagagcggtcggtcggaattccgggatatcgtcgacaagaggtaatccaattgatgggagaaatgaggaaaagaaaatctttttaaaaatgatttcaaggtttgtgctgagctccttgattgccttagggacagaattaccccagcctcttgagctgaagtaatgtgtgggccgcatgcataaagatgaacagagtttatgaaggagcatcattctaagaattaagtgatgtagtctttatgtttggacagttcaccagattctcaagaaggctttcaaacaactataaagcttggtgtttgtcctgctgagctaatggggaaagttatagcataaaaattgtgtaaccgcatagatatgtcatttttaaaaactggtttaacagaaatcaagcaaagtcacaaatatgttcacaagttggaattatttattgagtcaaaatgtcgaatcgaacattttgaatgaagtaagtgttataaatgaaaaattgcctgatgtttagcagtttgtattctctaaagctttttttcaaaagttcaggctttctacttactgggaagttggtggtcctcttagtccctgataaatcaaggcaatcacattcatgtgagctggatgaatttataagttataaagaccttatccttcataccttgaggatgattgcactggttttgaagtcagttgcttaatgatgaggtgagaaatgtatcctgttgctaaatctgtcttagacccttggtgaaacttgaagattcagtttataagataaatcagcatctttgtgcagtttcttttttatgcagaatggtgggaggttgttgtagcatgaacttgagatcttt

SEQ ID NO: 55764 - DNA, 923 bp, Homo Sapiens
  misc_feature (804)..(805): n is a, c, g, or t
  misc_feature (821)..(821): n is a, c, g, or t
  misc_feature (851)..(851): n is a, c, g, or t
  misc_feature (878)..(878): n is a, c, g, or t
  misc_feature (923)..(923): n is a, c, g, or t
tgagatcatagactgtagcgcaaatggaactgttgaaagttccttagaaagccagtgctgtggcattggagactacggagagagtcttctctaccagcactgcatgatctcagcctagaaatgagccaaagctgtcttccaaccagagtagcatatacatgtgtctgacttttcccctagcctgttgaacattcaatgaaaattcacagaatgaacaaattcaatgtttaaacagccattgaaatgctttcatagtgcttcatttgtaaatattttgtttgaaatgtattggaatagtatgaaaattagcgggaggtttggatccctgccttattttcatatgctgtggatacatctctgggagcttgcagcacccttctcaaaactcaactgtcatatggagctcatttgctactcaaaccatagacagattatttaacaaaagtgatataatgaccttcagtatttttctattgaacaagtttaacaacttttgccattaaacaaatacttagttatgcaaagtatttcgcttttataatcattttagttatgactaaaacgggggaaattgagctgcatcactgatgatgaactttgtgagaaattttttttttaatctgactttcattccttcagtattcttgctataaatttcttttggagataatgatgaagatttatttgaaaatgtctaaaatgtatgtatattttataaatatatattatatatattggtagaattatataatatataaactatatatatatatatatatatatatatatatataaaccataggnngcatttactgttttgnattttcattttgggagtagtatacacagcnagatatgatgagtttgatgagtgttgngctgtttgcttttgcagaataaattatagttctaagaggtttaan

SEQ ID NO: 55765 - DNA, 1097 bp, Homo Sapiens
  misc_feature (1097)..(1097): n is a, c, g, or t
gcttctacctccgcattgtaccctctgaggtggagcctttcttatcctggcccaagatccaggccctgtgctttggagtcctgggagtcctcttcatggccgtcagtctaggctttatgtttgccaactgggccacaggccagagccgcatgtctggacactgatcaggccctgctggcccaggtccctgtgcgcatgcacatggaggggtcagggccgctccctagggtccctcctgcccaacatgtggaggtggctggttcccatgaacgtggttgtcagaggcgggggacagcagaggctgcagactggcccacttccctcctccccagggatgccaagcttggatcatggccctaatcccaacccaagcccatgggaggaggaggaggaggaagaagaggaggaggaggaggaggaggaggaggaggaggaggaggccaggtcctggtggagcctttgcccagaccagtcctctctgcctcctcctggctgaagctgtttgtcaggattaccctcgggctaaagaggaacaatccaagatgttgagctaccaaagaaaacactgaaaacaacacaaaaaaaaacccggggacacaccaacttcggggggcgcacaaaaacggttacaaacagcgcccactcgcaacacaaggttccggaaccacctccctgtcaccacggggggaaaactgcgcgggaccccccaaaggaacaccacataatcgaaaacaccgggaaaccgggataagtaaccgcaacgaggcccacgacagtaacaccgcagacagacggggcataagacgacgacacaacacagacgagcagccacgatacagaaaacatcacgctgcacaacaagacacccaaaaccgggaacggagaagacaaaagaaacaacagatccaaacgaacggtgcaagaacgcaacacaaacgacatactcgcgcgaacaacgaaaaaataagcaacgaacaaaacgaacacaacacgcggaacaaatactgcacaaacaaaaaagacgacgagggatacagagaagacaatcacacagagccgtcgtcatctggcctccgatggactgcggccgactcagn

SEQ ID NO: 55766 - DNA, 490 bp, Homo Sapiens
cctttggccttttataaaaaggtatttataattcgttgataaaaaccaatatttgaagctgttgattaccaacaaaaaagtttcacactctttatagtgcttcaggatacaactttttcagggccttattagagaaaaactgattcacatgttattcttctaaagctaaattattaaaatgtaggttgaaagattggattgattgtgaatctacactaaagatatggttccaggcagacctccttagagacctccaggcagacctccttactgtcttcagtgatgtttaatttcattactgttactgggtgccaagtgtctttcatttggaagtgaacttactccagttattgaatgtttatcatatcataatttgcatttttccaacattgaaggtattttaaaaagtcactaagagattcattcttttattattcaactacaaaaaaatagtgtaatgatcagaatttaaaatgtgtgattctttttc

SEQ ID NO: 55767 - DNA, 641 bp, Homo Sapiens
  misc_feature (16)..(16): n is a, c, g, or t
  misc_feature (641)..(641): n is a, c, g, or t
ttttttttttttttgnagagacagtgtctcactatgttgcccaagctggtcttgaactcctgagttcaagagatcctcctgccttagcctcccaaagtgctgggattacaagcataagcaccacacctggctgaacatcagatattttaaagtgtagcccagagtctagttggtaaatgttacttatattgggactagtattttctaatgtttctgggatatgctccctataaaatgaaatgttttcctggaacaatgctaattaggattgcattcctggccaaagacatgacatcaaataagtaatagacatcaccagcaatgaattttgaaaagcaaaaaatactattaacctatataaccatttaaaatttaaaaaattatgttccaagtacctctattttctgagctagaagaaaccttagaggccatctgatgatagattcccagagctggatggatccctagggactacctaatctgactttctgtccactgcatggattcttctaaaaagtatgtcacttatttccctaccttattaagactaaataagtggaacatcatagagctctttatttataacagtcattctttgatagtcaactcttaaatggagacttgagatgcttaaatattgn

SEQ ID NO: 55768 - DNA, 948 bp, Homo Sapiens
aatttattgtaaagacgtgtattttatagaatccaagcaaaagctcaccagccagagataaagtgaggccagctcagggaatgtgagcagtggcgatttattccctctggtgttccatgttagcctgacacagagccccctcttcacattctcaggggctcttgatccaaaaccttttttaaaaaaaataattttagacttaacagaaaatctgcaaaaatagatttcctgtgtgcccttctctcagcttcttctaatgttaacttacataccaatggtacaattattgaaactaggaaattaacattggcacaatcctattaactacatactttatttgaattgtagctgttttcccagtaatgttgtttttctggttcggtattcaatccaggatccatatgtacttgggtctttctgggttttctgttccactggtctacttgtgcatggtaccacactgttttaattatagagactttatagtatgttttaacaactggcaaggctagtcccccttataatttttcctattgtgcttctggctattcatacatgtttgttttccatgtgaactttacctatcaacttgtctaaattcattttctaacggtacatcggtactctctatccgatcttctatgcaatattaacctgatttagagagaactaacatctttacaatgtggtgtcctcctatcccaagaatatgcagatgtattccctctattcaaggtctatttcggtgctttcacagtgttcacactcatcctggccgtcggtacgcccttcatgcacgcttactcctaaattacaccttccccacacccaccccgccctcacaacaacacgcgcgcccacatccacgcccccgcccccgcccctcacgcccccaccccacaccccccgccacccccgcaccctccctccaccccccaccacacacaa

SEQ ID NO: 55769 - DNA, 600 bp, Homo Sapiens
  misc_feature (114)..(114): n is a, c, g, or t
cacgaggcgaggtttcacctgttggtcaggctggtctcgaactcctgaacaagggagacttctaagaaggtaggagttgagcaagaaatggctgctatggttttcctcctcctngagcatcacaaccatctggggagctttcaaaaaatgaagttgctcagccgttgagaactgctggaaagcccagcttaacaagttgtttgcttgggtggactctgcttgggggtgcagcggggggttctttccagtcctggtgtgttgctgggatgaagcagagagccctagaactgttctctccatcccacttacggcaagggctgttcctctgtcaggccagtccttgggggcaatgacagcagcaggaacattctggtaagtgtgtggtttccctcccagtgagcaggctaaccctgagtataggaacttaggggaggttaggtggctgatgcatgttttccagaccggtttgtatctgcttgtcattgatcttagaagttcatattatggtggaattatctatttgcatgtgtaaactttgaatatgtttttaacttttaataaaaattatttttaaaaaaaaaaaaaaaaaaaaaagtcaat

SEQ ID NO: 55770 - DNA, 777 bp, Homo Sapiens
cacaccctgaagactgctaatttttgcatgcatatgattttcacatgaatggatgaaaatactaaaatctcttccccctggaattgtctaattgccccgaccctactctaacagcaactagtgggtgggggcggtggagactcctgccattctctgtggcaccccacttccctggaagctcagtcggcctccgtctgctcacgtattggcacggttgtcttccaaacccattgatgccggaacatgggtcaggaagaatacagtcagctctctggtgctttccatagcgttcctttttgccaggcttctgagatttttaaataacggaagcaacatctgcctctgaattagctgacaatgggaaacacacattgcagagattatcttaatgtatagcaaatcaaggaaaacaaaactttgacttaaccattggtttcagcttcctatcccaccaagccaccaacttcgtttcacttctctttcttctctctctggccccatgtgctcccttggtggagacatgaaggagcaggcaagtggcctgcagggggaccccgggatgctttgcccacttgacaggtagaggagctaaggccctcagcatggaacaggttcccaggctcacagaggaaggtggtggcaacacggagacttctcggtcacctggaacacaccccgctgtggacaccccctctgggactttttttctgcctctccccttaagattttgcaattcttttcaaaccagtgtcacaaaactttaaaaaaaaaaaaaaa

SEQ ID NO: 55771 - DNA, 1020 bp, Homo Sapiens
ctgaaggtaggaaaggagggcgttgctagcctctagcagtgccgcgtttattctaagatgtgggagattcttttccttgcaacagtttttgtcatctgcattcttccaaggcttttaaggtgcattttcttctgtgtgaaaggaaattctttgtccttttcctctcagcaccgtggcttcccaaggtagacactattttgtgcctgtmacagagagagggagtgcaggtttgcaatgctcacagacaattgattgtctgccctaatgtgtttcatttacatgtttataacgtcaatggtgctggggtgtccactgtaccattcattcccgcattcccacaagggggcaattgtctgaatggccaagtcagacacctttttgattgctctttggttgtcttttcagagcaaagagataaaggaggaaaatctgtgatgcagaaacactagttgaaaatatacagaattaaatgtcaccacaaaagcagatgttaacataagcccaaatatgctttttagccaagatgtgaaggttgaaaaaaataattcagagcagagggaaggatgatttaaaccaataaatatagccctattccccctctttacttcttttctgtctttagcaatcagaagatgaaatgtaattttccttttcatttttaagccttgaaacatccaggcacctcctcattatttgtatgtttgctgtgatttgtgaattttgtatatatttacatagctctgtttatgccaacagcatcagcttaccacttggaaaatctattgaatgactatttgggctgtggggagggtaaacttttaaaaagtaagatccaagtatttcttcatcaagcagtttttaaaaggaaaacgataataatcagtaggctccatggaagcctttgccttaatagctatgtgccaaatacttttatcttgtgtgacagtcatgtcagagtgaaatctctcaggaaaagtgtamtagtagttacaaagtaaataaaggattcattttaaggtg

SEQ ID NO: 55772 - DNA, 686 bp, Homo Sapiens
  misc_feature (77)..(77): n is a, c, g, or t
aacagggcttcaataccactcaaattcattgggaacttttaaaatatagctcctgaatgttacccaaacgtgatcanaaaggtttgtggtgggtgcctggaaattttcattttttagagggtgccaaaaaagtttaagaaaatatccttgaacattaaggggggaaatggaaaatgttcaagtcttcctaaaaacaacctgggtaatctcccataaaataaaaaatatatttatcctgttgcccaccgattctaatcctgagaagaagaagaaaaaaataccagttcataccaacatatatatgagaatattttctcttgacataatttatagtagccaagaactagaaataaagtaatgcccccctatagaagaataaatacattatggtttaataccagatattgtccagccccttaaaaagattgaactgagttaaactagatgatttgaagaaattttaatgaaacattgttgcattaaaaggaaaaaaatctgtaaaatgatagccaagcatttgtttatgtatatgtaggtctacataggattgtataaccagaaaatccagtgtatgccccctagataattacctggggaagtagggactggctgttaaaaaaaaaacaggaaaattgtctataataaaaacagcatgtgtgttatgttcttttaaaaaaaaaaaaaaa

SEQ ID NO: 55773 - DNA, 375 bp, Homo Sapiens
catgctgttactgacggggcagggtgtcatgcatgggtgcagaggatggaggctgagaaaggtagacagctacccatgatctagcccagtcgtattttagagctaataaaactgatgttcagaaagtgacatgccttggcctatagtcctaactgggctgggcctctttcctgtggttcacagctgtagtatggagattaatagactggatctttgcagtacaacacctctatgcacttctttctctgtagcacatgttacctttctttgtgaggcaatggagtggtctaggattgagcaaaaagcaatttttgttacatctttatgctaatagatttggaatttttgaaatgaaatgaccttgtttcattttct

SEQ ID NO: 55774 - DNA, 381 bp, Homo Sapiens
  misc_feature (350)..(352): n is a, c, g, or t
  misc_feature (354)..(354): n is a, c, g, or t
gggagggtcaggttaagggtcaacaacaggaatcaggtacccctgtgcttcaacagcctgcctgctcacttccctgaatgctcctccacgatttactgcttctccatctttgcttatgctatttctctgcctggagtgaaaactacccctgacacatctccagctggctggcgtagtggagaaagcttgggctttgcagtcagaaacctgggttcggatcctggcttcacaacttattatttggagaagtatttgaacaagtatttaacatctttgagtctgttttctgatctgtaaaaatggaaataatgacacctactgtaaggattaaatgaaattatgtatgcaannnanaaaaaaaaaaaaaaaaaaaaaacatgt

SEQ ID NO: 55775 - DNA, 439 bp, Homo Sapiens
  misc_feature (422)..(422): n is a, c, g, or t
gtatataatttgtaataattttgattactgattgtcattctgccaccctggagtatataatttttaattatctgattactgttattcttccatagtaggggaggtgatatccatttgcctgatacatagtatgtgttcaatacacatttgctaaagaataaatgaatcaataatacctaacatctctaatttgcagtcattcccaagagtaattattaaatatgtggcaaatttctttgcctttttacttttaaaaatctaattttgacataactgctgtaaccatccagaaacggcattgatgttgcttcacgttgctgatgcttaagcaatgtatattgtgtaatatacaatgtagtcttcaaactaatttcaacttctgcctttctgtgtactcccttatcccactgggtgatattatntggcatggtcattgtca

SEQ ID NO: 55776 - DNA, 755 bp, Homo Sapiens
gaaaaaaaaaaagtggatggaacttgtagcagagaattttatctacttctcaacctgcttcagaatacccatttgagatgttcccctggaaagatgaacacaatactgcatctgaagccatttcttcccacctaacattcttaaaatgattagagtctaaactttgtcattcattcctaattctggagctctgaggttgaggtgttcagagtttggtgaataattgggtttaagttttaacattttagtaataataaaagcaaacacatacatgttaaggcctgacaataggttgcaatacccatgcattgggactcatacccagcataaatggtgagggactgaacattagtgctttgagcaagaattggttaactacctgagatctctaaaacagtaatttgaattactaatacataaaccacaagtctcttcgaattgttaattgcctaaatttaccctaaaacttagttaacgctgcagtgcctttgttaaagcttttttttggggggggggtgggcacagctactccataactttaaattttaaagcatgaaggtgatctagctagtgttagtgcttgagttggtagttacataggctgctcttgaatcgtcctgttttctttgcctagtattagcaccacaggtacatatttgtaaaataagcattaaaagtactttgtccagctaactcatgttggagtgacctttgtcttactaacctttggtactaaacttggtaattagaataag

SEQ ID NO: 55777 - DNA, 538 bp, Homo Sapiens
gacaataactttgttgtgccaactttggatgaaaatatatttccaaagcagattagtttgcggcaggcacagcagcagcagcaacagcaacagggaagtcgccctccaggcttgtctaaatctcaggtgaagctaatggacctggaagactgtgcactttgggaaggaaaaccaaggacatacatcacagaagagcgagcagatgtatccttaacaactctacttacagctcaagcatccctcaaaactaaacctatccacacaatcataaggaaacgagcccctccctgcaacaatgacttctgtcgactgggttgtgtatgttccagtctagctttggagaagcgccaacctgctcactgccgccgaccagactgcatgtttggttgtacttgtttgaaaagaaaagttgtacttgttaaaggaggatcaaaactaagcattttcagaggaaggctgctcatcgagatccagtattttatgatactctgggagaggaggcaagggaggaggaagaaggaatcagggaggaggagga

SEQ ID NO: 55778 - DNA, 930 bp, Homo Sapiens
  misc_feature (898)..(898): n is a, c, g, or t
tgaaagtcaaaactggaattttctaaagctttggagaaaaggagagaattagtagggcaagatcaaagcatacattggaaataaacagtagaaataagcaaacaatataaagagacacgggaaatgcttctcgtgaagggcaaatgtaacaccataacagtagggaataaactgtgtcccacctgtttacttgtgtttatttgttgttatgatgagtatgcacctaccattttcctttattgtgatcactaaaatgaggccaaggtttaggaggtgagaaaaagtatcccttttacggattcagttcctgctaggatgttgtatcagaatcatgtgagaactcaggaagagatagagcagaaataaaaaggaagaaaatgtagattagaaaataagacttctgagaaaaagttcaaggaataaagattgtttgactctggagaggagaaagctgttgagatagtttgctaagtttgctaataaagctttattgagtcttttattgaagggttcaaagtaagaaatactatgccatagtgttctacatctctagtgaagacagaaccagagggactacggctcttcgttttcaagacagcatggcaagttcacgatttaggcacctcttgagaaatctccatatatcttctaaacaagaccttgctcacattttacgggattaacattctaacattacgagtctcccgatgactttaagggtcctcttccgcacattattcccggtcgcctaaggctcaggcccaggtcatgggttatccattgaaatagccaacactggtgagaacgagcagcggaatcggcggcataaccgcaacgataacgtctaagatgtctagagcacttgcgcccggaagagatatccttggttatctttccngctgctagagcctatgaccagtacaccacgcc

SEQ ID NO: 55779 - DNA, 565 bp, Homo Sapiens
cgcgtccggttgaaaaagatgtaaataaagcaaaaagacagattaagaaacgagcgaacaaagcagcacctgaaatcaacaatttaattgaagaagcaacagaatttatcaagcagaacattgtgatatccagtggatttgtgggaggctttttgctcggacttgcatcttaaggacatgaatattctcccataacggattcaactatgagaagagaagtggcagcaataaggcagtctctcaaaagtcatactgccagagtctctagggcaaggagaaacaactagctggacaatactcaattcacaacttagcattttgccatctgaagcttggcaaactagtatctgctgtaaaacaacctatatggtatgtgaaccgtagtattcctgagcaaaacgtggctttcatcgctttgtaaaaatttgcatctgtttagaaactagcctataaaatatcaccattggatgtagatatggagagaaaagaaatatgttgggtttattgcttagcgaaatattctctttttatttaaataaaatgttcttcattgtgaaaaaaaaaa

SEQ ID NO: 55780 - DNA, 769 bp, Homo Sapiens
tggacgctgtctcaaaaaataaacttttatgaacatggttgtacatgtgtctatatgccttaggttactgttcctaagagaagttataaaatgagaaattaataaaaggattgctgggaggacatgcaccttttaaattttgatattactgccaaaattgcccttcaagagtttgatagtatttttccatatttttctttttaatttttgctaatttcgtagacaaaagatagtctcttgttaaaatttgtatttctttattagtgaggttgaatgtctttttatgttaactgaccatttgaatttcttgtatgacttttgactcttcatatgctttcttcattgtttcttttctctttggtttgttgaagtttttttgcacattcccttaagtttggcagtctaatctgtatctttggcataaatattttaaaacaaaaaatgctggccgggtgtggtggctcaggcctgtaatcccagaacttgggaggctgaggtgggagtattgcttgagctcgggagtttgagaccagtcggggcaatatggtgggacctcatctccacaaaaagaagaaacagcaaaaaaaaaaaaaaaaaaaaaatttttggggggcctggcccgaaaattttcaaaccctcggtgggggcggccccatgttggaacggccagggtccccgggaatccgggccgcgggcgggttccccataaacccgggcccgcgttcgcaaaacccgggggtcggggctcgggctccacaggccggactcc

SEQ ID NO: 55781 - DNA, 404 bp, Homo Sapiens
aattcgcggccgcgtcgactacggctgcgagaagacgacagaagggcacttccagggcactgcattgaaagtcagctttggtttaggctctgccaccaattatgtgaccttggacaaatcccctcactcacaagcccactttcctaaactgcaaaatgaggtcaggggtggtggacccttagtcctcagcagagtcctgcagttcctgtgtccctggagcccgttggtctccctctgtaagtctgaccttgggcagcacggtgtctttgcccagagcggttctcattcccttctaaggcagtgtctgtcactcatgccttttgggagctggggctcctatgtggactctgatttaagggcataaggcctgtctcttcctacccaatagaggtttcctaaaaaaa

SEQ ID NO: 55782 - DNA, 697 bp, Homo Sapiens
acatatatgaggaagctgaggcgaaaaagagattaatttgcccagtactatacaactgttaagtggtagagctaaaatgcaaatgtaaataatctgactccaaaggctgtacttttttgtactagaatatactacctctttactataccataacctctttttttcttgtcactcttacagagcaggatatattatttgttaacttaggtatcttgtggcctggcacctataacttttaagctatcttaaagtagattgttcttaacagataaattggtgattgttcaatgtattttcttcaaatcctataagaagagaaaaatctgtcatgatgggaattacatttattttttaggttggtgaatgtcattgttggctccatgtttagatttctgtataatttaaatttacattggcataaatgtaatttttttattatcagtttggatttaggtggcgagtagaaaaagaagtaatttcaggaaaaggtcaatttttctgtggaaataaatattgtgataaaaaagaaggcttaaagagttgggaagttaattttggttatattgaccatggtgagaagagaaatgcacttgttaaattaaggttatgccaagaatgttccattaaattaaatttccatcacaaggagaaaagaaatcaaggtaaaaaaaagataagataaaaccaaaaaagaccg

SEQ ID NO: 55783 - DNA, 665 bp, Homo Sapiens
ccacatatatcattgcagtttatgaagttgcagtgaactgcccattcagctaaattgcagtgtttattcttgtctcatgtcgaaatacaacaatcttatgggaaatattatgacagtccgttccaactgttctcagacacatgcataaacagtctctgctcacattccacagccacctgcatgttatccatacagctccctgagaagtccagggatgggaggtggggtgtggaaggatggagggtccttcattttctaaacactgtgtataagtcactactcatcgtgcctagcaagtataagattaacattttgaataacaaactggaaaacaaataatccttcaaagaacctagcgaactgttcaaaggaaattttaatttcagtctaccagaaaagttaaatctgttgttggacgtagggggctttcagaaacatgcctcttatatcaatttccactatctttcaagttacctaaaggcaccaggctgcttgagcaagaagaataaaaggcctagagtgcaaattatgtgaagtagagtatttagattgtgggattgtaataatatgggattctcatggttacatcatggttaaatcacactgttcagtctttaaaacttggtggtttacaatttggtctcattgtgaatagccagaaacaa

SEQ ID NO: 55784 - DNA, 522 bp, Homo Sapiens
atacagatcgtttctttgctcaagggagtgtggatttcagtgctctcactgagcagaggctgagggtgaccaccttggatcttcctgcaggacacagcccagagaaactgagcctgaatttgctgccatgttttgaggacattatccacgctagtctctttcatctgggccgaggtgggtaattttccttagagtcaagtactagaaaaagttttgcttcttctaagagctggtacattgccctcttgtgaatgagagccatgtatgtgaccacaacaccctttcagttgaccactaagagactgaaggccaattccggatcaactttacagccgcctacggcctgctataccacccatggcatagtttctgtggtctgatgctttattttttattgcattttactaatttatggcatgcatatcatatgagcagtctcaaatcctccccagaacaaggtgaggaatatattaatatttaaaataaaataaacaaaatgtcagtgtgaaaaaaaaaaaaaaa

SEQ ID NO: 55785 - DNA, 459 bp, Homo Sapiens
gcgtcgatcaagacttaaatgtaatatggctctggcaaattctgagatgctaacaaaaacaagttttcttaagaacaatgtcaactgactcacagtatccgactatataaagtcgagtgctctcatgccaggaagctgatacagttcatgaaacctcagtcattctttcgtattactcctgtcttctctttggaaaacaatctcatgaatttggtcttgacgctgacttaacatcccaggaaacagatactcaattccactgtcttttttgagaaatgaacagttctcaaactttgtttaaatttccttttcacagatgagtaataaccaaagatatttctgaaagggctctgaaaacatgcaggcaattgatctttaaaaataagatagaaatagtaggttttataaaagaaggaaatagaaatacttcagaagacataaagtgtgctgaatcatgtt

SEQ ID NO: 55786 - DNA, 917 bp, Homo Sapiens
ctttgtgacgaacataaagagatccttaaattatgagttgttggcttatcttcataaataatttgtctgtaaaatggatgaaatgaaaagagtttcaattaaaacctacttttttctagtgctaaagaaaagatttaagcaccttgtcaagctgggtaaataggaaaaatacataatcatgctcagatatgtatctaggataattataattaataataatcatagtaacaatggctaatgataatttagctttattatatgtgctaagcactctggttttacatgcattatcttcttttgttcttgctacaaccctgtgagatagtagtattatctcattttactgatgaagactgaagcctaggtatattaaatagcttgcccaaggccacacagcaaaagtcaccaactcaaacctacttcttatttactccaaagcctgttgttcttaactgcaacatattatttcgtctcattaatgttgattctataggttgttacttctaaaaattagtattgagtttaatggtgaacacatttttctattttctcttgaatctgcttctataatgtcatggtgatttatgtggcttttttttttttataagttatacatgtatgcatgtatacttatgagacctcccttggaatgagggaggtctcaagagatataatttagattctcattgatggtctgtattcattatcctaacaccctctggaatgttaaatcaactaaattatttccgcaatagggagacaaaacaaccagctttcataaattttttaattgtcaaaaacaaaaggaaatccgaaataagggatcactgaagaattttaaaaaaataaaaaagggaagtaaaaaattttaccattaaggaagataatttaaaaataggataattttttttttttaa

SEQ ID NO: 55787 - DNA, 880 bp, Homo Sapiens
cacaatatcatttaatactcacagtagtacctgtgaaatatatcagatggatattcctatctctattttacagcagaggaaaccgaaattcagagaacttacatttctaaggttgtacagctgcaaaatgaccaaattgtgaagtccctaacatccaggttttcataatgccagtactctttctatgacatgtttatgaccctccaaatgtaccaaaactacctaactaattcactgagaggaagccaactgcaaaaataggatttttaaaagtacaatagagtattactacattttatggatttcagacaaagaaacctccgtttattatatcctgatggtgagtattgccagctctaaattattcatatttctaagaccaaggaaaatataggtaaatgaaaattttgaaataaagaacaatgccttaatttgtaaaatctatcattgctaccaccctgcccaggtctggccatttgccataaatgctggtaaataaatacaatgactgatagagttctgtctcctttctcttttgctacccaaccttggttagagcaaccaaatgtctaaaaggcatgtaacaggagaaaaaaatataaacattagtcaccaattcgccgattatacagggattgtagattcctttaaattattactgaccttttgaaagccttcacgtaagtatgcaccagattaaatgactcatttatccacaacataatctaataacagtcctaagtacatgtggaattcctggtatttcttttatacaccttaaaacttctggttccaaattcttcctttcctcatttatcggcactttatttatcccggatacactttagacacattttcttctggccattttcttcccaat

SEQ ID NO: 55788 - DNA, 1058 bp, Homo Sapiens
  misc_feature (648)..(648): n is a, c, g, or t
  misc_feature (676)..(676): n is a, c, g, or t
ctcagaattctttaagactgttttaattgctccatcagtaattttgaagcactttcctttttttttttttcccctttttgtccctttccccaagccaccaattggatggatgaatgtttgacggggaagaggaagggtaggaggatgcatggatgagtggatgagtggatcgatggatgtattgataaatagatagaaccagtcatctgaagcaacttaagaattgtagccttgactccttgagactgtagatttcgatccaggaaacatttatttagcacctgccagatgccagaaatttataccatttaaaactcagtaagtcttttaaatatcaggaaggagagaagcgacatcatgatacatcctatgggtattaaaaagccaatagaatattatgaataattttatgctaataaatttaacaacttcaacatcataaacaaattccttgaaaaataaaaagtaccaaaattcattcaagaagaaatagataccagcctgagcaacatggcaaaatcccatctctacaaaacatcaaaaaaaaaaaaaaaattggtcgggcatggtggtgcacacctgtaatcccagcttgtcaggaggctgaggtgggaggatcacctgggcccagggaggtcaaggatgcantgagccatggtctcaccactgcactctnacctgggtgacagagtgagaccccgtctcacaaaaaaagaagaagtagataatctggatagccctatatctatagaaaacttaatagtgctggggagatataaggaataatatccctcattttaccgatgtggaaaattgaaggctcagagaaagtaaagtctattgcttcaagggtcatgtgggcttaaaatatggccagagcccctggattcccaatcccgggcctcctgaatctttattcccagggcccttttctaggcaaacccatggttgcccccaaaagaatggccaccttccttaattttacctaaaaaaatttggttcctggcccaaattttaaattttttccacctttacaccccatttttttttttttaaga

SEQ ID NO: 55789 - DNA, 328 bp, Homo Sapiens
ttgagactgagttagactccatctcaaaagaagggctcctgtgtctacgtcatggtggggctagagagaggtccccgcagctgggctgtgttgagtgagggctcgtctcttcagcgccaggcaatagtttgtcttgtctctgtcccttttctgtgtccacatgacatttacatcttgcgagttgcataatttaagttgtttatttacattatacatttaattgcattctatagcgatgctatgttgaatgtattctgatcggatcgtttatggttatttacaatgcagttactcttgaagattattgttagaggtagactgttgattt

SEQ ID NO: 55790 - DNA, 582 bp, Homo Sapiens
agttcttcactgagcatgtgaagaaactgataagatcaaaaaggtctcctaactcactagatcagcgcacaagtcagtgtaaaccacttagatagtagttttttcataaatgctcatcatatttatgttccgctgtacatgttcagtataaatatatgtgtagtgaagctactgtgagtctttaaatggaaagagcaaatgagaagtggtttggatacacttgatgagagatgagagtgtcacattaataatttttaagactcttaggcagctatgggtttcttttgatcatttttgttctttattcatttgaacacgtttttgaagttcttcaaaactagtcagtttgaattttgacagctattcaatatgtgatctccaagtttaaaaaaatttttttccagacttccctaatcctaaaatgcgagtttttatttttaataactgtaccaaggaataagtatgaaaacagttctctgttaccatattttgtattctggaccacttactggtgaaagcaaccatgcaaaagaaattaatttggccaggcacagtggctcatgcctgtaatcccagcacttt

SEQ ID NO: 55791 - DNA, 494 bp, Homo Sapiens
  misc_feature (117)..(117): n is a, c, g, or t
  misc_feature (128)..(128): n is a, c, g, or t
tgagccaccgcgcccagcccttgctaacatttttgattcgccaatatgttttgtaaactagaagaataacagaacactgcaactttagaggttttctctcttggtcctaccttgagnatgtagaaagntaatgtaagcttttcttctgctgcttttaagtaagaccctatgcatcccctcctgtgtttcagcccactggggcattatgctgtaaaggcttgcttgttgcttttagttgagaacttttgcaagattgtcagtgtacattttttatgccacttggaaacttatgtgactattcacaattgttatcaggttgttggggcctttaccataatcttgtacttagaagcagagttctggttttgttggacttcagactggaagctgtgcctgtgttctgcaaggataacctccagaaagaattctgtgaccctgatggtcttgatgattttgtgccaggttgtaattgacatcactgtaactgacaatgc

SEQ ID NO: 55792 - DNA, 737 bp, Homo Sapiens
ttaaaaaggaaggacttttgcggggaggggttgagattgtactttctaatttcgcttgcttcagacttgactttggaatgaagttcgaaggcatcacaattgacctggacattccaaaaacaaaactgaagaggcagcatttctcttccgtagtccagtcagctcatttggtagatgcgctttttcctcctttgcgcttattcatccataaggatatataatttgcatatatatttcatatgcgtgcatatgtgtgtgtatgtgtgaactggcaggtgttgatttcataaggacaaaattgttctgcaaaccttgcaccaattatggggtgtttcaacggaaaaacttcaccaaatgatctgtgtgttctttcaaagagaagttatgtctaattaaaatgtgtaacggaaaaaaaaaaaaaaaaaaaaaaaggacgcggccgcaagcttattccctttagtgagggttaattttagcttggcactggccgtcgttttacaacgtcgtgactgggaaaaccctggcgttacccaacttaatcgccttgcagcacatccccctttcgccagctggcgtaatagcgaagaggcccgcaccgatcgcccttcccaacagttgcgcagcctgaatggcgaatgggacgcgccctgtagcggcgcattaagcgcggcgggtgtggtggttacgcgcagcgtgaccgctacacttgccagcgccctagcgccgctcctttcgct

SEQ ID NO: 55793 - DNA, 640 bp, Homo Sapiens
  misc_feature (585)..(585): n is a, c, g, or t
tctcagcatccgcctggagctcgtggcgctgtgtttccgtgctgtggagttgcctggtccgcttcctccccgcgaataagaataaaagattctggaggagttggagaagagtgtattcagcccccaaaccacgagatcaacaaagaaatgcacaattttgaggaagaattaacttgtcccatatgttatagtatttttgaagatcctcgtgtactgccatgctctcatacattttgtagaaattgtttggaaaacattcttcaggcatctggtaacttttatatatggagacctttacgaattccactcaagtgccctaattgcagaagtattactgaaattgctccaactggcattgaatctttacctgttaattttgcactaagggctattattgaaaagtaccagcaagaagaccatccagatattgtcacctgccctgaacattacaggcaaccattaaatgtttactgtctattagataaaaaattagtttgtggtcattgccttaccataggtcaacatcatggtcatcctatagatgaccttcaaagtgcctatttgaaagaaaaggacactcctcanaaactgcttgaacagttgactgacacacactggacagatcttacccgtcttattg

SEQ ID NO: 55794 - DNA, 480 bp, Homo Sapiens
ttatcctaagaattctgagcacgcctcttctgagaattgcttggactgtctttgaactctgcacctccttccaggccatcttgtgagacttggtgttaatagctgaagtcctatctgtaccaacaagcaaggccacttttcagaagataagagttcactgaatgcacctattataatctgtggccccagcagtataattcttttatctttcaaatgttataattgcaaaaaatctcaatgtccaaaagggaatgagtgaaactaaattaatgagaagaatattaagttactgaagtgtatatgcgtaggggcgtgaatgtgtgtgtatataaatatgtattaaaactaggcccagtaaccttgtacttacccagttccatgccgctacactatttttccacattttcatagacctattgaaagatgatggctcctttgtggacataatttagcaatgtattaaattaaagtcaatgtaga

SEQ ID NO: 55795 - DNA, 394 bp, Homo Sapiens
taggagtacggcacgaggcacagtaatgggcgctcggcgctgtcgtcggtattcagcccagctgcacatctgaggcttggcagcttctcatagcgccttatcctctgccatacagcatccatctggagccctgtcttttaggatgagtggctttagggtcgggcattaaaccttaagcttcagtcgccatctgtgatgtaagtgggaggagagggtataggaaagagctctttctgtgtcaaatagagttgggcttttcttgcaattgattatgagccagatgccacatatcttgagcaagagaaacggctgactttagtttgaagcgtaaataatagatattcgcacatgtcctctctagtagcagcccacacattgaatttcaacttataaa

SEQ ID NO: 55796 - DNA, 509 bp, Homo Sapiens
cagttgaaaaccatcacattacactcaaatgcacatgttttttctcactccagcagaaacatctgaaagttctgtttaggtatttgcaaagaactagtatgcctctcagatagcatatactttaggcagaactgctcttgtctaacttatttcatgtgacatgcagtggagggattgttgaatgaaatgttagtgtgagtattccttaggtgttattgtgtcttgggtttaaaaatggcagatggagtcaagacaagcctgtccctctttctgtctgtgtcaggctttgccgtctgttctcttcctggcttcactggaacagacatttttttttatgtatgtgcacagtgctagtgtcacaggatgacatgacatgctaccaggactgcctcactgtcaggatgggtccagtgactctacaagttcctttttgaaatgggaatctggtctagatttttgcacatctgttagcttcttcacataagtccaagtctttctcacatgctaat

SEQ ID NO: 55797 - DNA, 922 bp, Homo Sapiens
aaggccaaggttattccagcccagaattcagcagatctgcccgagtccacacttttgccaaataagtgttcaggaaaaactcaacctaagtatttgaaacataaccatatttcttccagagataatgcagtatctcacttagctgcacattcaaattcatcctcaaaatgtcccaagctgcctaaagcaaatatacctgtaagacctaaaccttctttccagtcctctgcaaaaatgacaaaaaccagttccaaaaccatagccacgggtctaggaacacagtctcaaccatccgatggagccccacaagcaaagccagtcccagcacagaaacttaaatcggccttgaatttaaatcagccagtttctgtgtcctcagtttctcctgtaaaagccacacagaaatcaaaagataagaatatagtttcagctaccaaaaagcagcctcagaataaaagtgcatttcagaagacaggacccagctccttgaagtctcctggccgtaccccactgtccatcgtgagcctaccccagtcttctaccaaaacacaaactgcaccgaagtcagcacagactgtcgctaagagccagattcaactaaagggcctccagaagtggcaaaccagcttcaatcaggaaaccaccctcatctgttaacgatgcgatagtgggcataaaaaactatggcgacagaaacggagatgtgaccttatttgtgcgtgcggggtagaaaccttaaaatataatatatcccttttatcaagcaaaggagactgtggttcttccttttaagtcctctatggttggtcaatcgtgcctcgttggctgggctcggcccgcgggtccgcatctattgatctggaacctgcaggaacggaacgccgtatcaaacagtaatggacacccgaagcctccagaaata

SEQ ID NO: 55798 - DNA, 496 bp, Homo Sapiens
  misc_feature (462)..(471): n is a, c, g, or t
  misc_feature (473)..(479): n is a, c, g, or t
  misc_feature (481)..(482): n is a, c, g, or t
  misc_feature (489)..(489): n is a, c, g, or t
gggggaggtaaagagaaatggtagatctgaagaggcctcatcagagcacatattttaggacaacacatatggaaattggacatctttaagttggtttccatagagctatgcatgtatccttacccccatgggaaaatgttggtgtgttctcaagggtatgcatgtgtcattttgaagaccaaggccctagaattgtcaaacttaaggatcataaaaatcatgagggttgcttgttaaaaatgtccaaacgtgcagagactgatctttgagatctggaccaggaatttgcatttgaacaagtgttcctggaatctctatgcaagttttatacagaacatacttttggaatccttgccctagacaggggtgtccaatcttttggcttccctggtccacaatggaagaagaattgtcttggaccacacataaaatacactaacactaacaatagctgatgagccnnnnnnnnnnannnnnnnannaaaaaanaccttgt

SEQ ID NO: 55799 - DNA, 854 bp, Homo Sapiens
  misc_feature (786)..(786): n is a, c, g, or t
cctggcacaccgtcgctggaagtctgaacgatttcagctaccttcatacaaactgcttcgaactgtccatctacgtgggctgtgataaatacccacatgagagccagctgcccgaggagtgggagaataaccgggaatctctgatcgtgttcatggagcaggttcatcgtggcattaaaggcttggtgagagattcacatggaaaaggaatcccaaacgccattatctccgtagaaggcattaaccatgacatccgaacagccaacgatggggattactggcgcctcctgaaccctggagagtatgtggtcacagcaaaggccgaaggtttcactgcatccaccaagaactgtatggttggctatgacatgggggccacaaggtgtgacttcacacttagcaaaaccaacatggccaggatccgagagatcatggagaagtttgggaagcagcccgtcagcctgccagccaggcggctgaagctgcgggggcggaagagacgacagcgtgggtgaccctcctgggcccttgagactcgtctgggacccatgcaaattaaaccaacctggtagtagctccatagtggactcactcactgttgtttcctctgtaattcaagaagtgcctggaagagagggtgcattgtgaggcaggtcccaaaagggaaggctggaggctgaggctgttttcttttctttgttcccatttatccaaataacttggacagagcagcagagaaaagctgatggggagtgagagaactcagcaagccaacctgggaatcanagagagaaggagaaggagggggagcctgtcccgttcagagcctctggctgcatagaaaaagggattct

SEQ ID NO: 55800 - DNA, 583 bp, Homo Sapiens
gactggctccaggccatgtctaatgaccagctcgattccctgtgcagttcagagagcaagtgaacccaaccaacaatgtcgtcatctaagccctgaccctagccagggactcccatgctgctgttggctccatctctccacactgcctctttcttttcaactttttgcccttcctttctttaaagctattctcacattgcttttatttcctcctccttcacctccaaccactgtcagcagcactctggagttttcaaatgtcacattagcctcaccctgcatgctaggagatggacctgtctctatacagcagtagatgattgataagtgaggaaactgaggcttacagaggttgaagaccaacaagctaataaataaaaagttgaggccgggcacggtggctcacgcctgtaatcccagcactttggaaggccgaggcaggcggatcacgaggtcaggagatcgagaccatcctggctaacacggtgaaaccccgtctctacataaaaaattagctgggtgtggtagcacgcacccgtagttcctgcttacttggaggctgaagcaggagaatcgcttgaac

SEQ ID NO: 55801 - DNA, 406 bp, Homo Sapiens
gtcgacctttattccaggggatggggctctgacaggtgaaacacagcatttgtttaaacagaatagagaaagtctgcaaaacattcaagggcaggaagtagcaataaatactcctctgtgcaactgaagcagcacagagcttggggtgagcagaatgtcatcactcaaagtagaatttggccagggcctcccagggtcccaccaagggatgcagtgaactttctaaaagtcaagacctctgtcttatctcctccaaaagatgagaaagtgagatgtgaagctcctttctggagatgggatatgtttttcatggtaggttctgatctcttttgcaggctttgagcataagaaccaagggcacaaaaatagctccttgaggaaaaaaaaaaaaaaagtcgacgcggcc

SEQ ID NO: 55802 - DNA, 392 bp, Homo Sapiens
ccgcacactggatgagaatccatcttccattcgagctgggaatagactttgtgaaagatattatgtaatggagtctcgggaaccctgagacctctccagcgaagctgaagtgaattaattaagtgctttaaacggtcttggtgctgtgttacgggagagagtgactggaaagtaacaaagctgaatctttctccctggagtaaggccgaagactggattactacacgcctagacgtgacactacacccatagatctcatgcatcattaatgccatatgacattgccattttctttctcagttcacggacaaaagtggtgggttttcattgtcttcactgattgtcaatgcattaataaagaagatgtgtggtaaaaaaaaaatcgctaatcg

SEQ ID NO: 55803 - DNA, 522 bp, Homo Sapiens
  misc_feature (522)..(522): n is a, c, g, or t
ggggccccagaaatagcatatacattgcgccctaagtccagtctcgcccaggtgtggcaggagcttttacctgctcttcggcagtagccggctgccactcaaccccatgcctgactgagctgtggtagaaggattgaggccagcacagaggaggatcagcaggaaatgtaagggttgtcctcatctaatccgtcagtaccagacagtgaacatctctcccccaggatgctgagggagggtcctggagggaaggatgtggaactacagcctctgctctcaagaagctcagatctgggcagggaacatcacataccagggctgtctgtcgggggggtggagggctgggggagggatagcattaggggaaatacctaatgtaaatgacaagttgatgggtgcagcaaaccaacatggcacatgtatacctatgtaacaaatctgcatgttgtgcacgtgtaccctagaacttaaagtataattaaaaaaaaaaaaagcttcagatccctcctggagcctcctatn

SEQ ID NO: 55804 - DNA, 583 bp, Homo Sapiens
aatggatgctagccgaacaagtcgtcatctggaggaaactattaacaactttgaaaggcagaaaatgaaggatataaagactatattttctgaatttatcacaatcgaaatgttatttcacggcaaagctttagaggtctacactgctgcctaccagaatatacaaaacattgatgaagatgaagatttagaggttttccgaaattctctgtatgcaccagattattcatctcgtttagatattgtaagagcaaattcaaagtcacctcttcagagatcactgtcagctaagtgtgtatctggaacaggacaggtatccacttgtcgactaagaaaggatcaacaagcagaagatgatgaggatgacgagttagatgttacagaagaagaaaattttcttaagtaaactacacatttccattttcatcataaatgacttgaaatccacaatgactaaattgtagaactttatactcactttgctatgttaagcctcaaagtgaagtccaactggaaacagaaaaataattaaaggaaacttatgctgaccaaaaatgaaggctttaaaaaatattgcatacca

SEQ ID NO: 55805 - DNA, 659 bp, Homo Sapiens
cggcctctcaaagtgctgggattacaggcgtgagccaccgcgcccggctgccttcacctcttaaggagctctgagactccacttctgagagtccctgcggcctcccacctccctgcctttcaaagctctctcccccatgacccaggataaccctatgtctcctcccccagaatccttcagtggctctcatcaccttcaggaaaagcccaaactccttccaccctccaggttcctccctccccacgaggctttgttctcctggggttgcttcctggaccctgaacaagttgtgctctcattggccgggcctggccagcagtgcacagtgcctggcaggttgactctaccatccccggggctggccccgctctcctccgagacccaggctgagcccagtcccctcacccttccttgacttacctccccacctgaggctgactttggggttcccagacaccctacccacacacatgccttgatcatagcacttgcctgcgcttcttcagagtcattaatttgcttctcggcttccccactggactgtgagctgcctgaggtcagggattgcgctttggatggtttccagcctgagcctggtgcttgaacagacgtgtgcaataaatgctcgttaaatgatgaaaaaaaaaaaaaaaaaaaca

SEQ ID NO: 55806 - DNA, 661 bp, Homo Sapiens
cgaggtgctcaagaggatcccttcgattggcgggcacttagggagacccgatctctacaaaatatttaaaaattcgctggatgtgatggcacatgacgggttccagccattccagaggctgaagtagaagggacactgtgagtctcaggaggtcaaggctgcagttgagccacagtcatgccactgcactccagcttgagtgacagagtgagaccatgtctcaaaaacataaagaaaggcagcttcaactcatgcacggagcacagaggttactgggaacggcaggtgcaaatatctcatgaggagatagaaagttggcataatttggatgagaaaggctactatggctgcaatatggtgagggaggaggttggagcttcagaagcaggtggaggacagatgtgcatgatttagagaaccaagggaaggagttgggtttttatctgaaatctgatgagaaattatgtttgcaattgatttctcatcagattttactaaaatacagagaatcagtaggaagggtactagctgtactctgatagatctctaagtactgcaaatggtgctaagtgctttgtagccgttctcttatttaatccttagaacaatcctgtgaagaaccttctaaatctgatggtatatatggctgtaagttgccgcc

SEQ ID NO: 55807 - DNA, 895 bp, Homo Sapiens
aattacattttcaagtcatttttgacacatcagtgctgcatctacttttctccttttagcacatttgatattgatacttcagagaaacttttttaactacccttaaaatcttgtcaatgaccattaactgccaatcatcacctcatttgctttttttgacaacatactactagaaacctaggctgtgagtgtaaaaccataactgttagaatcatttttttggcaatagctcacattctgttaagagtcatttgctttaatcaaagatcatgatttattatatattttttataagtagggatggggccaagattattcctttggcacagcagtaagtgtgctcaagatctttgcctgtaagcttgaatatttggcttaaattttgtgcatatgaatactgttaaaggtatatttgactacattttgaaaggaaaaaggtagtcctgctaaaattgacatttagggatattttaatctatgtatttggtaaagtaattagtgaagtattagttataaaaattttaaggaaaacatttaaaagcaaaatagtcgtatcagataaatagagtagaatacactaaagataaaacaagtctctgttacaaatgaagttgtctgtacagacgactgagatattttaattttatttacataaaaatgctgttcaatatctaatgatttctgttggttgtattctgcactttagagtaataaaataagtttgagtatctcattaggtcactttcaaaatgatcatttcaggccactgctgaatataatggaaggtttggggtaaataggtttgcgtcacagccccctgtggaaattaccagccctagatgaagagcccacccgcctgtgtacagaacctccttttttttttttttttttcatt

SEQ ID NO: 55808 - DNA, 624 bp, Homo Sapiens
tcagctgacagtcctgagggccttcccaagggcctggctggttcttcctcaggccagcccttccctaagagccacacttgctcatttgcatttgtgatgtgtgtccaaagctctccttccagtaacgtggcccccttgtcttcacctttggggctcataggcctcctgatttgtcctgcctgtctcaagtttaactttgtggtggtggcctaagggaacctgacactgactccttctaggtaaagtccacaggagaggcactggtgcaaggactcatgggtgcagcagtgacggtgagtactgcccagcacatccctgcccctcctctctcccattccggctctgtgatacatgtgttactgacttcacatcattttgtagccctaacctggaaacaataatctaataataaggctgacaatggttcagccctaagtgtcttgattccaaaaacctcacttcctttattttttcctgtcatcaggagatatcactgactcctgggaccctggtatatcaagtctctgtatcatagccacactgcaccttgcaaaactggatcttgggcaggtgcaggggctcatgcatatcaatctcaaggattgggacgatcgctgagccagg

SEQ ID NO: 55809 - DNA, 654 bp, Homo Sapiens
aatctagaacccctgtagctttttgatgtgttttatttcttatctctttgaattcctgttggttacttggcttccaatggaggtgaacttaacaaccatacttgaatattccgtcttgactttgtaaactgtggctacttgaaatgaagtttatctggggttgatggatgaatggtagatttttgcaatgtctcaaggcaataggatgtgtattaaactgtagatattcttagtacagtaaatttatgctgataattttattttgtataatttttacctttttgttaatattttttccttccactttattggtttgcctcctgagctacccctccttaccctcccttctccctcagtgtttcagtaaatttaatttagggtgcctagaaattgcaagtatgtatcctttttgatttgtattttattataatttacacaaacaactgggtttgtgaactgtattactcctggtatctttaaccactattgtgggtgttttaactaaattttatcatttatttttttggcactcaagagaagaaaacaaaacaaaaaaaaaagaaataaaaaaaagaacacaaagcaaacataaccaaacaagaagaaagaacagagagacgatcgaacgaaataacaacggaaagaaagaaaaca

SEQ ID NO: 55810 - DNA, 489 bp, Homo Sapiens
cgaaagagtaaatttccctgcactttccttttactcttctctctctctccctccccccaactttttttttttaaaccaacaaaccaaaaaaggccacagagttaattagaggcttctcatctgccttggtcctgagtgttccaggagctctttggtttggcttcttttgatggaggaatcctgcttcacagactgagtggcaggcctcctcctgagggcagcccctggagcaccaggaagcgttgccgctggctgtgccctcccctggcactctgactgcatgctgatgagcaaggcaggcaggtctgagaggcgaaacgaatctcccggcagtgcttggaagtgtctgtggggtctcctcctcccagatccccaagatctgtgtcactggtcgattttgaactttaggtacatgtgttcttttcaaaaattcagagaatcgtcatgtgccacagaagctcagcctgggcttcagcaattgacaaaatt

SEQ ID NO: 55811 - DNA, 535 bp, Homo Sapiens
cgcgtccgaagaaacattcacagatcttcttcaaacactggaacatctctgtagcaatcactctgtgattcttttagcatgccgaattcgctatgaacgggataacaacttcttagcaatgctggagaggcaatttattgtgagaaaggttcactacgatcctgaaaaagatgtacatatttacgaagcacagaagagaaaccagaaggaggacttataattggctataatttataagaatgttgtcattgagtgtgtcacttaaggtcttagactgcaaatctaaccatatttaatgaaatgtcttactgtacaaaaagtctaagccaaaggttctcaggggagaaagcacatgttcagttttaaaacaaagcagtgctttgtcccattgctgtgatttttagtcagactttactcagtctgaaatgcaattaacattaaaggattaagtgtgagatttcgatttatgctatttgtgtatcccatactcctcccttttaataaacagtttccactgatgatatgaaaaaaaaaa

SEQ ID NO: 55812 - DNA, 672 bp, Homo Sapiens
aaatgatattaaatctcactgtggagcatcataaaaacaacctatttgtcagagaagagtaggacaattgtcctattaaattggaaaactgaaaaagaaaatttaaaaacagacttccattattgcattcatatgacaaatactttttgagtgtctgtgtcactgggcactgtactaccttgtaactacctaggcagtcggggtagggaatcctccttggggaagtaccctttgtaaggccaggcacagagaaaaaggagggtaaagagtgtgctaggtaataggtagaggacatgtacaaatagatggctactgattttcagttgataactatgtctaattaggtgaataccatcttattctagcaagagtatcagagtgcgttcattcctgaggaccctttccctggtgttgaaacaaattatctctagccttcagtacgaaataaattcccttttgctacatttctgccaaatctgaagaatcacaatggatgagtctcatgcctatttcaaaatggtatagagtctctgggggttcagtatatttaacttgtttcctcataagtgtgacttcaagatattgtttcatgctggaattgtaaattgtgatttatccattctctgtagaaatattaaataaatctgaaaaaactccaaaaaaaaaaaaaaa

SEQ ID NO: 55813 - DNA, 650 bp, Homo Sapiens
gcattttaggaaactgcagccgtgaatatgaaagagatgctgcccaaagggctggtcatccagggtgccacctgccaaccttgtggtacgagtgtcctgggctggaggaaacctgcctctccagggacatgggaaaagaactcatcatgggaaaaagaaccatcttctgcctcaaagacagcatggttatgtaggaagattgagaagagtaaatagctccaaaagaaaaaaacaaagtaaaacagaacaccaagtaggagaatatcaactgtaagtatacgccaaagtgaattaaaatccaccatggagaagaacacacatgctgagaggggctctctccttggctctgccgtcctgaaggcagtgtggggagagaaggagctgacttttgatagcaatacggacactctgggagctgtgctgaatgtttcatactttccttaatgtaatttccacagcatcaccacaatcattactgtctctgctgtacatggggaaaagcttgagttaacagaagttaaacaattcaccagtgatcacacttacatgaaaaagccaggtattctatctgtctgataacttgagcctggccattacattcagttctgctgtctttaaaataaaaaccctggattaaaaaaaaaaaaaaa

SEQ ID NO: 55814 - DNA, 647 bp, Homo Sapiens
  misc_feature (536)..(536): n is a, c, g, or t
  misc_feature (541)..(541): n is a, c, g, or t
  misc_feature (644)..(644): n is a, c, g, or t
gaagaattaacgatatgttaacacaagttgactgtgatagaataattacaataaatatgcctattttcctttggggagaaaagtctaaaattctgctttatagaagctattctcagctctaaaagagcatatatgtagatcttcatttcttttcttctaacaattttaggggaaaatacaaaccttaagttatttcctgaaatatttcccaggatgattactaccttggattttaaggcttctttcttcacaagttctgactcttctataagcacaatcagaatggtcagaatgctgactctcctttaggtagtcagaatgggtcttccaaacctttgtatgagcccattagctgcctcagctttccctcaactttcaggaaaacacaggttacatattctttacgttactatgagaaactacctacattatttttttttaaattttatttttggctgggcacattggctcacacctgcaatcccaacattttgggaggctgagatgaaaggattgcttgaagccaggagttgcangacangcctaggtgacaaagtgagaccttgactataaaaaaagataaccctttccgacgtgatgacctacccacacgagcatgcctcttgcggggtctctcattcctntcg

SEQ ID NO: 55815 - DNA, 465 bp, Homo Sapiens
agaatctgttcacctatttatgtaagtgaaagtgtaaatttaaaaatacatttagtcctgctgttaataacccttccattcttttttactttccctcagaccatatattgtgattatagtttctgctgaggaggatggaaactcaactccctttgaataatattagtaattctacttgatgttcagaaccggattgcaagagagtttaaagtgcccaacaccccttgtgggaaactttttagtatcttaagtgcatggaactactgctgcagccacaccgcctgaagcttcagccacactgaaacttcataacaaaacttaccctcttttttcctaatttctgtggtcattgcaatttgagcatgttactttgtttaacaaaaactcatttcttaaagattattttagtattgctgtacaaacagaataaaattatggcattattcagtgaaaaaaaaaaaaaaa

SEQ ID NO: 55816 - DNA, 881 bp, Homo Sapiens
aattttttccaagaataaactagttgaaaagtcttgtattaaaaatacacatagattttgtgaacatttccagtgtgtaggtcgttgctttctatttctgacctcaaaagtgcctcactgtatattatttccattaaaagcttgactgcattctttctaatgaacaatgaaaaacgtttaactcatgtcataatgtgtctcctcagatatagttaactagcttgatagtttgagtatataatgtaaataatacataataagttgtaaccatttctgttacttcatacccgtgtaattggacatagcagatgattatcataagaattgttttaatggtttttttccctcctggaattacctgattaaacctgtcatgaattataaaaggactttttcttattctcctagagcttatcaaattatcacataagagataattactggaggagaaagtaaaaatggaagctttgataattagctctgttctttaaaagtatacttttaaactgaaagttcacatatagttcatcttaataacatatttattcatccttaattgtattcagattttttaagtctctaagctaataatgttatatttatgggttggtaacatgtgcagctaagctaatgaccttaaagttggcaatggtttaacccaggactacggattttttatattccagttcagtttcatggttttactttaactcgcatataaccaaaataagataatctaaggaaggtcttcggacgtactaacaatttggtcccactgaatagggtgaacaatgacgtttggaaaaccgggacgcttttactattagaagggcggggtacggcaaaggcattctcatacccggaaagtaagagaagcggca

SEQ ID NO: 55817 - DNA, 400 bp, Homo Sapiens
tcactggttttgatggatttgattaaggcgttccttggtgaagttttcttcatgtttcttgttcttagaataatcatatttctgtaatatttgaagtttatggtttccatggagcttctaaatctttcatccagtatgttttaaatatctttgtctctcttctccactacacgcccttcagggattccatttagccctatactggggggtttaaagttttgatgccaatggtctttttatgttttcaagtcatttgttactgtgtgtttcatttatgttagtttcaacttctattccttctagttcaataatcttctcttctgcaatgtttaatccactgccttcttccatttcagactgtaaatcatactttttatctacagaatttgatatttaaaaa

SEQ ID NO: 55818 - DNA, 1328 bp, Homo Sapiens
ggaagacctgagcagggttttgccaacagcttgttctagagaaggtttccctttttctgggacattgttggtctcatgttatgcctgtgaaggatttgtccagccttcatgttactctacacaacaacttatctcctgtgtattgccctggttcatgtgatgataatggccttatgataaagccgcctttagtcttccatgttctgatcactgtgtggggtgggtcaagagcagagttaagatctaccaaactgaaggggtctccagattatcttggaggggacagcaggatggcagagaaacaactgtcaatccagatttgacctcatttgcattgccaccaaggcctcctaggaaaaattgtaggaatttatgggtataatattgtggtctgaatggcgtgaatttttatcccgaggagggggcagttgtgacaacctccagtgcatgtgggaacagcatgaattgggtcccttattcccagggggtgccccatattccccaatactgtaaagcagatgctgtttagcacctgccaaggagccatatgccctgaagttcagcattaggcaggtatctcttaactgtaagacataccacgcccagctggggaccataatttgtacagaaacactggatgtgattaatagggagtaggcgagattatagcaaaccagcagaaatggaactctgctaaatgtgcatccgtgaatgctcccttgaatgtggctgtgcaggattcagggtttgcagaaattctcaggacctcagacctctgtcctatgactaatgttactggcagagcaaataatctaaaggttttggttttgtggattaccatctccgtgctgtgcatctgaaggccagtgctgtgctggcaggaaaatagggactgagaaaaagcagatcctatactatagggactgtagtatctatgacgtagccagccattctttgctcccaaggcaagaagaaagagatgacagagtcaatatagggttgccaaatcggattttctaaaatgagtaggaagttggatttttatgtgcaacagtttcttttaatgctttgttgatatgtgattgtcatgcaataattattcatatttggtaagttttgtacatatattatgtacactcagggaaccaataccataatcatgataatgaacgtatccatcacctgcaaagctacctcatgcccctttacattccctccttgccttccctaggaaaccgttgatttacattttttactttagatttgtttgccttttctagaattaacacaattggaatcataaagtatttatactctcaaaaaaaaaa

SEQ ID NO: 55819 - DNA, 745 bp, Homo Sapiens
gtgttcgggacttactacccatcttgtaatccatactggagagaaaccttacaaatgtaatgagtgtggcaagaacttcaggcacaaattttctctaaccaatcatcagagaagtcacacggcggaaaaaccttacaaatgtaatgaatgtggcaaggtctttagtctgctttcataccttgcacggcatcaaataattcatagtacagagaagccctacaaatgtaacgaatgtggaagagcatttcacaagcgtccgggccttatggcccatcttctaatccatactggagagaaaccttacaaatgtaatgaatgtgacaaagtctttgggcgcaaattatacctaaccaaccatcagagaattcatactggagagagaccttacaagtgtaatgcatgtggcaaggtcttcaatcaaaatccacacctttcacgacatcggaaaattcatgctggagagaattcactgcgtaccttacagatggaatgaatgtggcaaaatctttagttagaattcacacctagcacaacattggaggactcaggagaaaaaccttacaaatatcataaatgtggcaaagaatttagtttgcattgaagcctcatcactcatctcttgatccacactgaaaggaaaccctacaaatgtaaagttaataacatatataaataatctataaagagagaacagttatatcagaatagagcatttaatgaaaactaccagtatagcatattcttg

SEQ ID NO: 55820 - DNA, 633 bp, Homo Sapiens
caaaacatcccccttcctggagatgatgatgccatcgaagcccgggccagggcctgacctggcaggcacacacctggccagtggctctgaggtccccggggaccgagtcccctgcgagggcaggctgcccgaggccacacctgcccaccttccctactccaggccaccagctggtgtcagattgggccaccgggagagaacaggcctaggagggaatggaaggctggcggggaggctgtcatccagaagcctcctccccagaggtctccaggaggaacctggctcaactggggggcagtggtttacttttcccttttttcttcctttcttttgtcctctcagctgcccacagccagaaagccaggaccacccgaactggacagggagcagggagggaggagtggtcgcacggagcgtacctgattcaacaggaaatcagttattttctaaaacagcccctaccagagcctcctgaactctgtgggcaccacgtgctgctgtgagcatctgcccagacagtgacccgccacaggccccgggcgtctgtggaaggagttttgtaaaggaaaaaaaaacacacacacacaaacattttttcaatgtagcaaaatcaaacttaaaaaaaaaaaaaaa

SEQ ID NO: 55821 - DNA, 597 bp, Homo Sapiens
ttaccaatctgaagtgggagcacaggaaaaggacaagggtgtctgtcagggatggcactgtgttaaaaagtgggcgtgcaagggccgcattcccgggcagccgctgcaacctcagcccctgggcccttacctccgcagcctctcccagcatccagctacccagactccaaggccccaggcgagagccagctctcggtacctggagctccacaggtcccagaatcggggtggatcagagttcaaattctggttctgctactgtctaattgcgtgctgcagggactcaatctcttcatctgggaaatgggagtaataacccttggcaggaatgttgcgatcctctgggatgtcagaggtgttgatgaatgttagttcccgggacttcggaaagaggtcccgttggaagagatgtgaattggaattcacaccctatattaaaatctcctccaatcttcacctctgagacatggctgtctcaagactgttttgtttcccttcctggtggaattttgcacttttatgtcctgtgtagcagcaggtagtgtggctttgagaaaataaaatggccaccttgctccgctgttctttctttgtaaa

SEQ ID NO: 55822 - DNA, 447 bp, Homo Sapiens
ccgacctccaaggctctgttctcccctccccgtgtacatatactcccggtttccctgcccctccattgcccttggctttttctggtatgtgctgtgctccacgaccaagccgagaaaggacctagggtggggaagggagggtctcttgattcctaaccgcccccacatactgctccaccgctgaacttcgggtgccggggaggagaaattgggctgatgtgagctccccgtcacccgccatggagccggctgtgtgtgttcatcagatacagttctcccttaaccttgtcctttctctcctgtgtctcagtctccgtcagtctgtctttctccgctcttctctgacccctgtgaggaacctccttaccctgttctggaatcgctgccagactgtagcttttaatttaataaaaataaagtaaaatatgcaactcttaaaaaaaaaaa

SEQ ID NO: 55823 - DNA, 656 bp, Homo Sapiens
agaatttatttaggcttgactgttttaaaacaccataatgaatgtataattaatttatgttaaagtattaaccctttgtcacaaaggaatggtaatgtgattggctgcctgttagcccatcgactattcccgtcacggtagtccttacctctgtcggcagctcagagcctccacatttttatatttaattctcatgataaattagccaccataatcccatggaattaggtcttgttaaaatctagtccgggcgcagtggctcacgcctgtaatcccagcactttgggaggccaaggcgggctgatcacgaggtcaagagatcgagaccatcctggccaacatggtgaaaccctgtctctactaaaaatacaaaaattagctgggtgtggtggtgcatgcctgtagtcccagctacttgggaggctgaggtaggagaattgcttgaacctgggaggcggaggttgcggtgagctgagatcacgccactacactccagcctggtgacagagcaagactccatctcaaaaaaaaaaaatctaagcaaactatctttgagtcaaaaaaagttggataactcatctatatttgaaataatgctgtctgaatggccaacatcccaagaatgtattaaaaacagcaacctgcctaccgttttg

SEQ ID NO: 55824 - DNA, 660 bp, Homo Sapiens
gggaggtaaggggcctggataccaagaagtgactgctcatctaatccataaagctatgttaacagattggaggtagtagcattttcattacaagtgactgaggtaaggggccagcatccgagagcccggactggagatttctgagagagcagacaccatcttatttctgttgaattgtatttagtaactcaaaaggcatataccaagctgtcagaagcagcttcatttaaaagaaataaaatttctagtcctgcctgaagtttaagctagcccatgactacacaagtgcaactgtatttcccaggtagatgccggtagattgggcccagtaagtttgggccgttgggatgtgaaaggaagagatgcgggcaactttttgggtcatcttcttaaagaaaaagccatttgtcctggatgccctcttttctttttttctctttggctgggaaatgacaagaattaaagcagcagccttggatccagagatggacgccaattgatgaagacagcagaactgactggctagtctgggttccctggaacagaactgtctctccaccttaagtatccacttacttttgtactgttatgtgagaaaaaaataaacttctatcctctttgtaaaaaaaagaaataaatctaaaaataaaaacctgtcgg

SEQ ID NO: 55825 - DNA, 882 bp, Homo Sapiens
  misc_feature (600)..(600): n is a, c, g, or t
atgaatagtagtagcccatctctggaaggaaagttcatgtttttgacgtgagaacacagcatccaaccaaaggttttgcctctgtttcagaaaaggctcataaatctactgtgtggcaggtccgacacctgccgcagaacagggagctctttctgacagctggaggcgccggcggccttcacctctggaagtatgaataccctattcagcggtcaaagaaagattctgagggaatagaaatgggagtcgcaggttctgtaagccttctgcagaatgttacgttgtccacccagcccatttcaagtttggattggagtccagataaaaggggtctctgcgtctgtagttcatttgaccaaacggtgagagtactgatcgttacaaagctcaataaaatttgacttcaagactttggacttgaggctgggcacggtggctcactcctgtaatcccagcactttgggaggccgaggcgggtggatcagaaggtcaggagatcgagaccatcctggctaacatggtgaaaccccgtctctactaaaaatataaaaaaaaatttgctgggtgtcatggcgggcatctgtagtcctagctacttgngaggctgaggcaggagaatggcgtgaacccgggaggcggaggttgcagtgagccgagattgtgccactgaactccagcctgggcaactgaacaagactgtcttaaaaaaaaaaaaaaaaaaaaggactttggcttggaaacctttccgaggaacacttcacaattttaagaaaggttcttggggtcctctgacccctaattgaacaaagctggtattgggctgttgataaaaagacccccagccccaagccttttgggccaggcctccagcctctttttggg

SEQ ID NO: 55826 - DNA, 887 bp, Homo Sapiens
ggtcaaatgaatgaatggtcaaatgaataaatctagccctcacagagatacaaaaggaaaaggaatataattcataccatttggtttaagccttacattcatgaagaacctcaagggtagatttttgagatcattccaaatgaagtcgaatctgccctcacagagacacaagaaaggaatataattcatacactattgcatttttaataaatcttttgaaatttgcagaattagattgtattgtgtattttcggttaaatgataattgaatgtaaatatttagatgcagcaccatattttataacccagctttagcatttcttcatattttaaggaaaccccccacctccttcttttaagggcgcttcttgctctctgaaatgccctgctaaatgcttctcttaattatttgaataaggtagtttggaataaagaaagaaaagatcactctacatacagatagtaaacttaatttgtgatcctatatatgagacagtataaaaatacagataagttttagaaagactcaaaacaatatgtaaatgactgatgtttgcattattaaggaaaacttgggatgttgggtcaagaggggaaagtgttagtcaatccacttggagcaatatcatgaaggtcaattataattccatatacctttctttgatgccacagtcagagatagaatacagttgggtggcatggatgtgcccaatacagtacacatgttgggttaattcgtttccagatcatccatggaatctttgaagtatctttgatctacttgattggggtgacttcctggtttaataacactaaaattctttgattctgttttcgcttaagaatgaaagtaaactacggttccagaaaccctttataacggaggt

SEQ ID NO: 55827 - DNA, 686 bp, Homo Sapiens
gccaggaagaggttagacgcaatgtgaaactgtcctcctaggataaggtttaaagtggctttttgggggctgggtgccgtggctcacgcctgtaatcccagcattttgggaggctgaggtgggcagatcacttgaggccaggagttcgagaccagcctggccaacatggcaaaaccccttctctactaaaaatacaaaaattagccagacgtggtggtgggtgcctgtaatccaactacccaggaggctgaggcatgagaatcgcttgggcccaggaggtggaggttgcagtgagccgagatcgagccactgcactcctgggcaacagagcaagacttcgtctcaaaataaataaataaagtggctcttggggaaaagcaatttaatgtaccacgatgaatagctaactgttcccaagtgtttgctatgtgcaacacaccgcgtgagcagtgttacctgcattattacattaggctgagaggtaaaataatttgcccgaagacatacagctagtgacgaatggactgatggtttgaacttaacgtctatttgacttaaggtcctgcaccctgccacttgtaattttcagaatcactgataatctgaaataatgcagcttaaaacatgttttcttaattaaaagtaaattggatggtgaaaaaaaaaaaaaaaaaaaaaaaaaatgg

SEQ ID NO: 55828 - DNA, 851 bp, Homo Sapiens
  misc_feature (733)..(733): n is a, c, g, or t
tcccccacacataatgccttagatattcagtaggttttattgattagaggtgaacttatttggaaggaataaaaagacaaagcaggagaatggtcaagaacatgagttttagagtgagacacttgagtttgaaatccagcccaaccatttactagttgtgtgacctctatcaagttatgcaacctctctgtgcctcagtttcctttttggcaaattggtgctaacacctcacaggactattgtaaggattaagttcatgtagataaagcacttaacacagcatccgacacatctcatcactcaataaattatcactgccctttgttactgtggttaacaaacacttgctgtaatttctctcttctaacttataggacaaacaaataatggaaatttttaacataagtatgtagagattgtggtaccacagtgataaactgatttttatgcttaagttaatgactctggtttatgtatgacaatttattcagtatgagaatctcagaaaactaatgtttttttctattccttaaccttcctaccctttttttggtacagaaacattaccgaaaaaacaaaaaacaaaaaaaaaactacctctgtctattcatttattccattttaatctcatggcttgaaatctgaacaattgggagttgctgtaaggagattgcttggatgtcttttggcccctccatgctgatgtacttctttaacagctttatccattgancagaactttagggcctgcttatttttacaaaacgaaaaccagtgttctttactgactactcagccttacatacctgcaaatccttctacactagcatgggaaagccccctgccgcgaa

SEQ ID NO: 55829 - DNA, 608 bp, Homo Sapiens
tgttcttaatacttaatactgtccccaattccattcaaggttcagttgtgttcagctttaaaaccagctatgtgaatgtgagttctagtgcagattatttagtgattatgtaactaaaattgatgaaaaaatcacactatacaactgtgaggagcacacaactgctaagtttgtacttttgaaagtaaattattctttgtttgataccttattttttaagaaagtgggattaaaaatattttggtcagtgctgttttctacccaccttcaaaagccaatggtttgatatttctattaatttgtgcttcctttagttttaataggggatagaagactgcagctggttgggtctggaaaacattaatctgggcaaacggagctggagctatgaggatctgagtcctagggggccctcattcactagcagtaagaatttaagtggtgcatggcacatagcactgtactagattctgcaggggcacaaacatagagccaaacactctccctcttggagaatttcagacccagaaaaggccacgcagttctaacttttgtcatcggttccttttgctaaaaggcaaagggtatgttccttgcctattgtccaa

SEQ ID NO: 55830 - DNA, 499 bp, Homo Sapiens
gttcatattatgctatattttctaagttaatatttgtcagtctgtaaaaattagtaaagaagataatatcttaaaaatattttaacattagctgcattccaattgttaatgttcttaaatatgttggaattaattgcatattacataattggggttttcaaagcgctatgttttgcttaaattttcattaatagtgtggaaaggagaatgtaactgtatagtgactctggctgagttctcaaaagaaggaagagaagatttgttatacaaattgaattaataatagtatacatataaactattttaatttagtaaaacctaaactggtctttaacaagaagtgacaggataggtgaaaatgtattttggggaaaagtattttgagttttgctgaattaatatggttggtaaatctctctctgtgtaggatcactgtttaatgaaataatgcatattttttttctgccacccaaataaagatttttatctgtgttaaaaa

SEQ ID NO: 55831 - DNA, 503 bp, Homo Sapiens
gcggccgcctttattagctattcatttgaacagagtgactatagaagaatgaatagcaaacaaaaggagaatttttctaaaaagatctctcactgggcaaagaaaaagttatgcatttataaagtaattaaactggttttccttgtactttattaatctgaatctaatggcacttccttacgagggttttcagatgtgcttgtagttaatggcaacattatcagaatgactacacagacagtcctactctgaggagatgactttggaagaaacccatttggaactacacaccctgctatgtctgtggagaactggaactgcaatcctcaagagtcacacttcatattccttcctttcaagtggttgataacaaggtagtgcttcaagcacaggatttatggcatagttggcaaattaaacaacatgctttttattttgactaccatttacgtggaatctttgcaactttttctctgacatgtgaatctctaatgtggtgagag

SEQ ID NO: 55832 - DNA, 515 bp, Homo Sapiens
gaccggtttatataactctgtattggggaaatgcctagttatattttttaaaattactccaatatctgtcactgttagataaacacttctagaatctcattcccagtgttttctttctccgggcatgggtcaacaaccttccggtgagcatattttcattatataatggcccctttatttacatatttactctttctaaaaggttaatttcttgggggggagggaaggtgatatatacacagtgtaatatttaaacggtacaagatggcttattgggaaaggaaatctcttcacgccgggcctttgccttcaagttctcttccccagaggcaatccatgggtaacaattccttgtatatttaagcaaagatacgctagataaaaatactcgtacatatatgctttctctacctcccaatccccctttaagaagaagcacactatacagtgtactttactgggcttttttcctcaatatatcctggagatcaggaattcaagagcaggctgggcaa

SEQ ID NO: 55833 - DNA, 562 bp, Homo Sapiens
tttctcaagtcaacctcaccaggcccggcttctccctttcatcagccttccaaaggccagcttttgcttcatgtctgccttccgagtcccagctcctgttttatggcagcctcctgaggcccagctcctgcctcctagtggcctcttttggcccaactctttcctcaccagggccttccagaccacgttcctgccttttagcagccactacaggcccagctttgcgtcctttcaagagtcctgcctcacagtggcctcccaagggcaactttctgcctcatgtcagcctcttgtgccctggtcctgcttcctggtagactctgcaggccctgctcctgccttacgttgccccttttataaagatccagttcctgcctcctggctgcctctatgagcccaaatcctgcctaacaacaacctgtttttgcccagctcctgcttcctggcagcctccttaggccaaaaatttccttcagttgacctctccagggccagctcctgcctctcagcaccctctttaggcccagctcctgccttaataaatttgaataaattaaaaaaa

SEQ ID NO: 55834 - DNA, 745 bp, Homo Sapiens
atcaaaagatctgtgtatttgtttgaagttttgttaatagcaaatctaaaaatcttgtttggatttgggatgagaaatgtcagtgttttactttttagttaattaattttattttttgcagtggcctttttttatttctaaatacttttctggtggttgattattcttttaaatctgtggttagggaaacataagctatgaaagagctattgtaactatgatctgagattagaatttgactctccaaatgacctattgtaggtcagtgttgtataaattaaagctgtgtgaccctagaatctgcccttaaaaaaaaaaagaaaagactcgtggattttagaatacattgagaattgttcaggtacactctgtttggtgtgaaacttctttgatttatactccaagaaatgtgttaattgaaataaaatgacgaagctggtttggtgggaatttttgaacacttttgctttaacagttattagcactattgattattttgttaaaattttccctcattgtggcctttgatctggctccataatataccccattcccttattcagcagctctttgaaataaaagtgattttagttcctaggactatttgttatacttttggagctgtctctttccctccctcaggatgtaaaatgtatttcctgtttgtatataccacttcatttaaaaatatttttccttgaggctcaagacagtatgagtaatgataatttttagaggcattagg

SEQ ID NO: 55835 - DNA, 841 bp, Homo Sapiens
cagatcattatcagcctccattattccttactgtatataaaatacagagttttatattttcctttcttcgtttttcaccatattcaaaacctaaatttgtttttgcagatggaatgcaaagtaatcaagtgtttgtgctttcacctagaagggtgtggtcctgaaggaaagaggtcccctaaatatcccccaccctggtgctcctccctctccctggtaccctgactaccaggaagtcaggtgctagagcagctggagaagtgcaggcagcctgtgcttccacagatgggggtgctgctgcaacaaggctttcaatgtgcccatcttaggtgggagaagctagatcctgtgcagcagcctggtaagtcctgaggaggttccattgctcttcctgctgctgtcctttgcttctcaacggtggctcgctctacagtctagagcacatgcagctaacttgtgcctctgcttatgcatgagggttaaattaacaaccataaccttcatttgaagttcaaaggtgtattcaggatcctcaaagcattttaaccttgccgcttaaaacccaatttaccgtgaaatgggaattttgctgcattgttaactgtagtggaaaccatgctatagtaataaaggttatatcagagagaaattgcacattacatgtgtttttaaatttcaaaaaaaatcaatctttaggatgacttaaaaattgatttgccatgtaaaatgtatctgcattttttacacaaaacttgtgtaagcataaaattttaaaactgtactacttgatgtattatacattttgaaccatatgtattaaaccataaacagtataatgtgt

SEQ ID NO: 55836 - DNA, 346 bp, Homo Sapiens
gcgtcgacgtcaaaatatcagattttaaatgcaatctataaaaccgataaagactttggaataaggcgaggaataaatatatttaaaacaagtgggtacagtgaacacagtaagaagagacaaatgataataaggaaatagacaactgtgaaaatgtatgtaaggtataatagagacaggcatagtagcttgcacctgtggtcccagctactccagaggctgaggtgggaggattgcttgagcccaggagtccgaggctacagtgagctatgtcgtgtcattgcactctagcctgggtgactgagcgagaccccatctctaaaaaaaaaaaaaaaagtcgacgcgg

SEQ ID NO: 55837 - DNA, 647 bp, Homo Sapiens
  misc_feature (12)..(12): n is a, c, g, or t
aaaaacccaagnaaggtcacgaagaccagttggaacttcagtagagagagtctgagtaaaacaaaagaataggattcagatattgaatactatatctagggtgtcattgtttcagatttcaacatttttaaatgctttgatactgctttttccctttcttgcacattcactattgttaagtattaggaatgaggagctgctgtgacattcaaggcctgggagagtgagcattagattataatttgaaatcaaagcctggtccttgcaccccttagatgtatgaccctgggcaacgtgggtataagaatagtacatttctcatagtgtcatgtgatttaatgagataatggatagagagtgtttagcaccatgcctggtacactctaagcactcaataagtggtattcactatttttataaagttgaagtttgacccatacgaagagaccaaaacatggatgctggggtaaaagtggaggagtaggatgccaggagagagagcactcatgactgtcaagctgtctgatctgtgacagatttttctgagttacaactagaattgaccttatatctttgctcttaagagacaggtataggtaaatgcttctagggacttaagttgcagcatctttaaaaaaaaaaaaaaa

SEQ ID NO: 55838 - DNA, 568 bp, Homo Sapiens
gtactgctaatcatatacacagtagaaagccacatgatctggattttctgtttgccacatccctggactcagttgcttatttgtgtaatggatgtggtcctctaaagcccctcattgtttttgattgccttctataggtgatgtggacactgtgcatcaatgtgcagtgtcttttcagaaaggacactctgctcttgaaggtgtattacatcaggttttcaaaccagccctggtgtagcagacactgcaacagatgcctcctagaaaatgctgtttgtggccgggcgcggtggctcacgcctgtaatcccagcactttgggaggccgaggccggtgattcacaaggtcaggagttcaagaccagcctggccaagatggtgaaatcctgtctctaataaaaatacaaaaattagccaggcgtggtggcaggcacctgtaatcccagctactcgggaggctgaggcaggagaattgcttgaaccaaggtggcagaggttgcagtaagccaagatcacaccactgcactccagcctgggtgatagagtgagacactgtcttgacaaaaaaa

SEQ ID NO: 55839 - DNA, 587 bp, Homo Sapiens
agggagactcggactggccaggacctggtggggtctgggggccctgggcacccagtagcctccccacttccacagagttggagtgggatccggcgggggacattgggggccttgggcccttgggacaaaagacagcccggacactaggagtgccctgtgagctgtgtggccacagggggccccagggcaggggacaaggccttgaggaagcagacacctctcactcccgacaggacatgctggagtctggcctcggccaccagaaacgcttagcacgtcaccaaagacactccctgctccggaagcctcaggacaagaagaggcaagcatctcctcatctccaggatgtgaggctggaggggaatccaggggcccccgatcctgcatccaggcagcctctgaccttcctccttatcctcttcctcctcttcctcctcctggtgggtgccatgtttctcctgcccgcgtcaggaggcccctgctgctctcatgcccgaatacccaggacaccctacctggtgctcagctatgtcaatggtcttcccccagtctgatgtgtgtaataaatggtcactgtcaaaaaaaaa

SEQ ID NO: 55840 - DNA, 500 bp, Homo Sapiens
  misc_feature (17)..(17): n is a, c, g, or t
  misc_feature (227)..(227): n is a, c, g, or t
ccaccacatttttatgncactgtattccactgcctgcttttttaccttctttccctaggatttgtcctacagcttagtattgtggttgacagcgatactagggctgacagcacagaagtcacaagagaagagtggaagggcaagaattcaaagcatttgttcatacaatgtggcaacctcttttgcatagttgcgtaggatcctgtttgtaatgctatcataaatantctgtagttttttttttttctctcccaactggagctatgacactttttattggattcagtcttgtctcttgtctagaaagaactttatcttgttgacgcatgagctgtttaaaaattatcctattaaatgttggttaatagttgtgcagtttttcatttcagatggaaaggcaatgcaaattttgcctttgttttctgtcaccttccaacccctgagcacttctagtcagatacagattcatcagtgtatgcaacatcctttgtaatttaaaa

SEQ ID NO: 55841 - DNA, 442 bp, Homo Sapiens
cacgaggataatgatcatacatcttcaagctgtctgaaatggttaaggagttcagtctgtcgtcaggcacacaccagagccagctagcccacacagaccccatcagagcaaaacagacaagagaatttaattcatatccacatagaaaggacttctaggtaggaggtagaccctttagctcccttccaattaaaggagtccccaattctggcacctgagagtcccctgggtctaacagctatgatatttatgtagtgtgttgcttacctaaatgaatacaatttccttccagacacgtgacactgatattaaagtgctaatgagagggatctatttcttcttgtacgctaaaagagaaacagcagttcagatttcccatcagaagtccgaggactttgttcttgataactactaccaataaaaattgagtatttgaaaaatt

SEQ ID NO: 55842 - DNA, 607 bp, Homo Sapiens
  misc_feature (592)..(592): n is a, c, g, or t
aatgccacagacaccaggtatacagagcttggtaggagctggaaacccgactcacagatttaggaaacagtgggttcttgtccctgtggacatcagaacttgggggacggagagatagagaaccagaaggcagaacaaggaaaaactcaaagaaaggaatggggaggaatggaaacgtaacaggacatgttgcctcagtgagtcaccaagggctttggagttcttagcccaaaatgtggttctgtggaggctgaggacaaacttcaggacagagcatgccttaatcgatgtgctaagccactggctcgggcagtccttaagcaagggctcctctgatcagacaaggaattgtttccttcccttttactccagatgacacctaaaggtgcaaaagaaaaccatctctgcacactaccaaacagacagtgcgtgaacgaagcagaccctcctgaccacagccaaggactggagagcttggtgaaactggtgctcaaggtagaaattccctgcgattgctactgcaacttatactaaacgtcccaagtgaagtgaagggagaaaaaagagatattaagcaagaaggcccacttgnttatgcattgcttta

SEQ ID NO: 55843 - DNA, 681 bp, Homo Sapiens
cgcaaaaacgcccccaattttgggctttttacccacccactacccatatccaattagggccggttttaaccaagaaagccattccaaggcccccccccgccccctgtccaaaaggccttctaaacgggataatcttatttattccctcaaagttttttttcttcgcaggatttttttgagccttttaccactccagcctagcccctaccccccaaataggagggcactggcccccaacaggcatcaccccgctaaatcccctaaaagtccccctcctaaacacatccgtattactcgcatcaggagtatcaatcccctgagctccccatagtttaatagaaaacacccgaaaccaaataattcaagccctgcttattacaattttactgggtctctattttaccctcctacaagcctcagagtacttcgagtctcccttcaccatttccgacggcatttacggctcaacattttttgtagccacaggcttccacggacttcacgtcattattggctcaactttcccccctatttgcttcatccgccaaataatatttccctttacatccaaacatcactttggctttaaaacccccgcctgatactggcattttgtaaatgtggtttgaccatttctgtatgtccccctctattgatgagggtcttaaaaaaaaaaaaaaa

SEQ ID NO: 55844 - DNA, 697 bp, Homo Sapiens
aaatcttaaagaaactctccaccttttctaagtagtgtatcaaaatctaaaccaaggagtctctggacaagaagctgggagaggcacaaactggacatctctctctctcatatccttcggcattgggttatctatgggagcaaggagtgggcacgcttctctgttacaaatagaaaacgattccagtcatacaggacacatcccactccaaatgatatttccaaaaacatacctctgacagtaactttgatagatggtttgtcaaatgtatctttctgggtatccacacctcttggcaatgaaatttgcagctcctcccttccataaatgaagtctctttccccaccatttgaatctgggctggcactgtgacttgatttgatcaatagaatgtggaagaagtgactgtatgccagttccaagcctaggtttcaagaggccttataaatgtctgttggaaccttacccagccatgaacatgttgagtgagcatgctggagaatgagagaccacatgaagcagaaacatgctttcctagctgaagtcatactagcccaaccaacatggcagctaacacatgaatgaggccaatcaagaccagaagaaccactcaagcagatcccagcccaaattgcccattcacacaatcaggagctaaataaattactgttgtcttaacactaaaaaaaaaaaaaaa

SEQ ID NO: 55845 - DNA, 705 bp, Homo Sapiens
ggctggtataaaacaggaaatctacattgttccctctttctctcccttccatcccttcccctgcctttcctatacacgctggtgtgcttttgccctcagaaattcttggtttgggagttatgtatttttgagtgatcgaggttatgacatacttggagcggcatgatttcaagaagccattccaaattcttatagctccttagctctggttttactctcgtattttccccaagaaaattttttggctattcaaagaaagcacaaaatatgtgatgtggaactcatgaaaatagggacttttgatatctctttaaatattccctgactcacggaaaagatgtcctcttttggtgtatacattgtgaaaatctacccatttatctctctctctctcttttcttttaaataaattatctgataaggccggcaaggtggctcacgcctgtaatcccagcactttgggaggccgaggcgagcggatcacgaggtcaggagatcgagaccgcggtgaaaccccgtctctactaaaaataccaaaaaaaaaaattacccgggccgcagttggccaagcggccctgtagtccccagcctaatttggggaaggcttgccggccagggaagaaaaggggtggtggaaaacccttgggggaaagggccgggaaaaaccccttttgggcacaaattgggggacccatcttgaaaaaa

SEQ ID NO: 55846 - DNA, 600 bp, Homo Sapiens
tgttaccattctgttgtgtgtgtatgtgtatatacaatataaatatatatatataaagttattttttctttgggttaatttattataagttgtaacacttggctagttttgtttgtatatgtcttaaaatgttttcttatgatatttaagtgacagttaaagaggtatcaaggtaacttgtgtagaactattctttgatatattgtcatgtttgttgtgaatattttttcttactgcacagtagaaaaataaaaacaactgagtctttattttaatgtaactcagattggggaaaacaaaacagagctaagggaacaaaatgactgagggagcactctcccacgtccagtgcactgatcattttagtatgtttgtgctttgtacggttatatatttaaaacgaaaacaaaacaaaaaaatacaagggttcatgctcttccctgggtaatagaaacagttactcgctatgcataatctagttgatagttaaatttgctattgcttttcttgtcttgttatataaaatcttttcaatacaagtttagtcttaatggtaataaaacgttatggttatttataaaaaaaaaaaaaaaaaaggac

SEQ ID NO: 55847 - DNA, 1090 bp, Homo Sapiens
  misc_feature (661)..(661): n is a, c, g, or t
  misc_feature (1040)..(1040): n is a, c, g, or t
tctactcactgagcctgcaaggctggtgtgcaggacaggccagctacactccccaggtgtgtgcaagaccggggacgagtcagtcattgggaggtgaggtgctcgggcagtgtgggatggaggaggagggagggaaactgagtgtgggctcttcgtattggagaggaggggacggccatggcacaaagactcagatgggaaagtgtgagaaagcagagatttcaaaggagctacggtggagacccacagaagaggaatgctgaggcttttctgtctgaaatgctgaatagactctagcacacgcaaaacagcccaccacagcgagctgcaggattcttccgggcttttaacagtggtcttgtaaaaaaaattagccgggcatggttgtcccaactactcaggaggcagataggggaggatggctcgccccccataggttgaggctgccctgcaccatgatccgcccactgtactccaggctgggtgatgaaatgaaaccttgactcgggaacctcaatgcctcactcgacgccctctatgataggtgccgccataaccacccccgcgccctgctccccccccccctcccctccactcatttactcagcttgactagctcccacccatgtaccgattggcgaggggtattccttctttactntgttctcgtaccgctcgccccatccacccccccacctcccccccccccactgatcctcacgcctaaagttgcccgacgctccccctcagactatcaccctatggtatgttatcgctgcctctcttctctgtagcctcgcccgcacccgattacccccctcgctctcacccgccgctccacggcgtctgctcgtggttcgactcgtatgccgcccctgcgccccgcgccggccgcgtcgtccgcgtacgcgcgccgcccccgtgtcgctctcgctcgcagaccggcccgccacgggaagcctttcgcgtgcgtcgcgcggcgagccgtgaatagggatgaaggagctcgcggtcaccccacgtgtttcatcattatttanattttatcgccgccccgccagcgttcgcgtctatcatctttccctcatca

SEQ ID NO: 55848 - DNA, 634 bp, Homo Sapiens
caccagcagttaccttcatgccaagtgggcagcagacacaagacaatcacttggcaaaatctattctttcaatactaacattatttacaaaggaaaaggaagaagcttgaaagaacacagaaagccaaaagacctaattgaacgtctgttaagaaccagctccttcctccaactgtgccagaaagtaactaagcttttggctggtccagcaagacagggcagtcaggctgacaatggtgctcttgctgaactttcagccagagtgcgattctgaactcccgggtgaacggtacaaggaaatcctgactgcaggctgggtcaacccgcccaatgccatcggacaaagaataaaacattactaccagggttccaaatgtgagccatctgactacgtcttgcacactgaaacctcagactagccaattctgcactccaatctccttcaaaagagagccgggagagactgctgcgagggacaggcacagaagaaagaccctgtgagaacacagtgagaaggtggccatctgcaaagaggcctgccaggagggaggcctcagaagaaagcaaacctgcagacatcttgatcttgaacttctagcctccagaactgtgagaaaataaagttctgtttaag

SEQ ID NO: 55849 - DNA, 446 bp, Homo Sapiens
  misc_feature (219)..(219): n is a, c, g, or t
tctagattaaattcctcccgcggttagcctgacccgtgcccgggactcagtggagtcagccacgcaagttagactctagattaaattcctcccgcggttagcctgacccgtgcccgggactcagtggagtcagccacgcaagttagactctagattaaattcctcccgcggttagcctgacccgtgcccgggactcagtggagtcagccacgcaagttnttttctagattaaattcctcccgcggttagcctgacccgtgcccgggactcagtggagtcagccacacaagttaaactctagatgaaattcctcccgcggttagcctgacccatgcccgggactcggtggaatcagccaccccagacctctctcactgttatcatttttgcacaggtggtttcagtggcttgatgccaaaaaaaataaaaaaggaaaagtattctga

SEQ ID NO: 55850 - DNA, 662 bp, Homo Sapiens
tcatagtaaaaattttaatttatatatatttttatttagtattatcttattctttgctatttgccaatcctttgtcatcaattgtgttaaatgaattgaaaattcatgccctgttcattttattttactttattggttaggatatttaaaggatttttgtatatataatttcttaaattaatattccaaaaggttagtggacttagattataaattatggcaaaaatctaaaaacaacaaaaatgatttttatacattctatttcattattcctctttttccaataagtcatacaattggtagatatgacttattttatttttgtattattcactatatctttatgatatttaagtataaataattaaaaaaatttattgtaccttatagtctgtcaccaaaaaaaaaaaattatctgtaggtagtgaaatgctaatgttgatttgtctttaagggcttgttaactatcctttattttctcatttgtcttaaattaagagtttgtgtttaaattactcatctaagcaaaaaatgtatataaatcccattactgggtttatacccaaaggattataaatcatgctgctataaagacacatgcccacctatgtttattgcagcactattcacaatagcaaagacttggaaccaacccaaatgtc

SEQ ID NO: 55851 - DNA, 913 bp, Homo Sapiens
  misc_feature (667)..(667): n is a, c, g, or t
  misc_feature (717)..(717): n is a, c, g, or t
  misc_feature (814)..(814): n is a, c, g, or t
  misc_feature (816)..(816): n is a, c, g, or t
  misc_feature (819)..(819): n is a, c, g, or t
ttccgcgtggggtgaaatggaaatatttgatgaatactgagagttcctaaaatgctagagcaaatttccgagggaaaggggggcatcgtgtgtcttgggaaggttgcagcaggttgtttcttcaactccctaagaaatcattgggaaggactcaactgcaaactcgggatcagatacaaaatgggtctttccttcccctctcccccaaaaaataggagcactaaattttaaaatctactcaggtgacagttgctttgcaatgaaacttatcacattgaaattttcagtgttaaataaaaagagatttgtgatatttttaaatataaacttttacatcagtagtcagcagcctgacaattgaaatttggtaagtcgatatattttaaaatattttgctctccaaatagaattgtttttaaacaattgggaggttttttgtttctttaaatatgttttaattgtcattgtaaaaacaaaatcttgcttgaccctatattatgccatgaatgaattgctgagcctttataatacagtgacagcttgtttcatgcatagtcatggaacatagagatgttctttaaactgacctattgataagaggtttaatgagtttcacggctttcaacactattgtcatatagttatctttgccatttggagtttatanaaccattttatgtattgtgatactaaaggaagttgttttgctttactttnaattgaatattagactaatatttgcaaattctgcattttaaatgtggacactgggctgtttgaaaaataaaatatagaataccgtttttatgggacnancanaccaaccccacacacccacaccaaaaaaaggggcgggcccgctctaagaagtatccccctcgaggggggcccaagctttaccccgttaccccag

SEQ ID NO: 55852 - DNA, 420 bp, Homo Sapiens
  misc_feature (401)..(401): n is a, c, g, or t
atcactctttttagatgatcactaattttatggagtgatatacaccagaatgaacttctagcctgctttataatcaatcagttaatcaacaagtctgagtggagcgtgtatgctttgcgttatctgcagtgcggcctgaggttacgggagaaaaaaatggcactgtgtattgcttgaatgctcagggctgcgttcaactaattttaaccattgaatcaaaatgatcaggtagagggcaggaaatgtagaatggcttgaacaactacctcatgaaaacatgcagtatgcatttgtaattcagcatcttaaaatgtctcttttggcagtatttctttacaaatgtggcaaagcatggatatctttgaggtaaaattttttaaacttcacaaaaggttttctgnaaaaaaatatggtaccatc

SEQ ID NO: 55853 - DNA, 408 bp, Homo Sapiens
cacgaggggttgcttggacctgggagtttgaggctgcagtgagctgtgatcatgtcactgcaccccggcctgcatgacattgtgagaccttgtttcaaaaaaaaaaaaaagatgtgaaacgtctgttagcttgtatatatgtcagaataatttccaaatggatgagcgagctaaatgctgaatgttgaaaaaatcatatagatagtagaatcagatggattattgtataacctggagaaagcttttctatatgattcaaaatctagaagcaataaaaaaaattaaatttatgaatgattttaaagtgttttacatgaccatagtagaatcagatggattattgtataacctggagaaagcttttctgtatgattcaaaatctagaagcaataaaaaaatattaaattt

SEQ ID NO: 55854 - DNA, 778 bp, Homo Sapiens
  misc_feature (9)..(9): n is a, c, g, or t
  misc_feature (23)..(23): n is a, c, g, or t
  misc_feature (561)..(561): n is a, c, g, or t
  misc_feature (720)..(720): n is a, c, g, or t
caagttttnagtgtccctgtttngtccgctaagtggataagggcatttatttttagttgaaagggacattttatcaactttaaagttatatgcattaaatatttaaatatgttgacttctttatccattcaggtgttgaatgtttgttttctaaaggagacaatgattcataatttgtgacactgtaaatcctgaggtttatagaaaggattcatgactttgtaatggaggtatgttttgcattttttgtattttggtcacatctcttggttgagagtacctggaaatcattatttccagatcctggaagaatctatagaaaataatccatcttaatgctttagagaacaattttcattattgcaaatgatcaagaatgagcattgttgtagactccattatcatttaaaaaatagttgttatctgcaaagtaagtacgcttcacataaggaatctgcataagttatttcttgtgtctattattacataactatgaacaaattgttatgttatacaataaatttgatttatgagattggatgtaattttattaataccaantagtgctatatatttaatgtgcatattaatatatatttataatgttataccttttttattacctttttaaaattacacttttaagagactgactttaacaatcaagtatgagttgtttaattactcctggctttaacttttcaaagtagctttattggntttatggtcataacagtaagacatcgaaatttttcaaaaattcaaaaaaaaaaaaaaa

SEQ ID NO: 55855 - DNA, 582 bp, Homo Sapiens
  misc_feature (553)..(553): n is a, c, g, or t
aagatgaatccaaggcagtggagccatatctctgaaagtgccaaagacctagtacgtcgcatgctgatgctggatccagctgaaaggatcactgtttatgaagcactgaatcacccatggcttaaggagcgggatcgttacgcctacaagattcatcttccagaaacagtagagcagctgaggaaattcaatgcaaggaggaaactaaagggtgcagtactagccgctgtgtcaagtcacaaattcaactcattctatggggatccccctgaagagttaccagatttctccgaagaccctacctcctcaggagcagtctcacaggtgctggacagcctggaagagattcatgcgcttacagactgcagtgaaaaggacctggattttctacacagtgttttccaggatcagcatcttcacacactactagatctgtatgacaaaattaacacaaagtcttcaccacaaatcaggaatcctccaagcgatgcagtacagagagccaaagaggtattggaagaaatttcatgttaccctgagaataacgacgcanaggaactaaagcgtattttaacacaacct

SEQ ID NO: 55856 - DNA, 551 bp, Homo Sapiens
  misc_feature (525)..(525): n is a, c, g, or t
  misc_feature (527)..(527): n is a, c, g, or t
  misc_feature (529)..(529): n is a, c, g, or t
caagtctaagctttgcggagcacatcagagtacacacaaaatcctgtcctgctccaaatgaactggacattaagaaaaggctcagccaactgtttgcaatgatagaggccgattggagttgaggcagagtgggacatccaaagcgttgagcaggattggtattgcccaggaatccacagcaacagtagccagacccgctggtagacgggttttaggagcaggtatccttctttgagcaagagtgtcatgcaagttaggaatatgaagaaccacaaaggattttctcttcagaagcatcaccaattatatttctttttttttttttttttttccaagatggagttttgctctgtcacccaggctggagtgcagtggcgtgatcccagctatattggaaaagacagcattataaaacaaggacataattttatgaaaaaggaggcatctgcaaacgaaaacaatttctacgaggttatatgtgattgttaacatttttaagaaaaggtgcacacagaaatccagaanananaaaaaaaaaaaaaaaaaaggac

SEQ ID NO: 55857 - DNA, 631 bp, Homo Sapiens
ccaaacatcttgctgtggcctacaggagacaggatgatccagcccttgcctcccttactctcatctctagctaaaactgcgctgctgtctctgcactccagccactggcacttcctgattacttggggcacgctgtactcatcttgctcccagcctctgcccatgcaggtgccctctgccctcagcactgcctttctctacttcatttatagactgctgtccttcagatctcggttgaagtgtcacttccttggggaagctggcttacactctcaggactcggttaggttcccccgtcaggctcttctatgtcaccatgtttctatttttcacagcacttaacctgttttaattacgttgcaaatagtttttgtttgggtctagagaagcatgtattcactagtacattttatttgtgttctctaattattttttctgcagctaaattagaaatttgtagttttccccctaaaaatgcaatgatgttttctctgattttcttgtcacctttcttccaaaaaatccatgtgttcaaagtgcttgcttgcagtttggccccaataaataaaatggttgttttaatccaaagaaaaaagaacacctacaccacataaccatcagtcaaaaaagc

SEQ ID NO: 55858 - DNA, 329 bp, Homo Sapiens
ttatcttctttttcctcaagaagtcattgagggctgttgtatccctataaaaggagaatttagagtagccaaataaaagggggctgaagtagtctcattacggaaaaagagagtgtgagcagccttttagtaattgattgcctcaagatgtggtattcagccagggtgaagggaaagtagttggggctgtggatctggaggtttacagaagcctttacccatcctgagactcagttctgctgttggtcttcagagaagtgtctgcacctgctgagaagaaatcacaccactgcactctagcctgggcaacagagcgagactctgtctca

SEQ ID NO: 55859 - DNA, 497 bp, Homo Sapiens
ccgaggtaccacaaccggtgactgctgagctgaactaaggatgcaatgggatgaaagccaatggggaaatgtgcctcaaatacttattaacccctggtacaggaggcctggctgctgggattattcctagatcctctgtgacttctctgaccatgtcacacactaaccttcccagtgaaccttctgctctgagcaggcctggccttctgcactcctgcaaatgccagtggcttttctatctctgagctactgggtctgctgctcccccaggctgaaatgccgtccctatgccattcttttctttgtccatccaaatccccagttattaaaaaaaggagaaaaatttaaaaggggttacctgttcttaaaaacaaacaaacaacaacatcaaaaacaaaaacagtcccacatcctccctgaagctttcctaaaaactaaggctcacactgttctctcccaactgaactgcaaaataaagtattaacatacacaataaa

SEQ ID NO: 55860 - DNA, 477 bp, Homo Sapiens
aaaaaaaaaaaaaaaaaagaaaaaagaggataaagtgctttaatagtacagtttcatttgtccactcataatgtgaatttatttatatggtaaaagatttgtcttgttttgtgggaatccttccattaatttcctcctgcagccccagtgtggggattaggaatatgggctctgatgctgggtagacctgggttcaagttctgattatgccatcacttgctctttgaacaaaatccttagctactttatgcctcagtttcctcattacttaatataagacaataccaacttcatagggttttaatttttccacgtgtatatgtgtaaaacataactttattcctggtaaagtactatgctgtcacccttaagtcgaatgtttgtgccttgttaaaaaaaaacactggtttaaaacacctacttgtggtcgggcgcaggggcttgtgcctgtaacctcagcactttggaaagccaatg

SEQ ID NO: 55861 - DNA, 635 bp, Homo Sapiens
cgaagcttatctccttccccaaattgttgataatgaaggcgaaaagagatatagctacaggtaaactagattgaatctgctgtttatgtgttggaagatgacgtttgaagatgagttttagttcttagcaccaatacaacaaatgatgggatttgaggtttaagtgcctaagtttaaggctctcatataataactcttaatttctttttgtgtcgggaaaagaacaaactcttgccttgaattaaccagttattttaaaaaatcatagacttctgtcattagaggaaacggcctgaactccattaccaggtgactttttagctttagtgggtggcacatgggactgtctgtggtgtgccatctgcagtgcgcaagccatttgtttctggaaacagtctcacaagcaatgattctggtgagtttagaaatgaatcaggatgtgctaagctcaatgaggactcattagccttggataatgtgattctataaatgaacagaatggagacggtgaagactcaggagtatagagaaaataggatgacactggaagctaggctgattggtgggagttttgaatcaatgtgcttcaactattagttgattaagcatatagtcgaattagtaaagagtgggag

SEQ ID NO: 55862 - DNA, 702 bp, Homo Sapiens
ctcatttccttcactcatgattacgaccgctgccccatcgccctcatttagactttatctgcatttgctgttgggttctctcttcatcttgtccgctgtgcctgccgaaaccactggtctttggtaagaaaactcctttaccttctccacctgcttcctagaacagcccctctgccttcctgtggatggagagctagcctgcccctgatgatactcctgtccttctggctttctcaggaagcagcggcacccacatagggaggctgcggaaggggcacaatctgtgtgctttccactggtcccgagagagagtggcctggcccttctcgttagttcctctacccgagtccttctacctcttcctgtcccttttgctttattgcctggcctcgtggacttcatcacatgcttttagcatttgagaacctggccaggatggaaatgtcctattaaatgttccttatacataaaatgatctgaggaaaatccaaaattatttcctaacatcttacgtactgggtataaaagaggttcgctcttcagatatacagagcacacacttactgtattgaaaatatgattacattcagcctaggcaaaccatcattttaggcttacatgacataaatgtatttttgttaaatcttaagacatttctgtccacaggcatggtgatataagaaagagaaaaaaaaaaaaaaa

SEQ ID NO: 55863 - DNA, 319 bp, Homo Sapiens
ctactactactaaattcgcggccgcgtcgacgacagggtattggtatgttgccaggctggtctcaagcccctaggctcgggtgatcctcccgcctcagcctcccagagtgctgggattacaggtctgagccactgtgcctggccagactttgtaatgtaagaaagtgttgcctagatcctccatggactccagcctgtctagattattcctgctcttcagtgattagagtggtttctaggcttcttgatggcgcaaggatcacaaaaaattatttttatgctaacagtgaaaagattacagcaagaatggtttggagta

SEQ ID NO: 55864 - DNA, 478 bp, Homo Sapiens
tttttttttttttttattgttgggttttattgcagtaaaaagaatggtttttaagcaccaaattgatggtcacaccatttccttttagtagtgctactgctatcgctgtgtgaatgttgcctctggggattatgtgacccagtggttctgtatacctgccaggtgccaaccacttgtaaaggtcttgatattttcaattcttagactacctatactttggcagaagttatatttaatgtaagttgtctaaatataagccagtttgtgtttctgtccatttcttgacctcaacacaacagacatttggggccaggtaattctttgttgtggggtgcctgtaatccctatgctttgggaggatcacttgagtgtccaggagttcaagagcagcctgggcaccatagcaagacccccatctctgtaaaaaaaaaaaaaaaaaaaaaaaaaaaaaagcctacagccgcggccgccctcgtgc

SEQ ID NO: 55865 - DNA, 574 bp, Homo Sapiens
  misc_feature (10)..(10): n is a, c, g, or t
taaaacaagnaaggcattcctgttataaaaagtgtaagcaatcctatgttttgaatattgaatgaaatgtggacatttccctcatgccgcacccaatcccactttcttacccagaggttacagctatctacttacgcagtagatgcttggcaatcctttgccccttccctccttgaggtgactaagatggtcatgcagacaagccacccctcccaacagaacccatgtgatctagggggaagctgaccccacccataatgggccaccatcagtctagggctgtgtttttttgacgtgtggaccttgaagccttcaggctcctcaagatgctttcagctggtccaagggaaaaatgttttcacagtgatactgagacatcatttgccttttcactattagatttacagtggtgatgcaaaagcaggggtaggtaaatccactagcacctcactgagagtaaggcaatgacacagaaagttacctactagtgaccatcatgttcttcatcacaatgtgatcatggcagaaaaacgcttaagaatagcctgaatgtgatagcaaaaaaaaaaaaaaa

SEQ ID NO: 55866 - DNA, 750 bp, Homo Sapiens
  misc_feature (713)..(713): n is a, c, g, or t
ttaggactgcaaataagtaacagttgcctcatcatgttagcacttaaagtgaacctggcatttagatctcaaaatctagaggcaaatgaataaggcagggaatctgtccttttctccccatgaaaggtaaagcccttggtaattcaggtgcacactctgataatgtacatgaaaggtcttccttgataaacgataaaccttgtgattttgccacacaagaatttagctaaaccctttcctaatgtcattgtatatgagtagtacagattccatgtgtttgtttccattgaatatacagaaatactgaatacttccttaaaacagcttttattgaaaaaaggaagctgataaaaatcactttgcttttttataaaaacgcttgataggattacctttctagagagacttctgtgtatggccacacttatccaccacagtttttgtttatatagagagcattttaaaaagaagaaggttttcctggccatgcacagtagctcacgcctgtaatcccagcactttgggaggccaaggcggaaggattgcttgaggccaggagtttgagaccagcctaggcaacattgtgagactgtttctataaaaaaaaaaaaactgaaaaatcagccagccatggtcgcccatgcctgtgttcccagctacttgggaggctgaagcaagaaggattcttgagccccggagggtggaggatgcantgagccctaatcataccactgcattccaagccacgga

SEQ ID NO: 55867 - DNA, 880 bp, Homo Sapiens
tagaagtcttccactctgctccatttttagcagcaagcatttcatgtagcataaaccttggcagataagtgtgcctaaggtttatacagtctgtccgcttggatgtatacaaatttagatacatattttaacatgtgttctcatagatgactttataacaacacacattacctataggtgtctagactgtgtacatacaagtgtgtacagacaagcttcatacgtatatactgtaatccgttacaacaaataaattttaaatcatcgtttaacatgtatgtggtacttctacagtgtacattgttttcattatttattgtaacattgaaaaccacagtgcagggaaaacaaaagtatcccagcatcttcatcctgtacacttggaattaatttcatttgggcatatccaagataaactcaactttcaagaaatcttgtatattatttaatcatctgtgttaggatgacacctatgattgatgacttcggttgaatagctttattctggatttttcataactaaagctaaatccaaagacctgaaaaaggacaaaaagaaaaaaaaaaaaaagaaaaaacaaagaaaaagaagaaaaaataataaagtcaagcgcaaactgatggggagacagtgggctctggtttccaggattgagacaatggtactgcggtcttggggagactgcgttagctagtggggagtggtgatttttttcatgcttgtcacatctaaatggtctttaacatgagaaagttttagagtttataattttcctgctttgtttttatttagactatcaaatgaagttatacatgtttgtcagttcaaaaaatgaaagacacccctctggccccaccccacagaaatgcttttttatct

SEQ ID NO: 55868 - DNA, 565 bp, Homo Sapiens
aaaaaaaaaatgaagtaatgctgtgaaaaataggctcggcaggaatttgcacgtcttgcatccaagtatgtctcttccttgtgtcgtattctgtgctgaagaaaacattagcatgccatgaactgaagccaaatatcagtgggttaagccatctctcatcttgttctttgccttctcttctttaagactagggaattggttattggataatgctcccaagtctggccaataataactcaagagtaccctgaatcaacatctatggcttttccctaaaccctgatcttagggccatccatttgtattttgaaatgatcaagctatcctttactccagctgaaaacttacttacctgatacttcatcaggtctgctcacaggtgtatcaaagagagacggtacctttggtgaaaccattgtttagctggttttcacttcatccagttaccagccaatcaaaagtttttccaccgatcatattttcataccattgattgtattaacctagtttaaatcaaatctaaaatatgtgtgcttattacaattattgaatggttgcatgtgag

SEQ ID NO: 55869 - DNA, 887 bp, Homo Sapiens
ctttcagggaggatctgtgaggtcaactgttggcactgtggcatgaatcaaggtggtggcagcaaacttctagtagtttgatatgtccttgatagaacaaatagcaatggttaactattaaatgttgacctagccagcgcagtggctcatgcctgtaatcccagcacttgggaggctgaggcgggcggatcacctgaggtcgggagttcgaggccagcctgaccaacatggagaaaccccgtctcttctaaaaatacaaaattagctgggcatggtggtgcatgcctgtaattccagctactcgggaggctgaggcaagagaatcgcttgaatccggtaggtggaggttgcagtgagccgagatcataccattgcactccagcccaggcaacaagagtgaaaccctgtctcaaaaagaaaaaaaaagttgaccttgagaatttataatattctgagaaaactggaagcatgcataaagccctctgctgtgcactgaagtatgggtgccttgaggaaaagcagttacacagttgagttgcaagctgaatggctgtgttccagggcatgccctttagaattgcacagaacttagcagattacggtatttaggacttgactattggtgatatttctggacattaatggaatgaagcttctcaacctcaagggaaacaacttgatagtgttgccggtgataaagttttcaggcaagattggactgtcgagaattggtatccacatgagcttattggtgggatattacccagtgattggttcagaaatgttactggaagaatacaggaccattcagggacagtgtgtgtttcaattgcgtgtagtgttcaaggtaaaggcggttagttaaacaaaggaaaggagacgtgaaa

SEQ ID NO: 55870 - DNA, 571 bp, Homo Sapiens
ttttttttttttttttatacaattccattggcatggtccttcaccgaccctatgatttgcactttttatttctatgtgtgccacacacaatgcagtattaatggcaaccaggtaaatattgatttattttttaaagcttttcttcagtgttttgtcaaccatttcaaagtgtctcccaaaaaaggatgctgaagagcaattgctcccttaagcaacagattcatatttaccctgggttaatacaacaaaaggcctgtataattgtcttttcattgttaacacccaaaatagcatctatctagacagtatccccaaagaatttggaaaatctgatggtgtgagcagcagccgttagtatcagggtttcccattcttggacagtccgaggctgtgacctgttagataattagattagacttgaactggaccagagtttgttttttgaatttatgagaaaaaccacaacactaagttaagtttgaacttgtcaagtactgacatttgttgagtgtcctacaaattggcactacttttcctgatctgtataactgactgcaaagtgtttgttttt

SEQ ID NO: 55871 - DNA, 963 bp, Homo Sapiens
  misc_feature (3)..(3): n is a, c, g, or t
  misc_feature (72)..(72): n is a, c, g, or t
  misc_feature (228)..(228): n is a, c, g, or t
  misc_feature (318)..(318): n is a, c, g, or t
  misc_feature (429)..(429): n is a, c, g, or t
  misc_feature (431)..(432): n is a, c, g, or t
  misc_feature (436)..(436): n is a, c, g, or t
  misc_feature (452)..(452): n is a, c, g, or t
  misc_feature (465)..(465): n is a, c, g, or t
  misc_feature (479)..(479): n is a, c, g, or t
  misc_feature (481)..(482): n is a, c, g, or t
  misc_feature (488)..(489): n is a, c, g, or t
  misc_feature (585)..(585): n is a, c, g, or t
cgngctgcaggaattcggcacgaggtctgtggtagttggtctgctctgctctttgcttcttttttgtagttntcttgatcgtgatcaattaagcagaaagtagaatttcagtcaggtaacctgtctatattagctaaattatcttttgcttattacatagagtgctagaagtatgctgtcatggcatatgtcctagtttctcatcaaatggaccaaagtcagtgattntatttgaagaggaaaaattgaacgtcattgtaaattaagttgcaagtttagtaaccatattgtaccactgtttgataaatttgaacgctntatggtatttcatatttagaatgttcaaaatagtactgaagtattcaaatacatacaaccctgagcgatattgaagtaaaataaacatgtatttaaggaagaaaaaaaaanannaaanaaaaaaaaaaaaaaanaaaaaaaaaaaanaaaaaaaaaaaaanannaaaaannaccaaaaaaaaaaaaaaaaaatcttggaggggggccccggaccaaattcgcctatagggagcggattacaatcactggccggggtttaacacggtngaatgggaaacccttgcgttaccaccttatcgctctgaggaatatcccctttgcaagttgcttaaatccaaaaggccccccggacgctttccaaagttgccaacctgatgggatgggcaatgtagcggtaattttgtaaaattcggtaacttttgtaaataggtctttttaacaataggcgaattggaaatccttatattaaagaataccggaatggtgaggtttgcctttggacaaaggcctttaagaccgggtccacccaaggggaaaaacggttagggataggcattctgaccctccctataagttttggtcaggggccaagcttaatggctctaaggcgcccttttaattccgaaacccaaccgccaaaaaggt

SEQ ID NO: 55872 - DNA, 662 bp, Homo Sapiens
ctataccatctaggtttgtgtaagcacactatgatgtttgcatgacaaaatcgcctaatgacacatttctcagaatgtagttggaggaaaaaaattgaaaggagagtattacttcatgacacaggaaaatcatttgaaatacaaattccagtgtccataaataaagttcactagaatgtggccatgctcattcatttacatgtaatctgtggtagtttttgtgctactgtggcagaattgaatacttgcagtggaacttgaatgggctacaaggtgtatttagtacctggcccttcacagaaaaagtttgctgacctgattgaatgtgcttgtgtgtatcacaggaagctcaccaggactcttggtatgtagcctctagctcccaaaggcatctgagccccactggcaggactcagttacctgtctctgtctaagcatgactccacccattagcgtccagacaacgaagaaaacttctattttaaagagcttgactaaccccctccttattatctaagttagagtagctgtgccaccccttaagtagcttttccttcttcctttcaaataggggttggaagagtagcaggtgagaacaacctctttcttcctcaattgtagagactcaatagtctaggctataaattaaaaaaaaaaaaaaa

SEQ ID NO: 55873 - DNA, 744 bp, Homo Sapiens
cgcgtgcaggacttcctgggcctgaaacgggtcgtcacggacaagcacttctacttcaacgccaccaagggcttcccctgcctcaagaaggcccagggcggcagccgtccccgctgcctgggcaagtccaagggccggccacacccacgcgtgccccaggccctggtccggcgcctgcaggagttctaccggcccttcaaccgcaggttctaccagatgacgggccaggacttcggctggggctgagcggcaccctggggatgctcagcaccttgattgacacccgctcgcctggccagagcgggctgcgtgcacatgctgggcagagaggaatatttaagaaataaagcttggacccagatttttccacaaaaaaaaaaaaaaaaaaatgcggcattgcggccgcaagcttattccctttagtgagggttaattttagcttggcactggccgtcgttttacaacgtcgtgactgggaaaaccctggcgttacccaacttaatcgccttgcagcacatccccctttcgccagctggcgtaatagcgaagaggcccgcaccgatcgcccttcccaacagttgcgcagcctgaatggcgaatgggacgcgccctgtagcggcgcattaagcgcggcgggtgtggtggttacgcgcagcgtgaccgctacacttgccagcgccctagcgcccgctcctttcgctttcttcccttcctttctcgccacgttcgccggctttccccgtc

SEQ ID NO: 55874 - DNA, 461 bp, Homo Sapiens
caatacctagctgcataatacatctaaaatctatgggagtagcttccagacatgagtatttttcgggaactcttcagatgcctgcacacccggtaagaaactctactctagagaatttatgggtcgactgttccagaagcctcaggagtacagttctgccttttccttgatgctgtttgtagaaagaattggaaaaaaaaaaagatgaaaagaaaagaaaaaacaaaaaaaaagaaatacaatctgccaaatgccttttatgtcaaacgcatttttttctgatctgagaagttttgaaaaagtatagcaattaattattaatatttgccaatgactcacctttactgagattaaaattaatatgaatttattttagaaaactccctatgagtggctatcaaaatattctatgggttatcaaagaaggcaatatcaacaatagtggataggctttaatgaca

SEQ ID NO: 55875 - DNA, 1008 bp, Homo Sapiens
ccacgcgtccgtccagcctcttaggaggctgaggcaggagggttgcttgaggccaggagtttgagtctagcttgggcaatatattgaaaccttgtctcttaaataataattattattattgttattcttgacaggccagtgtagaacaggtggggcatctgtggtatgacagaactgggttccaattctgtcccttcacctgtcccaggttcctcatctgaaaactgtgacccagtaaacctaatttcatgagcagctttcattaaaattgaaataatgttggaaaatgccttgtaaccgtgcttgatatagagtagttacttagccagttatttcctctcttcttccaattcctaacaaaatggaaaaacgtttggttgctaggaaagagctctaaggggattttgttgttgtttgagacaaagtttggctctatcgcccaggatggagtgcagtggcacaatctctgctcactgcaacctccgccgtagacagggagccaaccatagtggggtgcacctggtctggagctccaggctacttaggagggctgaggtagcgagggttggctctttggcccagcacttggaggtctagcctcgggggcgaataatatttggaaacctatggccgccgttacaactgacctaggtaagggcctcggggccagcgggcttaatggcccggtgggtccgccccatatttgcgcaaggcccgaatgcaattgcgatcccctttggaccccccctgaagtggagacaagcggccccggggggaaaatggccagacgtttcatccggcttttatttgccccgttccccccctgtctagaccccccctttgcaacaccctaccttcttgtttctcttcacgcgaaagtcgcgggcgacgtatctattaacgggcccctcggcgccaccggataaggcccccccctggctgccaccggcgcaagggacccaccgccgctggacgaccacgcgtgccgagacaccttcggttcccccc

SEQ ID NO: 55876 - DNA, 474 bp, Homo Sapiens
cacaaagaagaaaacaaaaaccattagccgagtggttaagttaatctgtaacatttcacagccccatgatagaattcctgccgatgtggagctcggccaaggcagcgaacggcatcaaaactccaaacacttttagtccctaggaagaccctcggttaagatttctccccagagtgcccgggccctttagtcctacaaaaccaaggaaagggaggcagcatagctgcatccgccaggggatgcccaccacccacctgtcccccggctctgctccagcatccgtctgtcctctttagtgccatatttcaccctcagccccagtgcaggtgcccgcagccaagcccacaccagctctggggcacgcctgttccagttgcatttggatacttttgcaggtgtgagagttgggtgctaaacgttgggaggtttgtttatattaaaatatagaggtaggtggggcacagtggctcacat

SEQ ID NO: 55877 - DNA, 629 bp, Homo Sapiens
cccggccgacatgttttttttttttttttttttggccttttgaccgcataggtaaagtcctgcttgctgctgttgacctgatgaagggcagcatgttggaacttccatctgttttacactcttttggcgggtcatttctcccactgtgagccaggcttgagaatctaggcagatgtcagaggtctgtccctatgtttctttcaagctggcaagaattccaccatgactgccacttgctcccccatgggtgtcagaatctgtcataatggttggatgtttttgtaaaacataaacattcctgattttaaggtgtacaatgagacacattttgtaatttgggaaggtacaccatttcagtttagcaatagggagctatggagttaggcagggagtcaatagaatatgtgcagtcttggcagtatttcagtgtcagttgatccttgattgttcacagtgatatataatgccttagtatttaatgagaaaaacagtagaaaaatttatgtggttcctcatcatcccccatgtcttataccttgcttgtccctatctttaaagtaacctccaaaacggatgaaaggttttatatttaaaaaaaaaaaaagaattccaagcatgtcttaaagtaa

SEQ ID NO: 55878 - DNA, 391 bp, Homo Sapiens
ttttttttttttttttttgaaatccagcatgagaaatacagtacctgctatggcaaaaaatacacataaaatgcaacttttcagcttatttgtacattagtagagtttaacattttattgtttgtttttttaagtgaaccagtgattttaagtaccactatactaaaaaggaaaataaaatatagaaaagggggcccagcctgccatgcaagtgcacctctaaagtgcctagtttctgtgtccatgtaaaaccagtaatatgaggagcaatttcaacatatgggagtttgattaaacctctatgctaaaaaaaaaaaaaaaaaaaaaaaaaaaaaaaaaaaaaaaaaaaaaagcctacagccgcggccgctccaacatcagacctcgtgcc

SEQ ID NO: 55879 - DNA, 540 bp, Homo Sapiens
  misc_feature (409)..(409): n is a, c, g, or t
gacccacgcgtccgacccacgcgtccggttgagtgagtgttcttaattccttttggattctagactcactaataatgaagttcttttcttgttcatagcttaaggtgcttattttttctattaaaattaaattaacaaaagccattctagaaatagaagacatagtatggtacatgcaaacggtgtctttcctgcttttttctagcactagatttatagttgagtagtctttcttgagtagaagggcagaataaaagtttttttgagtttttttcaaaaataactttttccttcagcaatatacctcatctgccttaaattttttacagctctttacagggaaaggggagaagggatgggaaagacacacagcacaataggaagtgtatgattacatcactatctcgtntgtaagtttcttttcctaatcaacattatgatttcgaaatacatgtatgtgaaacaaatattaagagaaaaagaattaacattgtaatgctgatggtaatactctcttccagaaagagatgagatggtata

SEQ ID NO: 55880 - DNA, 497 bp, Homo Sapiens
tgggtcagttgggccttcataaacactcacctggctggctttgccttccaggaggaagctggctgaagcaagggtgtggaattttaaatgtgtgcacagtctggaaaactgtcagaatcagttttcccataaaagggtgggctagcattgcagctgcatttgggaccattcaaatctgtcactctcttgtgtatattcctgtgctattaaatatatcagggcagtgcatgtaaatcatcctgatatatttaatatatttattatattgtcccccgaggtggggacagtgagtgagttctcttagtccccccagagctggttgttaaagagcctggcacctacccgctctcacttcatctgtgtcatctctgcacactccagcccactttctgccttcagccattgagtggaagctgccccaggcccttaccaggtgcagatgcccaatcttgatgcccagccatcagaactgtgagccaaataaacctttttctgta

SEQ ID NO: 55881 - DNA, 633 bp, Homo Sapiens
  misc_feature (543)..(543): n is a, c, g, or t
  misc_feature (557)..(557): n is a, c, g, or t
  misc_feature (577)..(577): n is a, c, g, or t
ggatggcagccatcttaccttccatcagaggagcctcacgtacccaggaagaaagaaggtgaaagaggaatgtgaaacaggtggctgggacccagaaaccctcttaccctgcacctctgtcatacttctcccggggcatagggagagttattctgcttctctttgccttgttttgtaacatggggtagttgttggtgcagccatgttgtgctgagtgaacatatattaagatctttggaacctttaggagactgaaaataggtaagtatgaattagtatttctggaatggtattcagagaacttcgtaccatttttataaatgtgaaaggtaacctaattagaacagcttggcacttgtcagtacactactagatttcaaaatcagattctacttacagggagaaaaaaaaagcccaatatgttgaacagtattgaaattgttgcataaataaaagtccatcattgtagaccagcttactgaagtgaagaaagaaaaaaagtatatctttgtcttgaaggagtagatagtgacatgtcatgtntctttcaggatatntaggatctggcctaattcanaagaatatttactgaatgcctatgttattgctgctgctgtcacatttacatgaaaa

SEQ ID NO: 55882 - DNA, 1073 bp, Homo Sapiens
ctgtattggatctcgcctgcagttgctgtattgatttgggcccaggcagtgtttttaagtgataagaattagtgatgaagatctaaagggatattttgcaccaaaatccaggtttctggcatctcttgaaaaatccaaagatttcgcaagttcacctaggctctcagaaagtcgcagttgttgggagttgggccggagccagaactcccaacttactgtggtccggccactcatcccatcagctcctgaccaagcatgagtagccattcatcatggcttgcttttagtgtttttggtgtttatcttaaagtacagcaaagaagaaagggaagtatttcttgaacccatgtctgtgtcaaaacagtccttgcatctttcctgtctttaggtacgcaccatctttgctgtctttaagtatgtgccatcatgggcagagggggctaggccaggaacacctggtgttagatttgtagccagtggcaaccgtacccatctgtatccccaagttctacacggaatccctccagcacttcacgactccattatccagctaccactaattcctttgtgggcagagtccagccacgggcagcccctgccctgcctctggtcaggacaacacctgcccaaggagagcaagggcctgtgacctctgctggcctgtgcgccctcacctgtcacccagctcagccctgtgtctggcctacccagggaggaaggaaccagatttatcagcctgaaagggaggtagaagttttggagaaaagacccctgtttcgggtgtccaagtaatgaactgaactttattcggaacctcatctccaatccaaatccccaccgtggtctctctcttcctcagctttttcctggggcggggtttgactcccggtggtcacctttatcacagggggcaccatggggggttgaagaggagggaacccttgggcagtaaggaaaataccctttggaacagggttttaaattttcccggggggaaatttccagtcccccttcccccttaaccctcaaaacaaagcccctgggggaaagccccaccctttggcaaacccagt

SEQ ID NO: 55883 - DNA, 567 bp, Homo Sapiens
caaaatctgtccatttgccggaggcaattgtatgtatgttagttggagggtattaaaaatcagttttattccaaagatttaaaactagacatgacttaaaaacaatttctggagcactgcttgctgacaatctcgtagttctctgctgcatttgagtgcattttgtggccagtccatcagggcgtaccatgggattatatttgaatgtgtggtgcatccttcctggatgaaggatgtgtgagggaccttgaacctcagctgtattaaactgtagcgcctccagtcagtgcactagatgaaacttttagacaccctgaattctgttggttcctttcttttcctttatgtagcagcctccagcatgaatgcacgcacacgccagtgatggcattaagccatggccaccacgatttgcaaatgttctctcccaagctggagctgctcttgcctctcgaatgctattattaagggtttataatacttaatttaattttcgaactgaccaatgcaaggctctattaaaaagaaagtttaaaaaatgcaaaagagtaatcattgcttgtttgc

SEQ ID NO: 55884 - DNA, 545 bp, Homo Sapiens
gaccacctcaccgggcaaatggggtcggggggactggggcaccagaccaggcaccacctggacactttcttgttgaatcctcccaacacccagcacgctgtcatccccactccttgtgtgcacacatgcagaggtgagacccgcaggctcccaggaccagcagccacaagggcagggctggagccgggtcctcagctgtctgctcagcagccctggacccgcgtgcgttacgtcaggcccagatgcagggcggcttttccaaggcctcctgatggggggcctccgaaagggctggagtcagccttggggagctgcctagcagcctctcctcgggcaggaggggaggtggcttcctccaaaggacacccgatggcaggtgcctagggggtgtggggttccgttctcccttcccctcccactgaagtttgtgcttaaaaaacaataaatttgacttggcaccactgggggttggtgggagaggccgtgtgacctggctctctgtcccagtgccaccaggtcatccacatgcgaaaaaaaaaaaaaag

SEQ ID NO: 55885 - DNA, 601 bp, Homo Sapiens
atggattagtggtctcctactggtttattcatgtttggccttgcgcttctcaaattcctttttatacctcatcagcaagtgaacttattccactgccctcatggctagctgtggcctgtgaaatcgtccagattccttgggcagacactcagggtgctttgtatttttgttcggggctgtgttttcagccttactgcttgccgttcccatatgtggactcttgcctgtcgcactgatttctgtcttcccaatccaatgctcatagagatcactaaggataatcctgcttattaagtgatgagttggtttgaattgtctctggtggtagtctaggaaagtgggatttctttttaattttggggttttgtttttgatttgtggtaccaatgaggattttatttgagacagtgtaatgggggccagatgagagaaccattttctttgtaagcttagcatggctgggctctagccagctccagatgaaattttggctaattatccctttagaaaagtcaggcttaagcagaactgggctctaggtcaattaaccaaaagccagttcacccaatgaccagttcatttatttaaaaaaaaaaaaaaa

SEQ ID NO: 55886 - DNA, 448 bp, Homo Sapiens
ttgaatttaggtgacactatagaagagctatgacgtcgcatgcacgcgtacgtaagcttggatcctctagagcggccgcctactactactaaattcgcgggcgcgtcgacgttcgtccataccaccctgtgaataatttatttgtatcctacagtttatatattaagttataatcagtttacttgacaactacttctccactccaaaaaaaaaaacacaataaacacacaaaaaaaacctacaattttttaggaaggggactaggtcttccattttttattctctcagtgtttggtattttatcagccttgtgataagtgtttattaaatgcttggggaatgaatcaatgaatgaatgaagcaatcatcaatcaacaaggaacagatctgcaagactcgatttaaaaaaacaagacatcagaaaaatatgtctacgcggccgcgaatt

SEQ ID NO: 55887 - DNA, 581 bp, Homo Sapiens
  misc_feature (548)..(567): n is a, c, g, or t
  misc_feature (569)..(576): n is a, c, g, or t
ggggtaattttaggtttattgtatatagatttgcattgggcaagaacggaatgttagaaatctgtaatactgtatgctgatggtaaacttactgtaaggatctcatttgggtatctggaaggtgatagttctgtttctttgttatatacacagcatgttacagagatgtgatttttctccccattaaacagaactaaaagacagtatatttatttaaacgcaaagctttttccccttttatgtctcctcataaactccagagacagtctggaaggccctcttaaatttgtcaaagagcagtaaagtgtctcacgctcagtttttctagcagatcgtaatactctcagttgaccctgctgggatttgaacctgcagtttctattaagtttggtgtgtgaagtccaacaccttatcaactaggctttccctctgacatcttgaagcctccgtgtatatcctttggactctgcagcaaagtgcatcagttgttagtttactccgagcatggtattcttagattgaaaagaagtctctgaagatgtccaacnnnnnnnnnnnnnnnnnnnnannnnnnnncctgt

SEQ ID NO: 55888 - DNA, 629 bp, Homo Sapiens
  misc_feature (605)..(605): n is a, c, g, or t
acaaataggacaaagaaagtaagaagataaatgatgacttttatttgccaacatttggttcagcacaactttcctaccctgtctctccccacctttgcccttaggctaaggagcagaaaagtgatttgtcaagatggagcaaggtatttaccagtctaaaacctaatgctgtaaaactaaatgagacaacttggggcttgaatgggtgctgggctgtaggtactgctgggtcactgttgctataaatggtcactggagcagattaataaatcaaggatcagtttcacccacatttaaaggactacttgactcatttctgtctcgagtaaatggactttggtagtagcaacgccataccgtgatgatatcatttgtgttgggaatcaaactgggcaatgcaagagtgtttttgaagcctaaatctatgtaagacttatcagtttgggagaggataataataaaagtaacaatcaatgcttccaaactccaattgactgtcttttttagcttttatatttacctagttgttatgctaaccaattcagctttttactgttgctgttgttgttgttttaagaaataaaatttctgattgctgttttcanaaaaaaaaaaaaaaaaaaggacgc

SEQ ID NO: 55889 - DNA, 436 bp, Homo Sapiens
  misc_feature (436)..(436): n is a, c, g, or t
gggtagctcttgttgcaaaaccaagcagtgaacatgtatctgactttctataacccccttccttggggcctccactcatgaggcatgggaaggtgttttttttctttgtttgtttgtttgtttgaatgcagttgacttttttttttgttgtattgttgcaaaagtaatccatgtgattgatgtttattatgaagaaaacatttaatacagatgaaccaggagaagaaaatgaagttcatccttaatcccagcacccagagataaaccactgttaacattttggaatgtgtcctgtcaggcattcgtttatacacacatatatcttatttgcaaattggggttactggtgcaatttttctaacctgctttttctcccccatttaacagcgtagtgtatccatgtttccatttcaataaatattcttctacaacatan

SEQ ID NO: 55890 - DNA, 580 bp, Homo Sapiens
agatttgtcggcttgcggggagccttcaggagtcgctgtctctgaacttccagcctcagaggccgccgcccttgtccccgagggccatgggccgggtctcagggcttgtgccctctcgcttcctgacgctcctggcgcatctggtggtcgtcatcaccttattctggtcccggtgcccttccagctgtcactgaaatggctttattcgtcaccgtctttgggctgaaaaagaaacccttctgattaccttcatgacgggaacctaaggacgaagcctacaggggcaagggccgcttcgtattcctggaagaaggaaggcataggcttcggttttcccctcggaaactgcttctgctggaggatatgtgttggaataattacgtcttgagtctgggattatccgcattgtatttagtgctttgtaataaaatatgttttgtagtaacattaagacttatatacagttttaggggacaattgagatggctgaactactgaacaaaaaaaaaaaaaaaagggccacatgtcctcaacctgcaggtcgcggccgtagactagttaaaacccccccccgcccccc

SEQ ID NO: 55891 - DNA, 813 bp, Homo Sapiens
  misc_feature (690)..(690): n is a, c, g, or t
  misc_feature (746)..(746): n is a, c, g, or t
  misc_feature (756)..(756): n is a, c, g, or t
  misc_feature (767)..(767): n is a, c, g, or t
  misc_feature (789)..(789): n is a, c, g, or t
gagtaaataccttacacagctgtcctctgggtttggttttctattttcttctccaaaagttaagttagaaaagttctgtgttagggccgggcgcggtagctcacgcctgtgcctcccaaagtgctggaattaccagcgtgagccaccatgccgggctcacacgtttgagttgataccattgtgccattcctcttttggcctcttttttgtccatagaggcttcaagatagataggtaagagcccagtagtgttcataagaagccaatagagagcaggagccactttatcaggtggcaggtgtcctgggcctccctgctggctagtcccaagcggtggtgttgccaggatgtcttggaggtgataatgggacacacagaggcactgagtctccataggttaaaatgccaccaaaactggcctttgcctaatatccctcattgactatttagcatttaatttatttattttcctgacatttctgcaagctttgtatttatatttccactttatagatgaggaaatttgaggctcttagaggtaaaatgacttgcccaggtcacacaggaagtggcagagacaagctttttaaataagaaaaaattaataaaatataatatgagagtaacttaaaatattaataaaccacaattttaaattaattaaccgtgataaccaacattaataaaagntaagataccaaaacactggtgtctaattctttcaactaacaacttgaattattttncattttaaantaattaaccgngataaccaacattaataaaagntaagataccaaaaaaaaaaaaaaa

SEQ ID NO: 55892 - DNA, 634 bp, Homo Sapiens
  misc_feature (12)..(12): n is a, c, g, or t
aaggccttgagnacctgcattaatgataatatagcttataattagcttatcaattaaatatgcatggctgtatctaaagggcttgaaaactgtttttaaggtttttcttttctatcttgattttatatttaggaaaacccaggtaaactcacaaatagaggaacatttttttaagcaggaaaatatgtaacaatttttgggccaaatgcttaagaagtgagaattttgaaatggaaacaaaagttggaatctgtcttagaagtaatctactccaccccttctctcccagcagtttgagtgctctatttaaagctagaattttgagcatgagaacgccactgtggacaacagagagattttctctctctctcacctcttctctttctctccttctatctccccctccaccaccatctctctcatcttcttccctttgtccccaccccattgcttttttctttctgcttttcctgttccctatccttacgcaggattgttttactgttagccaggttaagtttaagcttcttgaggactttagtactgaaagacaatggctcacttgtaagacctagttgaagagtacagatttagatttgttcagtgtgctgtgatctgtaaaaaaaaaaaaaaa

SEQ ID NO: 55893 - DNA, 473 bp, Homo Sapiens
  misc_feature (348)..(348): n is a, c, g, or t
  misc_feature (360)..(360): n is a, c, g, or t
  misc_feature (385)..(385): n is a, c, g, or t
  misc_feature (392)..(392): n is a, c, g, or t
  misc_feature (417)..(417): n is a, c, g, or t
  misc_feature (471)..(471): n is a, c, g, or t
aaattttgatggcatatgggtttggttccacttgtagagaataaatgttcacaacttactggtattagcacacacacatcacatgcagaaatggtgttttcttgccacttactctttctcataagatgcttatattcctgtgggcatttgtcttccacactacagcacataatttgatgaaactgattttctgtgcaagagcttgtgtttctccaactctgggttttatgggaccacttttcattgggtatatagggagggcggttaaaacgtgggtgggtaggaatgcaggttttagggttaggctggggtgtggaaggaatcccagggtctttggggatagtcttnggcaagttactncaactcctcttaaggttaggtttcnttgatcntgttcagatggacagttaaacctcnggagtttgtggaaaattaatggggttttatgtgtgttaaagccctttggccttntt

SEQ ID NO: 55894 - DNA, 700 bp, Homo Sapiens
  misc_feature (9)..(9): n is a, c, g, or t
  misc_feature (16)..(16): n is a, c, g, or t
  misc_feature (546)..(546): n is a, c, g, or t
  misc_feature (625)..(625): n is a, c, g, or t
  misc_feature (650)..(650): n is a, c, g, or t
  misc_feature (691)..(691): n is a, c, g, or t
ggatcctcnagcacgncggcctactggaaaccaataatgattgttctgtttttctcaccctactatgtgaatatatattctgttagagatgggctgttatctgcaatgtggactcaataccatgggcttgagtttggttagttcatcattagagattttttttcagcagttggtttactttatgagaaaggatcatgagtttaattttcccactgatatatttgtgttctcattgctgagatataagtttcttaatgatttgttacctttttctattttcctagactagtattaaaattttgatggcatatgggtttggttccacttgtagagaataaatgttcacaacttactggtattagcacacacacatcacatgcagaaatggtgttttcttgccacttactctttctcataagatgcttatattcctgtgggcatttgtcttccacactacagcacataatttgatgaaactgattttctgtgcaagagcttgtgtttctccaactctggttttatggaccacttttcattggtatatangaggcggttaaaacgtggtggtaaaatgcaagttttaaggtaactgggtgtgaaagaatcccaagtccttgggataagncctgggaaagttactcaactcctcnaagttagtttcctgatctgtcagatgacaattaaacctcanagttgtgaa

SEQ ID NO: 55895 - DNA, 460 bp, Homo Sapiens
tcagctccacgatccagcctaggatcatatgttgtattgccataaccctctaatctggagcagttcctcagcttttctttgttttttataatagtaatatatttgaaaaatacaggacagctaaaggatagagtatccttctatttgggtttttctgatgtttcctcatggttagattggggtagtgcagtgagggttgaaatgctgtaagtgatatgtattgcaggtatacatccagatgcacagaatgtccatttgtcccttattggtgatgctaattttgatcacttgggtaagatgtccagtttctccagtgtatcgttattgtttttccttttgcaattagtgggtaatttgtgaggagaaactttgagaccttgttgacaattctgttcctcatcaaatctacccctcctaggtttagcatcctttgacgattcttgtctgaataaatttttac

SEQ ID NO: 55896 - DNA, 626 bp, Homo Sapiens
ttttttttttttttttttaaagctatatcttttattcctttcctcattatggataaattttcatagaaaaaaggcaaatctccattttttcctctgattaaagtacagtgtagtatcagattcagcgctgatcaaaagaaagactgatttgaaaagttggctttcttctataagccttgctgttccttctcaaccaagaacacttcaaaagagctaatgaagtaatagctgctttgattcaaatcaagaagttaaataaaaatgtcctacagactgtgaggagggtgaggtatttaaaagccaataatacattatagaatatactgatatcaaagagcaactttcagaattatgattgttaacacctatgcagtcagtcctttgatgaaggcaggtgaactgacatgcttggtaagagattatcttttctccctagaaacctacttgtttcagatactggtttgaaccatgatgaaatactctgcttctcctcaaagctcaactcttctttagtattcagctatgaggctttcagattgataaaactgaattaaataaatgatgtgtcccactggaaagcattctcattctaagactgctggttagtaactttgcctggggtattt

SEQ ID NO: 55897 - DNA, 1190 bp, Homo Sapiens
gggggtggaggtcagcagtgccacagaacaaactggagttaagaaatgtcgttcttcagatttaaaaagaaaacctttactgaatcagctgagtgttaataatacgaatttccttttcttgccaattctgatctgaacagaaaatccaagaacagggatatgtgtggattacagttttctctgccttgcctacgactgtttctgccttgcatccaagggtccttaagccgttgtcttcattgattcatcttcaggcaaattctaatccttgggaatgtaactgcaaacttttgggccttcgagactggctagcatcttcagccattactctaaacatctattgtcagaatcccccatccatgcgtggcagagcattacgttatattaacattacaaattgtgttacatcttcaataaatgtatccagagctagggctgtgtaaaatctcctcatattcatcacaagactactgcgctaatgatggcctggcataaagtaaccacaaatggcagtcctctggaaaatactgagactgagaacattactttctgggaacgaattcctacttcacctgctggtagattttttcaagagaatgcctttggtaatccattagagactacagcagtgttacctgtgcaaatacaacttactacttctgttaccttgaacttggaaaaaaacagtgctctaccgaatgatgctgcttcaatgtcagggaaaacatctctaatttgtacacaagagttgagaagttgaatgaggcttttgacattttgctagctttttcatcttagcttgtgttttaatcattttttgatctacaaagttgttcagtttaaacaaaaactaaaggcatcagaaaactcaagggaaaatagactttgaatactaccagcttttatcagtcagcaaggtataatgtaactgcctcaatttgtaacacttccccaaattctctagaaagtcctggcttggagcagattcgacttcataaacaaatgttcctgaaaatgaggcacaggtcttctttttgaacattctgctttataactcaactaaatattgtctataagaaacttcatgccatggacatgatttaaactgaaacctccttatataattatatactttagttggaaatataatgaattatatgaggttagcattattaaaatatgtttttagt

SEQ ID NO: 55898 - DNA, 782 bp, Homo Sapiens
  misc_feature (7)..(7): n is a, c, g, or t
tatgaancccattgctagggacgtgcgccattgttttggtacccgggaattcggccattatggccggggtcaacaagataatctctgcttgttaaaaaggaccaaagacttgtgaattttctgagggtgatgaaagtgttgcttcgaaaaggggtgaagtttatatgggtctatttatttgtctaacatgtacagttaaggtttatgccttgcaatgtatgtacatcttcacaaaaaaaatcttaaaaaaattaaatgggtgggggtagggaaagggttgaagtatagatgaaccagaagtggtacatgattagtagttgaagctgggggcaggtctatatatttaatttttatgtctttaatagcatttgtataaatgtacaatattcgtttacaatgttagctcaggatcttgtttacctttggacagggagggagggagaaatttattttctgggtaggagtaaagctggtcctattcctcagttatgtaaatcatctgttataatccaaaaagctttacatgaatgtttctgtatgtaatgtggtatatcaataaaaaattaattacatactaatatcctctctctaaatagcgtttcccaaacattatctccccctcttatctcactatgttacttatttatcttcctttatttctgttaaagttcccctcttttttttttctatatttagtcttatttctttctctatagctctttccctagtttcttttttcatttaatatattgttctctcatgtttgtgttttttcccttcct

SEQ ID NO: 55899 - DNA, 643 bp, Homo Sapiens
ccggcaagtcctgctaccataagtttaaaattattaagacaacgggctttttttaaattgctggtagaaccaaaggctaattttgcataggtttatatttttagacttaagaaattagcacctatataataccttcataccttctgcatcactatcaatttttctgtaatttcttatttgaatgcttcctaattctttacagaaaaaattaaaatttgtcacccaaccaggtgataataacaaaacaataatttaggaacatccagtaaatttgaattagttctctaaattttggtaattaatagcttattgataattaaaatcagcctaatgttgcttaagtaggaggaaattgatcagcaatgggattgggtatctattttctttcctataaaagtgctgcctcttctcaaattgctttatttctctcccactgcattagtatatctagaacagcaccttcaactgcaacaaaatataattctcctagatgactaggatatcctccaatctggtatcatgccaaacaacactatgtttggggaacagcacccgaaatgctgctaaaaagctacctcatgtcaagaaaatatggatttcaaaaaatatctggcacagtggcccatgcctataaccccagtac

SEQ ID NO: 55900 - DNA, 660 bp, Homo Sapiens
cttataaacacttagattataggatgtgcatttctccttagaatgaagtctgggtatttccatttgcatctggatttagatgatttagggacaaaattacctacatgtgataagttgaactcttcctaatgactattcttattcttctcttatttcatctttatctcaagacattatctttaattcagcaaatcaagtatttccctagaaagctatgtattaaaactctctatgaaaagttaaaataaaacatagagttgcctaaactgagaagttttgagtcactgtttggaatttcactccctcgctaatattgtatgtgaaatctgctgtgcaacatttgaaaatgaaattatgtttcctggatttctgtgataatttttgaattcttactagagtaagattattctgtatccataaggattaatattacttatcctttaacaaaattagaattgcccctaaagaatgctgttttagctacagcaacattgaaatttttaaataaatgtctcgtttggtagaaggcaaaaatggtctaaaatttattggtccattttttaaccaaatactttcatctaaatcaagggttggccaaatctgccccactgtctgtttttgtaaataaaattttctttgaaacacaaaaaaaaaaaaaaa

SEQ ID NO: 55901 - DNA, 697 bp, Homo Sapiens
atttttgaacaactgtgtacagctatctttgcattttaaatgcccctagtttgagactcgggagggtcaagtgtccccacccctggaaagggctcggataggagggtgcttgcttctaaatcctgatcttctctatggggttggctggaagagaagtaggatcttgtctgaaacctcatccccagcattgtgtttggatgttcgtgggatccgagggctggccgggcagacagaagggaagtgcgggtcttggctggcagctgggagcagaggaagggagagcgttggaggtcgtgatgtgcgtgctctgcctcagtaggtctgaggtgcccactgttgttatgcttagttttattagattctctgtaacaacatgagcttaccaaccagccttgattttgagattaaataattgaacagattaactgggcactgaagtaaaattctacctactttattctcttagtaaaaactatacacacaataaacaactgtcaaggttgccatcatatttgagttttgtcacctaggaaaacattgtttatactttgtttttgaaaaaattcatatgaatttcccctgggaataacttgttttatttcagtttttattttctattgaaacacttgttttctagtctaggattttagccaaatagaaaagctatcatttaatttgggggaaaaaaaaaaaaaaa

SEQ ID NO: 55902 - DNA, 918 bp, Homo Sapiens
gcaggcggcgcttccatcatggaactgtcattaccacctctgctgaaggacagtggtgcggcctttaggaacgaagttagtcctctggaaatggacctaaatcccaccacatttttaccctaatgaatgatttttctattttgtaaaccattgggtaacttgagtcatattttcagaaacattttttgacaaatgatgaagcatgcactaagtataatttttttttattgctagagaagtaacacttaaagtaacgattttttttttctgactccggctaaacaccagaatgacagagaagtggcagaaaccatatgtttgtactcacatctggccacaaaaccagaaatactgtacattatgtaaagaggtctggtgtggtgtgacatcctgtataagaatatcatcaatttaaaatataaaatttggaaactattctgctttacagactccttttactcttaacatgttcaggaaactggatgtggaattggtgcaattctctgactgcttttgtgtcaaattatattgtgataaaaaaacaatgacatactattttccctatcgcaaagaaaagtatttcgtttatactgtttttccttggaaaactcttccatggtccattttatttcactgatagtgtatctctcaccagggaacacgtcgtgggtataataacgttggaaatatttcttaacaccacctttggtcattttcacggaactctagtcatatgttgcattccaaagtggaatcctcttgagggaacctctttccaacacaattgctcggtttcccaacatgctccgccaaaatgttctttaaaaggcggctgtaacgcgcaacttcttccaaaattccaaaccttgtacgtgggacaccacttcgaaaaaccacatcgcacctcctacagcaacc

SEQ ID NO: 55903 - DNA, 651 bp, Homo Sapiens
ctcttctcaaaggacttgaaaaggagaaaagttttcccagtggtctgaggttttagatgccatgttcactagaaggagtgggttttctcctctccaaaccaattaattcctgagatatcctggtctgcctgcagcaaacagagggttaacagcatcactacatcatttgctattggcaaaattttcgaagatggtgtgcctctattgcccgcctcagtttatcttaggtctataatttcttttcatttggagtaagtagtcggcaattgaaagaggtgattacttctcataatgtgtgcattgagttgtgtgggccggtggctgttgagtatgctttctccatgttgttgctggtgttgtttttcaataaaatttatattcatttttatccaaaaaaaaaaaaaaaaaaacgcgggcggccgcaagcttattccctttagtgagggttaattttagcttggcactggccgtcgttttacaacgtcgtgactgggaaaaccctggcgttacccaacttaatcgccttgcagcacatccccctttcgccagctggcgtaatagcgaagaggcccgcaccgatcgcccttcccaacagttgcgcagcctgaatggcgaatgggacgcgccctgtagcggcgcattaagcgcggc

SEQ ID NO: 55904 - DNA, 760 bp, Homo Sapiens
ctggctttgtgctcaatttcttgaaataatataaccaactctaaattacttgtgttaatatcggtaacatgacacaggtaagttaaatcctggataaatgagccccacagaataaaggtttttcctcttgctgtggcctactggaagccttcctaactctatagctggtaaagtagagcagaaagggccagaatggcttaagatggagctaaatccctatagcattccattttctgctcttgcctcttgaacttagaaggcttgcccatatatcctaacaatctgttctctgagctgttaggccaatccctggcaagagatattgatgtagtcactgaatctatggctcacaaataattgaaaattggctttgggagctgggcgcagtgactcatgcctgacctcaggtgatccacccactatggcctcccaaggtgctaggattgcagatgtgagccaccgtgcctggccagaaaatctggattcttattcctagttcttcatttctgtcacatgcacttagttgacattacatctacatatattagctttttcctacatgagccatctatttacttagtaaccagtgttcttaatgaagtatttagtcttgggtttcttgtaaaatttctctgcattccttagacagtgtactatacatgaaatattcttggtgacctagtaatttatattattccatttaatttcttaaacctatggcctttttattgagcacactcttaaatcattatttggcttg

SEQ ID NO: 55905 - DNA, 501 bp, Homo Sapiens
acaaacagaaggtagaagaaagtagctccacactcatgggatgtgaaatctacaagcgtgcatgcccggcaaatgcctctccaatgcactggagcgttttaagtggaaaccactagaatctctgtgtagtctccggaagtggctgtgagggctgcattatctctgcacagcttcctcttggtgggcccagctgtgatctttatggatggcacacatcagctttcaggaaaagcacatgaaaggtgctagggctcttggagctgactgtaggtttgggagttgtctgtctccttgctctagattacagctctgtgtgttgtgtggggtctccatggtttgccaaattatctcttcctcacttagccacaaggctgacagttaggaactatctcttcttgattgcattaggttggctgcttcctgaatgcatatcaaaaggctccttcctttagttcagtgctttcaacctgagctgtgcatcagaatcacctgaggtccttt

SEQ ID NO: 55906 - DNA, 497 bp, Homo Sapiens
atacaagcaattctctgcctcagcctcccaagtagctgggattacaggcgcccccaccatgcctggctaatttttgtatttttagtagagacctggtttcaccatcttggccttgaactcctgaccttgtgatccactggccttggcctctcaaagttctgggattacaggtgtgagccatcgtacccggcagccctggtttcttcttagttttattggtctgtgttttgatcagcacagtcacttttttgttctctttcctggtaagcagggagtcaaaacaatagcaagaaaatgccagaaatagaatttctactactttgtaaactctaggctcgtgggtctcctagctctcagtacctggctcactgtaggatgggtagatgggtgaatgaatggataaagaaaggaagtttgttcaccagagaggagatgaatttcagtaagtttcatgtaacagtgatcaggagaaataaaggcagttataactgtgaaaa

SEQ ID NO: 55907 - DNA, 710 bp, Homo Sapiens
  misc_feature (637)..(637): n is a, c, g, or t
gcacgtgcctgtagtcccagctactcaggaggctaaggcaagaggatcacttgagcctgggagacagaggttgcagtgagctgagatggctccattgcactccagcctgggctacaaagcaggactctgtctcaaaacaaaaacagatacaaaaactgggaacggggtgttatctttacttcaccacatagcctctcctgaattggtggacctggattcctagcttggctcagtccccactggctgtgtggcctttagcatcacctagattctacaaataacatttttctctatttgttttacacatgtcaatctgcctatccatccctctatccattcatttatccattttattaatgtatttcaaagtaagttgcagacatcattacatttcacttctaaacacttcagcatacagctgagttttatgcaagaaacttaagctctcagctgggtacagtggctcacacctgtaatcccagcactttgggaggctgaggcaggaggattgcatgagattgggagtttgagacgagcctggaaaacagcaagacctcatttctactaaaaattttaaaaattagccgagcatggtgggggagggtgaagaaggaggatagcttgagcccaggagttngaggctatagtgagctatgatggcgccacttcagtctgagtaacagcaagacactattaaaaaaaaaaaaaaa

SEQ ID NO: 55908 - DNA, 462 bp, Homo Sapiens
  misc_feature (20)..(20): n is a, c, g, or t
cgtgaacctgggaggcggcntgcagtgagccgagattgagccaccgcactccagcctgggcaaaagaggaagactccgtctcaaaaaaaacaaaaacaaaaacacaaaaagaatgcatggagttagttcattcttctcgccccctggaacttctgatcaaaagtcaatacctttgtgacctacaagtctctttatttgccctccattatagactgagctgttaataacatttaatgagctcacatggattcactggctaataaagaagaatagagttgaggacattgctgccctgtttatgcccaaaaattaccctaaactgaaagttgctttgtgttccttcactcccctctgctggtaaattttaatatagttcttaatttttttaagtcaaattggatagaaacatccaattggtggtttttaaaactggtaagaaaaaataatggttggaacgtccac

SEQ ID NO: 55909 - DNA, 475 bp, Homo Sapiens
aagatccaaagtctaataaatctaggaattttttaaaaacttgaatgtattgcttttgaagtaaacaaaataactgatattacagactattttgcaatgaaaaatgatgagagtttgtgatacagactgcttttttcctaccctatatctattttctcttttttagtaacaaatttctgggctgaaaatctcagccttccttgcaggtcaacaagatagaagtgatatttatatgagtaggagatttacgaaatccatttttcctgtctttttttccgtgcctacaatgtggacatctaagctggagctccgttactctcatggggactttgagaatggtatctgggtgttatggatcatggagcagaaatacagaaggagtctgcaaccctgatgactttgtggaacagccatactagctctggtctgcttgcctcctgtttctctttaaataaaattaaacatcttaaaaaaa

SEQ ID NO: 55910 - DNA, 503 bp, Homo Sapiens
  misc_feature (1)..(1): n is a, c, g, or t
  misc_feature (23)..(23): n is a, c, g, or t
  misc_feature (496)..(496): n is a, c, g, or t
ntcaccatcaattggtgaccccntttttgagaaatatgaaaatgtttttactctagaaggccaataaagcctgtctcacctataatggaaaatagagtaccttgcaaaggtatgacaggaagaaaaacttgcggagttgttgctttggttacagagtttctgattcagatctttgtatttgcattaatgtctgagtttggaataggttgtgaaccaataaattatttcatttttaaagagtaaaagttttggaaaaaagcaataggttaatcacagattaggctaggaaaaaaaagccatcacacatagttctttgaaagtaaggtattatgagcatgtaaaatggtacagctactctgggaaaagagtttggcagttttttacataactaaacatgtacttaccatgatacccagcagtcacactcttgagcatttatcctagataaatggaaacttacatgcccacaaaacctgtatatggaagttcctagcancctatta

SEQ ID NO: 55911 - DNA, 581 bp, Homo Sapiens
aagataccacatcctagagagcatttgtaagtagtgatttaaatttatggaaatctgcattcattttatagtgtatctggttttggtagaggccagataggttaagtggataggcatataaaaagactaccatcccctgcaactttcaagtgttttgtcatggtagtgatcaattccattccttggagaatgtgattattatttttcaatcattgttgccagtggaggagaatttcacaggcttccccttggttctgctctaataatgtccctgactctacaggtcaggaagaaagtgagagtcctgccagctgccatgtgtgtccattacacattcaagaagaggcaataacggcaaactgattagatccaccttgggatggacatgagtcaaaactctaggtagcatctgaccttcaaaactccctctgcaggctgggtatgatggctcatgcccgcagtccccgcacttttggaggcggaggtgggaatatctcttgaggcccagagttgcagaccaccttgggctacacagtgacagcctgtctgtacaaaaactaaaaaacaaaaaaaaaaaaaaa

SEQ ID NO: 55912 - DNA, 707 bp, Homo Sapiens
ttctaaagaagtatgaggaatacttgaccaataaccaaagtatagttatttatttgttaatgacttctttcctagactgtgagttactttagagcagagacttatttttccctgtatccctagggtgtggcacatagtaggtgcttagtaaacttattttgcattcaataatgccaagtagaataattcatagattatggcaaaataaaagaatttggcaaaattgcaagattgaagattgctttcataaaaaatgttccaacccctgttcaaaagtacatagcttgctgtgatgttgaagtgccagcacgaggaggaccatgctaacacatccatttattgcccattctgggagtgttgagcgttttaagtttgctatgcttgtaaaaatcaatgaatggcaatggtatcaactttcatgaacacagtcgttcagctgaaccaagtatcagtgataacttctgttttgaattttagaaatatatctctgaggttagaatgttgattcatgcatattccagctggctttccctatgagtataaatagggcaaggctattggcccaaatgtagttgtatttcaaggtttggtccaaagaccagagaatccctaagtaggaagacagtttgctttccctctttactgttaacttttgacaggtcattatattgggggacataaattacatgacctgacttggtgtctgt

SEQ ID NO: 55913 - DNA, 536 bp, Homo Sapiens
atttagaatgcttccttattccttacaccaaagtgaatttcagatggatcaaagatttgaacataaaaatttgaaacagtataaatattaggaaacatggaagagtttttctttttaaaaatcttagcatggggaaagcattttaacttaaaacctaggttaaaagattaatacatttgacaacataaaacctactgcacagcaaaaaatctgtaaattaagacaataaaaaagtgggaagaaattattttcaacatagaactataaaggaactgttttcagtactacctttaaagctcttttgtacacatctgctgcacacagagacatgcctgtagtcccagctactcgggaggctaaggtgggaggactgctagagcccaagagtttgagagttaagccacacagcaagatcctaactcttaaaaaagagaaaatttaaaaagctcttatgcatcagttaaaaagacaacccagtagaagaaatgcaaacgattaagggaaaaaaagaaaaaatattcaactttattcatgca

SEQ ID NO: 55914 - DNA, 522 bp, Homo Sapiens
  misc_feature (12)..(13): n is a, c, g, or t
ttcgacccacgnncgtccggggcacttcccccagtccccgaggcggatccggtgttgcatccttggagagagctgagagctcgagggacggggatttcgctatgttgcccaggctggtctggaactccggagctcaggcagtccgcccgccttggccccccaaagctctggaattacaggcgtaatgcactgtgcctggccttttaaaaaaaaattgaggttattttggggacagtagagcgtccagacacatcctaatttgcgtagctgctcagttttaaaaaatgcaatgcatttttacctcttagggtatgtgatttctggctggtaagctacaccgaatcttggctagcacagttgaattccatgtcagatttgtaaacgcaaatttgctctctgcatttaaatatattagatatatttaggtaactacatttaaatgtattgagacatttaaatacacttgccgtctgtatctaaatatctgaagtggaccaggtgcggtggctcacacctataatc

SEQ ID NO: 55915 - DNA, 559 bp, Homo Sapiens
  misc_feature (15)..(15): n is a, c, g, or t
  misc_feature (21)..(21): n is a, c, g, or t
  misc_feature (71)..(71): n is a, c, g, or t
  misc_feature (199)..(199): n is a, c, g, or t
  misc_feature (203)..(203): n is a, c, g, or t
tttcggcacgaggcntccccntttttttttttagaggaaatgtttgatagtttctcctaaaaaattaatanttggcacaaaagactagttttgtgtcaaaagtagttttgagttttatctaaagactgacattggcttgaagttgggctttccagattcaaaaatctgccccagatgagatttagatgcagagggtttntttncttttccccagggggatggcgtgatgatttgttcaagattgtgttatagtagctgccccttttaagccagctgtgtgtgtgtggtggggggtgggcagtgtgtattccacatcaacatcctagaaagaacgaataaacatttattgatctcactgtttctacttacatttggtataatgtactgtttttattggtgctattacctatgttaatagggcactttacaaaattttcaagaacgtttttattaaaattatttcaaagacttctttcttaaaatatgattttaccatgtaaaaaattatactaaggtagaagaatattcgttttctcattttctgaaaaaaaaaaaaaaa

SEQ ID NO: 55916 - DNA, 714 bp, Homo Sapiens
  misc_feature (686)..(686): n is a, c, g, or t
ccaccttggccaagctggtctcaaactcccaacctcaggtgatccacccacctcggccccaaagtgctgggattacaggagtgagccactgcttccggcctgctgtatgtttttattatatactatgagataatgagattagtgatggattgctttgtaatactttgggagtctgggtttggcagagtgtgcccctatgaagactaagtgggactataatgattgtgttttcttaaatcagaatcaggatgcataaccagatgaaggaagacatagtcgggagccatagttttaatatctagattttggaattttagggtgatttactatagggacaaagtatttgaaattgggattggcggaacatcagtggaaccagcgattgctaagttaaatatatacagggacattagataatggatgatgaggaaatgggtaaaagaaagtgagggccttgtgagttgaaacaaaaataatcaaacctggaacactttccatttattgtattagatatcttcatttcaataaaattaatgtatatgacaaaattttattgtcctcctagttcaagtggtattctacttttatttccataaaaatatactttcaggatagggaaagggtaaacttgcattataagtttgtattttctcacgaagggacaggagagacgaaaaacatcattngcttattgctagctatgcccaaaaaaaa

SEQ ID NO: 55917 - DNA, 583 bp, Homo Sapiens
attttccacagggatgttttacctgccattttaactgtatttgccaaattctaaatataattttgaaaattgaaattgaagcttatgtttatgtggcaaaagtaagcttcaggactgggctgtgtatttttattggcatgtaacagttaatatgagctctacaagaattcgtttttaaggagctaaagctatcaacagctgcagatttaaaaaattatatattaaaactgttaggttagctcagttgtacaacttagtgaatcttgtatcctgagtttctgaaggctggtggataggtatctctgaaatcattgtgttttagtctttttactgatagttttgtatagggaattcatcttctcttttaaaataacttttttcctttaatttatttctattacttattgtacataaattttaaaataaaaaaatcaaagaaaaaagtcacttgtctatcacctgttaatagtttaaacatcttggtttatttccattcatccttcccccccatgcattatttacatatttttttttctctgtaggcatattttaattcggatcacagtttactacttagtatctc

SEQ ID NO: 55918 - DNA, 773 bp, Homo Sapiens
atgctagttattgtcagatacatgttttgcaaaccatttatctgtatttggtttcttttgttatcttagcagtgtatcctgaagaatagttttaaattttgatgtaatccaaaatatttcggtgttgtgttcttgttatcctgctctattttgttgttgttgttttatagatatgggggtctcactacgttgcccaggctggtcttgatctcctgaactcaagtgatcctcccacctcagcctcccatccttgtctacctaattaggctttgtgtaactcagtgttgcaaagctttgacatctgtttgagttaatgtttatatatgttgttacttaagggtttcacattaaatttaaacatacttatattttataaccaaacaagtcatgttggggcatactcattaggattgagtgctttcttacaccaaaatacatgtatacaaagatttaaaacactttcggccgggcgcggtagtcccagcactttgggaggccgaggcgggtggatcacaaggctaggagatcaagaccatctggctaacacggtgaaaccccgtcgctactaaaaaaatacaaaaaattagcagacgtgtggcaggcgcctgtagtcccagctactcgggagctgagacaggagaatggcatgaacccgggaggcagagcttgcagtgagccgagatcacccaatggaatcccagccgggcgacagagtgaaggctagtcttcaggaaaaaaacaaaaagggggggggctaaaaaaccccgggggcc

SEQ ID NO: 55919 - DNA, 1086 bp, Homo Sapiens
  misc_feature (19)..(19): n is a, c, g, or t
  misc_feature (1086)..(1086): n is a, c, g, or t
ggaccggtccggaattccncgggataaaaaaaaaaaaaaagaaagtgatgcacagagtggcaggcagaccatccacataagttttataggtacaactgtcaaagaagacactggagaagagccaagctggatctataaggaattgcatatgagatggcacacatattcatgctgtctgaagattcagtcacgttaccatatcaagctgaaaatgtcaccactatctggagagttggacatgttttattgagaatgtattttttttctctggatctgttatgaacacctttgttggcttggttcagtaataaatatgtgagacttttcatttaaaaaaagtcaaatgacttaattctgtattttaaattctgttttgtttgttttgtttttttgagatggagtcttctgaaaattttctcatcttctctaacccggttcatgacagacccttggactttactgttgtggaaaaatctatataaaacagtatcagtgtgtcaaagcattatggctgtcacaagcttgtgaaaggaaaataaaaattactaagccaaagagaaaagtcaatctgggaactgcgtcagacaaacctgccttccattttattcctaaacaagatagttacaaagattttttaaaaagctacatatgcccctcccaaaccgggaacctcaagatctccaccctaaaataattctgttgaatttcaccctggcgatgtaaactgagagcttatcttcacagatgtgggaaagagcccatccctctgcacacctgagtcaaatggctatctgattgcttccccttgccctatttatgtaaaaaaacaggttcccctgaccccagcttaaggcataagtgacttattcctccctccctgctcacatataaaattggggatttaagggaaaggctggatcaaagattcaaagaaagggtaatttggtatccacctgggggaaccacaaaggtcccccaatttcccagtattccccccttttcaaaaccgaaccaaggggaaaaaaggacccggattgcctggcccccggggggccggaaaaaggtgggaaaaccaaattgtgagcn

SEQ ID NO: 55920 - DNA, 694 bp, Homo Sapiens
agtttaaaaaggggtggggaggacaaacgtgtcgatgtgctttggtaggagaattttttatccttgtgcttctagtagactttaaatattgtatccctttgatcaaaccttgtttcccacatttcaattaaagagaggagagaattgcaatggcgttctagagaagatagaaaagaatcacagtcgatatattgtactgtgtatattacgattgcgcgacattctaaaattcaaatacggtgcttaaggtttcatgccatgcttagtctggtaagtatcctatttagggaagaagattaaactctcttttcaaaaaaactaagtgaaatgcctggattcacattaaaacaatgggctctcgtttgctagggaatattttaacagctgtttaatcaacagtggagtctgcttctataagatatagattatttgttcaataaactggctgagcttaaagagcaggtgcaagaattcctggttctgagcaggtgcccagaaggtaccattaggtgccatgatccaggctgaaaccaatatacagtgtgggctgaagtctgcaaggaggttgctgggcttgggctgacctcactaatgccatcaggcagcggtaggtaaatgttttctccttggggtattacaagtttttgtctggagccaaacaaagcttgcaccaacatattgagagtaatacacc

SEQ ID NO: 55921 - DNA, 745 bp, Homo Sapiens
  misc_feature (687)..(687): n is a, c, g, or t
cagacgcatactcaggtttattttacctgctgagcttctgccttagaagttttcagaattgtgattacattgaataggaaaaaagtctgaactatcagaagcagtgccgcaactttgacaaacaactgattatataataatctgcctctagcatgagactatattaattattatttagctctggtgacttcataagcagccagtgacaacagaaagttaagataataaaatgaaggaatgttacaatttgttatcatccgggagcctgaggcaggagaatggcttgaacccgagaggtggaggctgcagtgagctgagatcgcgccactgcactccagcctgggcaacagagactccacctcaaaaaaataaataaataaaaagaatttgttgttatccacttcagagctcattaatgccacatttgtcacatctccgttgagaaatccacaatggttttgtatctgctatgccatcaagcccctgttttactttcaagcctacacacaatagacgttattccaattttaaatcctcttttccattacttgctaaactctatccaactaagttcctcactctcctatcaatagtttatgtacagagttgcccacatgtttcattaatatcgttcctggccgggcacagtggctctcgcctgtaatcccaacactctgggaggctgangcaggtggatcacaaggttaggagttcaaggccagcctggccaagatggcgaaacccc

SEQ ID NO: 55922 - DNA, 1678 bp, Homo Sapiens
  misc_feature (898)..(898): n is a, c, g, or t
ccttactaacatttattttgattttaaggtaatttttatattataggttacttgctgactttttttcttctctgttcttttctgaagttgcattcttgtgttgggtgggacacagttaagtgtgacatgaatttccttgccccaagttcttgatttgcccatgaaatgaagacttgtgcctcatcagatgtcttttaaattttttactctgcacattttattttaattatctctgaaggcattttctggttctgtaataagttcttacctcttgcctatagagactttggaagtgataaaaattgatctaaaactgttaaagaaaaaaatagtattttaaacctgttaagttattgtttaatcctagccttgtaattgatgtgcacagttgtagatggtggttgatttgctttattttgtattctcaatgccatataccatgtgtaagctatgtttttagcccggtctcatgtctcaattctgaaaatgtggaagatgtttattgtagtattcctataaaaattcattatcatttaattcttagaaaagtaactctagagttgttaaaagtctaaatggcctttttctgtgtttatctttaccagttcaaaatagaaatgctacttttaactattacaatttaatggtgtatttgatataaattggatgcttacgatttgagtaaagtacctgctttcgtagaatattttagctgaaaataattggaaggtatacctcccagtgttaaactctcctataaacattttcttcttacaaattggtatttctgaaccactatctcttattcctgtgtttgagtagatacaattaagtttcatactaaaataaattttcttcacatcattactaaagcattcagttatttcaaaaatatagnacattactatactgatgaataatggaagaagtttgtctgttgattcaacatattcaagagtaggatagtttttctcctgaataaaactacaaaatcaatagtggatttacttacttgacctcaaagagataagacattttgtctatgaaatagtttatagttttttgtttgtttgttaaacaaaaatgaagggaaataaaccaataaagcagaaggcatggattgaggaagcaatctgggaaaggttgtgaaaagaattgccagagtcttggtcaaggggaatcctagcaagccaccctgcagaggtcgcaggaggatggaagaactcttgggaggaagctctctaactggagggctatcatttacaaagccatgatactataaacactgagtattgagttaacaaaaaattgtaagactagtgtgttgagaagttagagtatggaaaaaaggggaaaagggacagtttgggatgaggtagggaggcagatttattcatggaagcttttctatacagcaagaattatgagccatacctttcagatagttctgtgggttggcagccctcatcacctggcacctttggcactgccttgatagctgcctctcacccaagttagagaaagaggattgaagacaggaagaaagcaagcttatgtgcttgatactttatcctaactaggtatattcttatttccgccctttttacttgaggcacagatacaccatcatctgcactttctgtgcctaacttatcttaacaaaaaaaaaaaaaaaaaa

SEQ ID NO: 55923 - DNA, 375 bp, Homo Sapiens
  misc_feature (216)..(216): n is a, c, g, or t
aggggccaaggcaggaggatcgcttgaagccaggcgttcaagaccagcctgggcaacacagacctcatttctaccaaaaaaaccacaaaaagttagctggactggtggtacatgcctatagtcctagctattcaggaggctgaggtgggaggatgccttgagcctaggagttcaaggttacattgagctatgattacactacctgcactccagccntgggtgacagagcaagaccccatctcaaatcataatgatgatgagtggatattttctcagtagctgtggagacaggatgattgatagcaagagtgcctgctctaactaaagcacctttctcaagcttttttaaaaaaactatctttgtggaaaaattca

SEQ ID NO: 55924 - DNA, 458 bp, Homo Sapiens
  misc_feature (287)..(287): n is a, c, g, or t
tcacttgctctttctaaaactggaaatactggtagttcagaaccaaccctcctcctataatgaaaacagaattctgcttctttgtaaactttcttaaatgttagaaagaaggaaccgcatataaatattgtctaaactctacagcagggtctgatatatgtagatttggggagggggcttgattatgtcatttggtggacttctataagagcatacacaatgaggcatggacacaaacatttatttataatgaaaataaacacaactaattaccttagccttgcgangcagtccctttcttctgagctttgggattttcagtttatacaaacagcttatatagaaatgcaactgggcttcctctccctaactaaaaagtgctgtcatgctgtgctgttcccagcattcacagagactgcacaagtgccattggtttggggcaaatctgcttctaccga

SEQ ID NO: 55925 - DNA, 656 bp, Homo Sapiens
tcgccgtgttgcccaggctggtcttgaactcctggagtcaagcgatctgtccaccttggcctcctaaagtgatgggattacaggtgtgagccaccatacccggcctaaagcaacccttgaggtccctccacagccaggcggctggatccacactaacccccaccccacggcacccccaccccaccgtgaggcttctccccacaagggcattggccgaggcttcgtggctgtggatgaatgaggccaacatggtggaaagtaagtgatgcagagtcagaggcagttcctggaagatgcactcgctgttcccaaaacgccaagccacacccactcctttagggatggtagacattggggtctcggttttattggtcatcctgagaaggccactggagtaatagaaagaaatggaatttgaagttgaaaagtgtagatctgccagcctgggcaacacggcaagaccccacctttacaaaaaatttaaaaattagccaggaatggtggcacgtgccagtggtcccagctccgagggagactaaggatacaggatcgcttgagcctgggtgctcgaggctgcagtgagctgagattgcaccactgccctccagactgggtgacagagtgagatttgtctcaaaaataaaaaaaaaaaaaaa

SEQ ID NO: 55926 - DNA, 862 bp, Homo Sapiens
caggcgtgagccactgcgccctgccacctatagccaatcttaatgagatttcataggcacagacaaggaaggttatcagtcacatattagaggcaccacacagggagagcagtgtgtggccacatgcttcagcccattttttctgattctcttgcttgcaaattaagagtattctccaaatcacttgactttccttttctcagagttatagttctccagagatgtcaccagatgattcacattaaaggtacatttccagttgacttttttatttcagatattagtaaatgattaccagagaactaattcaaactgtcatggttggaaatactctgatgctcaactccctaatctatagagtgagttaaggtctatactcttttgcaagcattgttctagtggcagtgaccctgttcatgattcagcctgacatttactatgctgccctgaaaaccaactagatgggagcttgtttctctctgcattgtgtagtgagtggtgtcacccaggactttcatgtgagaaaaagcaccttgcttttaatctgggaattttgagtgttttttgtaatgcctcagtttattcttatttatggttgattatatgtgatttagaacacttgctatttatgtctgatcccacaaatcagcactcactttatttgcaaagcaccaaatttcgtgtaagaggtgtagtaattgggaatgtgaagctaagttacattctttctctttatttacatgtctccctttctataggcctctttttccccccctttttgaaaaaggaagcccctggccccacgctgggaatgcaaggcggcgaatcccagggccccttgcaacactcggaatccccgggg

SEQ ID NO: 55927 - DNA, 462 bp, Homo Sapiens
ataaagcataactcagtagatagaattctctagtagtaagctaaagtgcttcaagtattagttgtcatattaatccaagagaaaattagatctgagactacctcgaggagtaaacgaacaacttctttaaaccaatactagtcaaaatgcagtccacggaccaatgctggttcatgccctatttgatccaagtccacattaagtacagaaatgaagagtaagcatttagaaacttggggcaatttgacattgcctcaacatccaagtttcagtgtcctttataaactattgatccatgacagatcatgaaactttctaaaaattgatccttttatcacatagtctttcaaaatattatttgcttctttgaagctttggatagaaacttgataatgtgaagttctctgctatgtggacctggtgtgcttatcttctttgttgctgatttgagagctgagctat

SEQ ID NO: 55928 - DNA, 540 bp, Homo Sapiens
tcatcaaactgtggacatttatgacctatgcattctctttatgtagattaaatgtaataaaacattccccccaaatgatacagatactacacttacacattaccatgtcagtattcactgagatgtgtatgactacatgtatttgactctacagaaaaataatatacagacatgtttattcacttggtactttttaaattgtctagaacagactgagagtgacacgcatatttgattgtgaggacagtttttgtcataatatctggttatcgtgtgatattaaactactgaagtaggggccagcaaactacagagcaaaccagatcctgcccatagcctgtttatgtctgtctttgaactaagaatcgtttttacctgaagtgttgttttgaaaaaaaaaaaaaaggaaaatgtgaaagaaactacatgtagcctgcaagactggcccttgtacaagaacacccaaaaagtaatgcctgttatcctaggagaaagaaaccatgaaaattctaactggaggtcactcaagttttgttgttt

SEQ ID NO: 55929 - DNA, 645 bp, Homo Sapiens
  misc_feature (52)..(52): n is a, c, g, or t
  misc_feature (134)..(134): n is a, c, g, or t
ggggcacatagaggcaaatgtgctataccgggcttagcctgcgcccggttcntattaatcgtcaactgtggccaaaattgagtttcatgagacaaagggggacccccaaacttctacgggtaatgtctgccttntgctagatagactggctattacataaccatatgtagtttatttttaaggagaattacatatttttcttcacatgtcactgttagaagtaaatcccaatagtaagatttccctaaacaaagtatttcttgtaacatataactcataatatttagaaattacagactttaacctttagaataatcatggtttgttttgtttttgaacttactacctcagagtcacatggtatatatcccctatgatacctgtaaaagacatctaaattggtcaattcttaaatattttattgtgctaacacaaaagttttattttatttggagtgcataagatacagaaacaattctttatgatcttacatctctgtttttttaatattgcaaataacataccactttgacataggcagtttctcacttacaaaagtaaaatttgaaatgatcagtggtcaccccatctgtatatttttgccaccactaccagaagagccatgtcattaaaaaaaaaaaaaaa

SEQ ID NO: 55930 - DNA, 570 bp, Homo Sapiens
ctggtaaacaggtgttttgctgattgaaaggaagttatcttggtaaattgagactcaaagtgaaatacaaaaatgaaaatatttataataggactcgacttggagaaattgctattcttcctgttgtccaaaccataaatctgaggataacctgggcttttctctttcctcttctcctaaccagtttttcaccaagtcctgtgccatttcacctcctaacgtctgtcagctatccttttgcctttacctcaccactattaccctagagaagactttcattatttctcatctggattaccagctcgatctctaatctgcttcagttcatccttcttgctacttctaggctaaacatcaaaaacagatctggtaggggcggggaaatgagggggaagaaacaaaaacgtgatggtgcctcatgctgcttaaaatcttcagtacattgatgttttgatggcggactacataagcgttaaaaattgtgtttttcagaatctttaaaatataagacagtgctatctagtgaataaaaaaattagtttgaaagaaaaaaaaaaaaaaaagggccac

SEQ ID NO: 55931 - DNA, 471 bp, Homo Sapiens
aattcggaacgagggggaagtatattagctttatgattgaaataagggtaaatgagcaatgtgtgaaggttttcactgacttcacctaaaagatagtttagctacttgaattttagtaaatagaatttttcctttatttcatcggtccccccaccttttttttttttttgcacctgccttgtaaatttaatagttaagtgacctctgcctagaggatgatatttggggaggtttgatgtttcctgtgggaataagacgattcacaggtgagagtggggccacattagctgttattgtttccatgggtcagtgtggaaaatggattaatcatattctaaacgttcatggacctcattacagtcacaattgtctattctgtttcctaccctgaacacattaaaatggtaggaactaatgcttatttaattactaaaagccaccattttctttgatagattgagctacagattg

SEQ ID NO: 55932 - DNA, 371 bp, Homo Sapiens
ggtacagcgatggtgcaaatgccagtgaatgtatctttaaaatggtgtatttgatgtgtattttattacaattaaaaagaaaagaatttgatatttgcaatcattaccaaagccaaaaactagtgttctcaacgtttgtgaaatgcccaaaccgtggtttaggattaatttatagcattagtaacatgacaaatctattcagcttaaagttctagtaaaatttgtgaatcccatcatagaagtactcctgacagcagcagaaataaagctgtaattcatcaaaatttccttatatttaaaacttctgtgactgagtgattgacttctgtgtcaatgtttattttttatcttttgaaatttattatgattcc

SEQ ID NO: 55933 - DNA, 496 bp, Homo Sapiens
  misc_feature (9)..(9): n is a, c, g, or t
ctttaatgntattttaaatttttttgcttttgtaacattatgcttagcatgtgtgtccaactctttgacaatttctttttagttttctggtggcttccctttatccaaatttagtattgaaattcctcgagccgctgcttttctcactccataattctggccagaatttggtacttaaaatattttgtctaaaatattacaatagctacttaagtcatctccctgactccactctgttgtctttcagggcctcgtccacactgtagccaaagtgatcttataaaaacataattctaatcatggcactcttctgcttaaaaatgttttaatggctttccgttaggttaaaatttaaaagtcctttgtagcctgtgagactctacatgagttgactccctagcttcatctttgagcatcttatttctttacttattataccatcagttagagttgattgttatataatccacagaagtgaattctgtccgatttaagc

SEQ ID NO: 55934 - DNA, 490 bp, Homo Sapiens
aaggttaaaataggccaaatcactttttatgcaatcatgttttatacagtggtctcattgcacattgtgttttttctgcactttttacggtatccttatcatgctggtatgtcaatatacaccctaaagaaaaactccatttaatgattgtgccttgtattctattattttttgcatcattagtaaaattaagttgtctattgtaaatgataactatatgacttaggagaatgtattgctatatgtactgctatggaaaaggaaagcagttatttatttgtttatggtacagttagttattttataccttaaaaaccaacatacttaccatttctattgtttaaaaattactgtccatttttttaaaaatttaaagaatgtagtattttctgaggactggtatggtacaaaaatgtaatcaaaattttcagatactacatttttaaaaagtgaggatgggggaaaatatgtatcagcatgacccctgatg

SEQ ID NO: 55935 - DNA, 550 bp, Homo Sapiens
  misc_feature (277)..(277): n is a, c, g, or t
  misc_feature (284)..(284): n is a, c, g, or t
  misc_feature (304)..(304): n is a, c, g, or t
gaaccagaacgactacggctgaaccagggttcatggggacatggcaaaacgctgatactaacctcttattcagaatgtcccaacaggccatccgttgcacactggtaaactgcacatgtgaatgttttcagccagggaagattaacctgaggacttgtgatcagtgtaaacatggctgggtggcacatgaaaccctgaaatcgtgtctccaatgacttctgctcagaggtgaaacacagcattctttccggctgccttatactgtgcagtgtcctgngtgtggngcaatgaggaagtgacttgngttttctagtgtgtaattttcctctgaaatgcatggaacagcaacaaaactaccaagatacattgcccagaatggtttcatggtagcactgaatgcattctacctgtcattatgtcaataaaaaaatttttaatatctgctgctaaaaaataaccaaatgccaaaatcatgtattctctctaaaacagatttttagaaatttgttgacctcctttcttgaataaattatccttgttaaaaaaaaaa

SEQ ID NO: 55936 - DNA, 330 bp, Homo Sapiens
gttttgtagtcctttgttgtaaaatcttggaatgttaaacctccaggtccaccgtcttacctgacagataaggaaattaagctcagactagagaaatgatttactcaagaccacatgggaagtaaattagtggattggcactcctggctccagtgtcactccttgaagttttaaagcctacctgatctgaaaatcactccctttccctgccctccttgtcctttggtgaaaatgtaaaaaaccagggcactcaggcaaggagggataaagtgaggagcttgatcatgtcataaccaagctttggtgcctgcaaagctcatttattgggca

SEQ ID NO: 55937 - DNA, 731 bp, Homo Sapiens
aatagtagcatgatcacatttgcattttagctagtacactgtaccagcagttaggaaatagtgagggaaaagattagacccagttaagtcacaaaggtgactagggtttactattgcaatggtagagggatgggggagtacatttaggagggttgaatctacaggaaacctggtgatcaattggttgtgggaggtgagatagaaggaagcagcaaggaaagatgtccatgtttctgatttaggtggatggctgtgaaatttattgagaaggggaaagaggaagaagagaagatcggggaaggggagagtatgaatttagtatagaaacatgttgaggttaaggtgcctaggagataagtagaggtgtctgttagtctgaagctcagaggagaggcttggtctagagagctgaagatgattcatttattcagaaatatttattaattgcttcctgtggggctgttctaggtgttagagaaccagatgaagtcagtgctgctatggagcttttattctggtggtagagacaaacagtaagctagtaaataatgtaatttccgctggtaaggaccatgacgaataataaagttaggggatagtgagtgactgaggatatgggctagactgatacgaaatggaatttaacatcctgtcctttgtaagaagttgagggcggcctgtcagcagataataggtagtttaaacagtgagtttggtatccaaataattat

SEQ ID NO: 55938 - DNA, 309 bp, Homo Sapiens
cgcgtccgaaaaaacaaaaatattcaactatgagctggggaaaaaagcttcagcggtcactgaaagtgcttacaggtacagctagtatggggatggaatatgccccattagccaggccaacagatctcatataggagaatctgttttatgtttgttggacagtgggtgagttatcgcagttatgccttttttttctgtcactattttatgtcccttatcactgtgcctttaacctactgaaatgcagttgaggccgggtgcggtggctcacgccaagatggcgccactacactccagcctgggcaacag

SEQ ID NO: 55939 - DNA, 895 bp, Homo Sapiens
ttgggttagttcctgttaggccccggccgggggagtaggttgaagtctcctaagatgcccggtggtctggggcaccgggagctgtgaagggaacgtgagggggcggcgtagtggagacccacggcaggcctgaagaagagcggcggccgagcccgccttccctgcaccatgctcatagaggatgtggatgccctcaagtcctggctggccaagttactggagccgatatgtgatgctgatccttcagccttagccaactatgttgtagcactggtcaagaaggacaaacctgagaaagaattaaaagccttttgtgctgatcaacttgatgtctttttacaaaaagaaacttcaggttttgtggacaaactatttgaaagtctccatactaagaactaccttccacttttggaaccagtaaagcctgagccaaaaccactagtccaagaaaaagaagaaattaaagaagaggtatttcaggagccagcagaggaagaacgagatggcagaaaaaagaaatatcctagtccccagaagactcgttcagaatctagtgaacgaaggacacgtgagaaaaaaagagaagacgggaaatggagagactatgaccggtactatgagcggaatgaattgtaccgtgagaagtatgactggagaagaaggcaggagtaagagtcggagtaagagtcgaggcctgagtcgcagtagaagccgaagtagggggcgcagcaaagacccgggatccaatagggaatgttgagcacaggggaaagatcgcaattttaagagttaaaggaatgacctgggaaaagttcccatgtgccctgtggtctgccaccaccttccaaaactctttctgaaacagtattcccccctggggggacaggtcctattc

SEQ ID NO: 55940 - DNA, 741 bp, Homo Sapiens
  misc_feature (705)..(705): n is a, c, g, or t
cgcataaatgatctttgtagataccatttcatttactcaaataaccctgcgagccaggcactgttatccctgtgatgaaactgaggctcagagaggttaagacacttgccaaggattacagagctagtaagtggcggaactgggctttaaacccaggaagctagattccaaagtcttgtgttcttaactactaagctacactgttgatcacccttggagtcgtgggttaggagaaaaggaagggaaacaataaggtgggagaagatgaaggacttagggctcaaagctgatgcttcagtgaggtggaaaacctgtgctgtggggttttcctcagattacacacacgtgcacacgtgtttatatcaggtgctgaaaaaaagataattaatttagatatttaccaggaattctttcagaagcatttttaatgagtcatatttgcactgcacaattctttttgcttcatttttatatagttgaaggcagtaaggaattcttgtacaagtaaacatcttttccttttgtacccctcatcactgcgaatttgatagaacccttagtaaatgaccaggttgttttttacacttttttttctctcccacaacgtaacatgggtttggcaagctttaaaaaatgttagtatgtttgtatccactagtatacctctgaccatttaataggagatccctgccaattagagctagngatggtttgttctaatttggagagacagggtggggt

SEQ ID NO: 55941 - DNA, 409 bp, Homo Sapiens
aaagaaattaacgtgctgcaaactggagaacattttatggtatctcatccatggcacggtacttcagtcaaggatttaccagataatctatgggtactcacttacccttctttattcatggctgctatctagcaccaaagagataccggatacttttggtgactgtgctgtgcacactgcttgtttatacgtcacatcttatttgttcaaaaggctaacattccttatgttaccaagacatcacattcaaattcttcacaaagtaaactttatagtttaggaggtgccattaccttatcgttagtgggaattatcttagaagatacaagtagtagtacttatggaggcactacagtgactactttacatatgtagtttgcttcatacggattacactcactttttaaga

SEQ ID NO: 55942 - DNA, 561 bp, Homo Sapiens
tgcgtcagcctcctgagcagctgggattacaggcatgcaccaccacatcctgctaattttgtatttttagtagagacagggtttctccatgttggtcagactggtctcgaactcctgacctcaggtgatccacccgccttggcctctcaaagtgctgggattacaggcgtgaggcaccgtgcctggcctaagcagaaaatttttattagaaagctatctggtagctcactaaatggacaggaaagttgaaataagccaggctcataaaaagatgaaatctacataagatgttatgattcctccgctgctgttagactgatttcttgattgtccctgtgtctgtgagtcaccacacttaagatgcaaacttctggttggcactgtgtgtcttcattgccaagggcagaaggagtatctgggcctttcagcttctacagtggaaggacgctgccgctgtgcagatgctcacagtaccccaggtaagaaggatgcttagatgctggattgcaaaaaatgtacagctgtctactacaaccccaaatctttaaaaaaaaaaaaaaa

SEQ ID NO: 55943 - DNA, 802 bp, Homo Sapiens
  misc_feature (377)..(377): n is a, c, g, or t
  misc_feature (634)..(634): n is a, c, g, or t
  misc_feature (644)..(644): n is a, c, g, or t
  misc_feature (673)..(673): n is a, c, g, or t
  misc_feature (699)..(700): n is a, c, g, or t
  misc_feature (749)..(749): n is a, c, g, or t
gcaaaaacggattgaaatgaacatagcgttttgcactaatgataagataacctgagaggtagggttgaggaacacagggttgaaagctgttggagaggggaaaagttgtgcataaagaactgaaaagggttctggagtgttcattcagagtgaagggaaaactttatccttctatttcttataaccagacaggaggagttcttccctttgaaaattgcaaaaggaatgagaactttgcagttggatgaatagagaagggaaaagttgctggagcacggagtgaagatgggaggagctgttagcaaggcccactgctgctcctgggtgagaagggagctctggagcaggaccagctgggggccggcactgctgcttanagtggaggaggctggccaaagagactgtgggctgttttcagtcagggagcatgtgcattgtttgtgctcaatttcagacactcatttataaacaaattcaaccaagggatatttactgctttatgttgcttatgataattattttgcattaatacagtatacacatttgtaaattcaacaggaaattattgagttttggaaagctacagtaatttctgtattacatcatttatatgtgaaaagttggacatttctgntagtttttanaattatccatttgttactttaacattttnaaattatggtgttttcctgattttannagcatattttccttactgtaaaaaaaaaaaaaaaaatctgattctgcgngcgcaagcttatccctttagtgagggtaattttagcttggactggcgtcgttt

SEQ ID NO: 55944 - DNA, 626 bp, Homo Sapiens
tgaatttaggtgacactatagaagagctatgacgtcgcatgcacgcgtacgtaagcttggatcctctagagcggccgcctactactactaaattcgcggccgcgtcgaccccacctccaccaccacaataagaacaaaactgtagggctctaaagagagggggtggtttacaagtttattgagcatttactaggaagtgacatggcgatgacctctgtacatgagttaggttcactttcatgtggcctcccactacagagatgcgtatgcccagaagtcagctctctgaggagacaggctactttggccccagtttgaagcattctgtccaaatgtcctgagctctccagcagtcaagtagtgaatggataccatacttattatggttgatgaaaaaaggcagagcttatcctcaattttttttagggaagagaaggaataaaataaaagtggttcaagctgggcatggtggctcacacctgtaattgcagcactttgggaggctgaggcaggcagatcacttgaggtcaggagttcaagaccagcccggccaacagggtgaaaccccatctctactaaaaatacaaaaaatacccaggcgtgatggggggcgcctgtaatcccag

SEQ ID NO: 55945 - DNA, 606 bp, Homo Sapiens
tctttctggcttgttagatcttctcatttggcgtcctttctccgaagagttaaccaagacgtttggcgtggttttcttgctttcctcctatcttttgctgctagagctgctttcaaaaagaagtcttttcttgcagtgataccttttctttgggttacagtgttgttcatcctttctttgccgaaagaatgaatcccagtgcttcacgaagttaaaggaaagatctgctggtagtgtttagtctttgttctgagctgatatgtgttagtagctttttgtttttaaattttattagtaaaatttcaccagtgaaccagaagctctttttttctgttgtgaaatgctagctttaagatttctgagaactttgtgtcaaagaaatctttgaaaagttactgaagtatacagagagggtcacaattttaaatgtgcaggtggtccgggcgcggtagatcacacctgtaatccaacactttgggacgcccgggtgggcgggatcacttgacccaagattttccaaccaaccttggcaacgtgccaaaaccctatttttcctaaattaccaaaagttccctgggtgtggggggtgtgccctgagccccaact

SEQ ID NO: 55946 - DNA, 770 bp, Homo Sapiens
ccttggacatatacagtttcgggtccggattcccgggatcttcctttcttagcagctctgctgcatgttggttcctagtgttgccattattaactgacaatcatagaatggcttctgcttgcttcacaactgaaactaggagggcggaggggatgaggtggcaagaggggtaaaggcagtagcattaatgatggaccggttaataagagactctgagtgtgatgtaaatagtatgtttattaaacaatagagcccattggaatttttttcttccacgtattgttagatgtaaaacctgatacactaccatacagacaggtgattgactacaccttgtttatgtagttctaatgtggaatacttagagttgttatgaattacgattatccataacttttgaatctaaaaagctggctacacaacgtattttgttggaatctttttgtaataccaaatgtctaccctctttgatctagagaatcacaaaattttagaaacatcactacccaggttaattgacttttttattgtttactgtccaaatacctgttacatattaatagtattctactttatatacctgtaataaactattcagggtttcataagctggatgttgaaatgttttgtaatactgctcttcttacctagttataggaacttttataatagacctgcaaaagtgaaacatatctttcccagattaatagccgattagatgaatgagccagcttcatggatcatgtattgaaatattagttgtacctata

SEQ ID NO: 55947 - DNA, 770 bp, Homo Sapiens
  misc_feature (727)..(727): n is a, c, g, or t
tttataggtcctttgaaggaaaattctgtgggcaaataagattgtgatacatggtatttcagttttcccaaatgtggccagcccgatctggtcaaaaattttattttttaaaagctatagtgtctttttttcttaaatttgaggcaacatgcacaaaattggagatttgaaattaaagccaagatttgtagtttctctggaaagacctggcaagattggactggattgctatgtgaccagggtcccactagatggggctgcatcctctaatccccaaatccttatgttccctgcatgctcacctttgttacctgcctgacacctgtggggcttttaactttatggcaactgccctattctctggatccttcctgaggatttatgatgcgtaatactccaggaatctggttagctttgcttaacacatttccaaaacttgtttgaatgcatgagtacagtcactagtagcattctgtgcagtacaatgtatgggggcttaggagtttagggtagtatacaggattagggataggacttgagtctaatcctaactcttagcagttacactggatgacattagagcaaatggttctttacgtctacattttcttcatctgtagatgtaataatttccatatcaactatgatgtacagtgctaattccaatgaaatgttacatgtgagaagtctttgaaatgtaaaaaacactacagatactggaagcagnttggagaattaaaaaacactacgaaaacaaaaaaaaaaaaaaa

SEQ ID NO: 55948 - DNA, 1006 bp, Homo Sapiens
ggcaagacgaggcgacgcagctccaccacgcatgtcaagcaagccattaacaagatgctcaccaaaatcagtagttaggcagcccagctgaggtggaccaactaattggaaacactcttccccttctgttcccctttcaaaaataaaacaaaatattgcattctttgtttggattctgagaaatgtctgggcttcccattgtttctggcctctaataggttgggaagttttagcgtgttttatgcaatttcagtgctaacaatttcttcctttcctgcttgaataagatacactctaatggcatttgaacatgtaatcaccagagattctgaaatgactggtttatgttaagctatttttaggcatcttcaccttgctttaagtaggttgaagtttttgcaaaggcatttaaaaattcaatttcttgtcagatactacaaataattttcttaaaagtctaagatagcagaaaatacagtaaaaacacaggagaagaagctgagctattggaacaggaaatagaaggaactctagtttctgtttgaagtgaggattttctgaattatctaatatcatctaggttttctttaaaattttattttgttcttcagttcaagcatcttctcactaatgtttttcactataacagagaattcatttcaatttgagttggttctctcaatgatctattgatcattacaccctaactctccttccttggctcaaacaatattttccctataacaaaggcaataggacacaaaattcacatcctgctgggccttttttcatcaagtcagggtgatataaaaacattggaagtcttttcaccaaaccctgactttattgaatgctagtagaagatgtagaattagagacatctgatttgtttatcacttagcagaaaaccacagtccaaagacagcaattaagatggagcttamcatgcytcattgggagtctagacttgagcaggacagtagaaaaatagctctgwtcatwagtt

SEQ ID NO: 55949 - DNA, 858 bp, Homo Sapiens
aaaaaatcctgaaggtgatttaactgagtgttaggccctgtcaagccacctgctaaggctcatggtctttcagactagcttcaacattccaaatcaggcaatagctacaacggaaagataattggacggggaatcctgagatcagagtcctagttggcttgtctcttgtagcaggattttttaaatcaggggcagctctcttctcccatcccagccatgaatctttcaaccttagtggtcaccaacttgactccattccttatatcaagccttgtcctgtcaattctcccttaaatgttagttgcatccatttctaaatatatccatggccatcaccctagtaaaaagactattacctcacaccccgcacttgatcttcccccaactttaagtgactcagttccttatatcactcccacaagaattaacaaccatgtccatctttcatttttctgctgaaagattttcagtggttcccactgaataccaaataaagttcgaatcccttagatggattcacagccttctacgttctggccccagtttatctcttgaaagtcactactcagcatctgacatgcactaaaaatccacaagagtgatttaaggttgctatggtgagtcaaccggtaataaccatgttactttctgtccaaatattcatttacttataaagcagggggtattagcctgggagctaaatgttctgagaattttttcccacagatgtcattttacttcaacaggggtggccggtgtggaccagcagtttgggaaccacgaggcggccggaaaaggaacacgggtcgcgcacggatctgggacgagggcccccttttagggcacttcttgcgttct

SEQ ID NO: 55950 - DNA, 772 bp, Homo Sapiens
  misc_feature (613)..(613): n is a, c, g, or t
  misc_feature (634)..(634): n is a, c, g, or t
gcagcgcgcccccaacactattttaataaaccattaaaaaaaacacattttcctgctggctggccacattgagagtgctttgtgaaaagaaaaaacaaagacattcacaaatcagataaaactggagaatgacatttgtctgtaaatggcttcttggtcttgtaatggcgtggtttcttttttttttttttttgtccttctcaaggtgggaggggggattgagagtgctctaaggagacttttcctccaggtgggaagagataaaaagacattaattagttgtttatcaagtgacatttagttgtttggttttgggttttctttttttgattgcgatttttcctctgattaaaaaaataataataaaataaaaaaaggttaactataaggagatggcctttcctccttttttttcttaaggtgctgttttgggggaaaaaaatgtaatgaaatgaccaaaagaattacacagcattaattaaaaatggaagttttccacttccttgataatttggctatctgaataaatttgtgaatttgctaggttaagacctagttcgtggtcacattttaacaaaacagcttgagaataaagaaaataataaaaggctgntcttaattattttcctttggnggcttttggttggctctttttgcatagggcattactttggtcttctgggtccagatttataaaagcagaaattccctaataaggcaagggctttgggggtatgctttgcaatttcagttggactgggtgctgcttgct

SEQ ID NO: 55951 - DNA, 796 bp, Homo Sapiens
  misc_feature (4)..(4): n is a, c, g, or t
  misc_feature (21)..(21): n is a, c, g, or t
  misc_feature (24)..(24): n is a, c, g, or t
  misc_feature (722)..(722): n is a, c, g, or t
  misc_feature (787)..(787): n is a, c, g, or t
attnataaacacggcaacagnagnatacaccaaaagtcatcctcgatgtttgcacagtatagcagtgaaggcagctatatgtctacaatttaacatttttcttgagagaaatgtcattcttgaataaatctatttttaaaattgatctgggaatgattcattatgctctagttttctgagtttgagtataaagtttccacttgtctttaatcaaaagaaaacttatttattctttcagagaaaattttcatccatacacagtccattgtgtagatacggggcaagaggagagagaaaatgttagaaaggggctgatgagatcttaagaaacattttaaatctctgttttgcacacgtatttgagaatcgaatatgaggactttttaaaaaaagttttgagaaataatttctttgttaaatcttatattttaatttcttttgaaaactacatttttttgtaaaagcaattatgttattcatgaggaagctagcataaatgagagaaatcgaacttgataagttcttgcattgagtgactgctaatttgaaagtaacagaaagtaacacatgatgagacagatttcctttctggaacacttgttgtttcttagtattgaaaaaaaggactttcattaaaattataatttatccttaaggattagcaatccttttaaaaagagaagagaagaaaaacgtacttgattggtttccctgagttgtgnttttggcaagcccagagctcaaggaaacctgcttggtgacttcccccagctggcaattcatttangactgcaaa

SEQ ID NO: 55952 - DNA, 696 bp, Homo Sapiens
  misc_feature (22)..(22): n is a, c, g, or t
tcacccccactagagcattttntcatgcattcccactgatcacaaaacccatactactacctcattgacaccatacctgctaacctcgaggctttagtcatacaaagaaaatggcctttctgtattgttcttctgtgctctcataatgcttaaccatgtcttttacttaaacaattccaggaactggccttaggagatccaaatagggaaccaagattgcagagtgtcccatcttgggagggaatgctgaataattaattgatttacagccttgttgccgctggccagaccaccaggtggcccattactcgagatgatcatcacaaccagatgatgctaacctatatcctctacccttcgcgtgctttgtctgggaaaagtcttttggccccatgtcaatttctattgcattgagagcccaagagcccctggtcagtcaggcttccatttagcatggcgtttgcaaggtttacccatgttgtagcatgtgtcagaatttaattcctttctatggctgaataaaattccattgtatgaatataaaaaaaaaaaaaaaaaactcgagggggggcccggtacccaattccgccttatgtgagtcgtattacaatttattggccggcgttttacaacggcttgactgggaaaaccctggcgttccccaacttaaacgccttgcagcaaatcccccttttg

SEQ ID NO: 55953 - DNA, 795 bp, Homo Sapiens
  misc_feature (525)..(525): n is a, c, g, or t
  misc_feature (680)..(690): n is a, c, g, or t
  misc_feature (692)..(700): n is a, c, g, or t
  misc_feature (702)..(702): n is a, c, g, or t
  misc_feature (704)..(710): n is a, c, g, or t
gggccgttggggcggaggctgcccttgcagcgccgcaggaactcggccaggtgctgatcggtgaggtggcctggggagggcagaggcaaggttaccagggcaccatgcaagcggatgtcggcactggatgggatgtacttctcagccccgctgagcccctcatttgtgcccagcattttgtgtgcacacatggcctcattggctctcagtcccgagagatttactaaaccccaattcatagaataggaaactgtggctcagaggtcatctacctaaagacacattaagccagaatttgacttgatgggatggcttacaagtcctgcctgatacctacacaccatgatgccccacccctgccaggcttggatcggaggagtgaacctgggctaagagtttggcattgcaggagctcccagagagactgccttccctacactagaagtccccacaaaggcttctgagaccacaaaatacaaggccagacctagagtgtccacagcaggcctgtgctgcccgcctcangaggtggccgactgctgctagcggcctgccgccacgtcagcagcccagggcacagcgctcgaggtgtgctgttaggctaagaaggtgcagggctagacacgaagcttaaactattcatcttaataaaaataaaaaccctttataaactccctcgnnnnnnnnnnnannnnnnnnnanannnnnnnccctggtcggccggcctcgggcccctcaagaaaacttttcatagacccatttcgttttgggggccgcgggggccccagtaaagac

SEQ ID NO: 55954 - DNA, 622 bp, Homo Sapiens
ggcacgaggtaatgacagataattgtctgttccccgctgaaactgaagaaatctagtttttttgtgaacatttttgtggtcttatggataaggtacatgaagatttttgcagcagtattagtggttcagtggctgcactttattaatcagtgtgttaatttttgacagtgattggactagaccttttcaaatagagtctgagggtatcagacagtgaaaatgtgctgtaactaagtagcatgtaaatcagttgattgtaaaacgtttcgctgggaacttattttagctatattttacttcagacagattatgatacaataatctacctgtgcatcagttagtaggtgctgcagggtttcttactatttacagaaacattttgtgcagtctttgttataaattttcagaagactatactctttactttgaaggtctattttttaattatacctcatttagctaactagtattctaatacctggtagaaaaacagtgagccagcctttaagcatctaacaaaatttagactctttgttttgttttgaactgaagacatcattgggaaaggtaggaaatattagtttaggatagagcatacatgtcatatccagtagcataaaaa

SEQ ID NO: 55955 - DNA, 846 bp, Homo Sapiens
atctgaatgtctttctccctagcacagtgcatacaatcagggccttgggtatttccagtgataactttccttggagaggatctaagaaaagcccagatttcggtagccatctccctccaaatatgtctctttctgctttcttagtgcccattatttccccttctcctttcttctgtcactgccatctccttcttggtcttcccattgttctttaactggctgtaatgtggaattgatatttacattttgatacggtttttttcttggcctgtgtacgggattgcctcatttcctgctctgaattttaaaattagatattaaagctgtcatatggtttcctcacaaaagtcaacaaagtccaaacaaaaatagtttgccgttttactttcatccattgaaaaaggaaattgtgcctcttgcagcctaggcaaaggacatttagtactatcgattctttccaccctcacgatgacttgcggttctctctgtagaaaagggatggcctaagaaatacaactaaaaaaacaaacaaaaacaccaaaagacacaaaaaaagccatttaaagccagcactagagggagtcagttcagttccgtaaaggtatgctcagatgccgcatgctgcaagctgttggggacccccaggagggcaaggcagcctgtcccttgccccagggaactagaacatgacaagcattctcgactgtgctaactgtcccttaccttaactctctgggccgagtctggaacggtcatattaatcgctatagaacccattaatattctcagatttacgatcacacctttggttacaaaaaggctcacacggcaaagaaccacactaga

SEQ ID NO: 55956 - DNA, 524 bp, Homo Sapiens
cgggaccttcctgcacccgttcccgagcgaaagcgtaagcgactgcgtcgactccccccccgcggcggcgtcgggccggaggggcctggcgggcaggccccggcggggcggccggggggccagagcaagaccgtgaccgcggcgggccagtactcgccagggatgaccatgagcgtgtgatggggcggcagccccgggcctctctgcgggcctaggcttctgcccagcgcccctgctcagggcgaggggctgaggtcacacctcgggcacctggactcctggccaatcaaggcttgcccagctgggaggccccacacgaaagactcttaccattttattaaaaacgcaaggacctcagagacgttcttttctgtatggacccttcctgccatttgtattttgtcccagagagaaaggctctttggggggcccctctccccaggacgtcagggggtggggcccatcaataaatggaagctggttttggtttttggtaaaaaaaaaaaaaaaaaaaacctcgtgcc

SEQ ID NO: 55957 - DNA, 712 bp, Homo Sapiens
ttttttttttttttttttacttttattagtctttttattcttcttttattgatcacctctgaagttcagtagcacactgcataattttttgcattagcatgctgttgtttctacctaaaatgaccggggtccttgccttctgcttcccatagagattgtcccaactccataggtccatagtcacaaatgaggacagctttacatgtaacatgaatctaaaagaaaaaaacaccacccttaattaagaggcaaggaagctatgacagatccctcccaaatgcagtaataggtcagctattactataccaacctccagagcttcacacgcatccttcccttagcctaagattatacttcattttacaatttcagagatccaaccatctctgaaacctgtctgaaactagcccacatgccatataccagattacaacatttaggccagcttcactattacttttcctccttttacgaccaccaagaccagtgttcagatccgatgggaaagggatcaggaggattaagctgatcaactttaccttaaagcacagctccagaaacaagctcacctcctcagtatcacacactgccaggaaacttgggggcaaccaggtcccctgcatttcatcactgtcattaccccggaagtcctcgatcaccagaaaatcaccttctgtcatcttaagagtcttcatctgcttaagtacgccgg

SEQ ID NO: 55958 - DNA, 578 bp, Homo Sapiens
  misc_feature (536)..(536): n is a, c, g, or t
  misc_feature (561)..(561): n is a, c, g, or t
tttggcaatgctttaaaaccttgtttctgtcctgcagagttacagtctttctctcagggagctacagcggggcattcaccatgacaatgcctgctgctcttcctcatttagccggtgtccactaactcagtgttgtgggccatttgtaaacccttatggagtagaccccaggcagacgtagggaaagaaagagaggatctgtatagacaagaaagctggccatgtgggaagtccagagctcaaaccatgtgccccagaggactggtgctggcattaagcctgtaaatcaaaggcttctttggcaggaccctgggctgttagaatcaccctagggagcagagccaggggacattttggcccctgactagcaaggcacaaccctataatggcagaagcccttctttcccctccccgtttcccaccagacccacttccttgatgggcctctagcacccttccaagctgatggggtcgggaatgtgagctggtaaaatgggcagtggaaggggctgtactgtttctttacatctcacggngactagagccagtactgaatggctnttctaggtagtgtgtta

SEQ ID NO: 55959 - DNA, 901 bp, Homo Sapiens
  misc_feature (26)..(26): n is a, c, g, or t
  misc_feature (612)..(612): n is a, c, g, or t
gcacgaggagcaatgccaataccccnttctgtgaatacaggttatttcaagctttcgtcagtggcaaccactcttaggcagcagcaactggttttggaaatttccctgatgtcagtaccacctggatgtggacctttgctacctgtattaataccagtggcctcattttgctgtatcattacaatttggcttcttatattaatgtttgaaaaggattaaagctggtattctagaacatgcccttcactggttgtgtaaataaaactgtagaatgacacttcagatgaagttagtgtgattttaattgtgcactacaaccgagctgtaaccagttactaattttagaatgtaatcccaggacaatattaagcaaatagcctgcagtgcttcctgtgaaatagtgaaggaggagggcatttctgtattccaggacttcttggggtttcagaatgggtttgtatgattttttttttttttgtagttttatttattctatcagtctttttaacaaatgtttattgctgcattttttttttttccagtgtatcattgttttactgcccttgtagtactggaatttagttggaagaataaaacatttacttctaagangtgcaaacaaatactaacccaaatagggctcttctaacgggccgcctcgctacctttagggaccggttataggtaaggtcccttttagtggaggttaatttaacattgaaaaagggaaaaagtttgattttttccaacattttccggggcccccccttaattcccctttttttgcgggaattttagccctttcctgagttttttgccccccccaaaaaaatgctggggtgaaaagaaaaaaaaatgcctcaaaaataacatttgggcgttcacccaagtgggggttact

SEQ ID NO: 55960 - DNA, 565 bp, Homo Sapiens
  misc_feature (540)..(540): n is a, c, g, or t
  misc_feature (559)..(559): n is a, c, g, or t
gcggccgcgggcgatgccaaaaacggtaagacggggctggcggggcgagcgccaacttcctccccgacggggacggcgcggtggcggggccctgggtggcgcgggcggtgcgtggacaatgcgagagtcaggaagtgctcaccccgcccctccgccccgccgcggctgccccttcgcggtccccacgcctggcggcggggacagatctgcggcccctgcccggtgtccgcgcggggggcagcccgcgccccacactctgaggggctcccggctgcggcagcgctgccctcgggcccagcctgctgcccgcgctggcactgccccgccgtgtgtgccgggccgaagggaggaaggaagggaggaaagagccgcccaagttgagaagaatgatccgattgaaaacttaggcaccggttaattcttcccggtgctccaaggccacccgtaacccccggaatgaaggagagagagcctcaattcttagcacacccaggcttgctgcgtcgatcgccacaggtgaagaggcctcgagacatttanggcctctgtgtttgctctntaattt

SEQ ID NO: 55961 - DNA, 334 bp, Homo Sapiens
ttttttttttttttttttgagctcaaagagagttctcattttccctattcaaactaatacccatgccgtgttttttaccttggatttaaagtcaccttaggttggggcaacagattctcactcatgtttaagatcttgttatttcagcttcataagatcaaagaggagtctttcccttttctcttttaccctcaggattctcatcccttacagctgactcttccaggcaatttccatagatctgcagtcctgcctctgccacagtctctctgttgtccccacatctacccaacttcctgtactgttgcccttctgtcgtcttctcgcagccgta

SEQ ID NO: 55962 - DNA, 1187 bp, Homo Sapiens
  misc_feature (994)..(994): n is a, c, g, or t
  misc_feature (1093)..(1093): n is a, c, g, or t
  misc_feature (1174)..(1174): n is a, c, g, or t
gcctgggtggcgattcggacgaggagaaatagaagctcaaataaaatgggtagtttccttgaggtcatcctgttagtaagtggtggaatgaagttacaaacctaggttttattggtcagcacacacagtgccgggcactggcagtacagcagtgaacaaaaggtctgttggtttgtctgaagctctcaaccttgattctgcatagactcggtggattgcccaaggccactcaaccagttaatatcagagccagctctgctgtttgaccagtatattattttcaccatgctgtatctgcttctcagtcaccaaaagcaccagctaaaattgtatatagactgattaggggacttccaacctaagattgtcctggaaacttaattcttatcttggctcatctcttcaaaacagatgcctctttcgttggtgacctcagatacactgttcagaagtactcaaagtattccttttttctcacatttgagagtcactctagcattttaatgagttaagcaagccagccctgcatttccaaacccttcccagaagtctaaccttactttgatctgatgacatgggctttttaaaagattactatttttttttagaggtggggtctcactatgttgcccaggctggaatataatggctattcacaggcacagttagggtgcactactgccgtgaactccaggactcaagccatcttcctgccacagcctcctgagtaacctaggactataggtgcatgccaccatgcccagctgacaatggttttatatacataatatttcctcacaaacatttatggcttatttgggacccgtaaaaaccctcttcactgaattagccctggttaaaagggttgggcattttactcccaggtcacctggcctttaaccattggagtattacaggtctcccccccacaacaaaaaattgcagaggtttccctctagacatacaatcccccccgcacggccccaatcggttnttacccgcgcgtgtactccaccaaccctcccaggcgagcactgatattgtatgtcgccaccagcccggggctggcgtttcatacttgggacaacgcctnatgctccggtgcatctaccgacggggccacgatcacatatcgcacacctaccggtgacgagtgattcaccccttatgttcnaccgaccgcctac

SEQ ID NO: 55963 - DNA, 580 bp, Homo Sapiens
aatttaggtgacactatagaagagctatgacgtcgcatgcacgcgtacgtaagcttggatcctctagagcggccgcctactactactaaattcgcggccgcgtcgacattaattagtttttgcctgtctttagagaagcagatcattgatcattgtgaatttgtactgcaaatactgtatagattattagctcacctgacaattatagttggaccccttctaataagatgatgcaaaaggcctgtccaagtattagcagttgctattattgctgagcacagaaactctgcatgagtgccccttattttaaaaacagcccaatggctgggcacagtggcttacacctataatcccagcactttgggaggccaagacaggcagattaattgaggccaggagtttgagaccagcttggccaacatggtaaaaccctgtctctaccaaaaatacaaaaatcagccaggcatagtggcacatgcctgtaatcccagctatatgggaagctgaggtgtgagaatcgggtgaacccagcagtggaggctgcagtgagcccagaacacgccactggccttccagctgg

SEQ ID NO: 55964 - DNA, 705 bp, Homo Sapiens
  misc_feature (630)..(630): n is a, c, g, or t
tcgtccgcccggcttgaggcccgcggggagcgcggcgcaattcgtcggcccgcgggggggcggcctcccggcatcttcgcggcgaccaaggactaccaggaaggggagcggctgggatggcgcgtccgcggccccgcgagtacaaagcgggcgacctggtcttcgccaagatgaagggctacccgcactggccggcccggattgatgaactcccagagggcgctgtgaagcctccagcaaacaagtatcctatcttcttttttggcacccatgaaactgcatttctaggtcccaaagacctttttccatataaggagtacaaagacaagtttggaaagtcaaacaaacggaaaggatttaacgaaggattgtgggaaatagaaaataacccaggagtaaagtttactggctaccaggcaattcagcaacagagctcttcagaaactgagggagaaggtggaaatactgcagatgcaagcagtgaggaagaaggtgatagagtagaagaagatggaaaaggcaaaagaaagaatgaaaaagcaggctcaaaacggaaaaagtcatatacttcaaagaaatcctctaaacagtcccggaaatctccaggagatgaagatgacaaagactgcnaagaagaggaaaacaaaagcagctctgagggtggagatgcgggcaacgacacaagaaacacaacttcagacttgc

SEQ ID NO: 55965 - DNA, 785 bp, Homo Sapiens
  misc_feature (694)..(694): n is a, c, g, or t
  misc_feature (702)..(702): n is a, c, g, or t
  misc_feature (770)..(771): n is a, c, g, or t
  misc_feature (774)..(774): n is a, c, g, or t
  misc_feature (780)..(780): n is a, c, g, or t
gggcgatatagaactagtggatcccccgggctgtaggaattcggcactaggttatttatctggtagtttcctagagcaggtatggcagcttgttctttcctctcaaaacacttagtacacattcatttgcattgatgtttccctggcttgagtatttcttctttatgctgtctagcaactgctctgaggaagaactataatacaagctttaaagagtctgttcagaatcattacaaataagttgtgttatttaaaattataattcataagggagaaagatgaaaaatgttaccagattaaagaagatttttcaaaaggatgtaaggaaagaggcagtgttaaacactgttaagaggacagtttatcagtattttttactaaactttaataaaacttttctatttgaatttctgctatgaatttttcttcagcatttgtcctcagtacaggtggttccttgaaacattgtttctaataaaactagaacatcctgatattttatccattctatagagatcattgatggtacacagacatacagtggattatgtttgttgagtgaatggaaagagagattgtaggtttacaacgatgcagctcttgagaccggagtttaagatcagcctgggcaacatagtgaaaccccatctttagcctggcatggagatggatgcctatagtcctagctactggngagaccgnggcaggaggattgcttgacccccagagtaacagactgcactcagtgacagacgcagactccaacacannaanaaaaanaaaaa

SEQ ID NO: 55966 - DNA, 861 bp, Homo Sapiens
gcacgaggaaaggatgcctgaacacgcaaagtcggctgcagaattattgccaagttgctgctgcttccaccgccccttaaagttagtcagtttttcttctcttctttgacattctaagaacttatagataacttaaaacttttgtgaggaagattaatgtggccaataaaacctttaaatgttaagtgtcaagaaactgcactctcccttcttaagaactgcctaaagtgtaaaatacatttgaatgcaatttttggaagattttttaatgttcgtttattaaactaaccctaagtgatttcttcaaggactgcaatcagcgtatcaatttgctttcccaaaggctcttccaacccgtgggttttggggtccaccgccaccaccagagaggcttttgaacaggtgcctggctgtgttcagaaggaagctggcctgtgtgcttctctccggtgggctcagccgacgtgtgagacttgttctgttaccaaatgaaccgggctgccacgctgtgacaggcgtttgtcctctgctttatttttactttgaagctcaaatgcgagtactaagtgttcacctcagcgttcgaatcattggcctgtaaccctgtgggctgcttcacgagaattcaggacctgcattttcattctaaaaagaaatgaacagcttgtgaaagagttttttgggcttcatagtttctattcatggaggtagtgttacttcctttatccccctaaagacaaaatgaagattaaagggggattggccagggaatgggttttaaaagcacaaatgtgggtagccttaatcatctaccaccatggaagagtgaaaccctttacgaaaatgaaaagtcaaaatgaa

SEQ ID NO: 55967 - DNA, 780 bp, Homo Sapiens
ccggggccctgggccaggtggtgaattacagcgactcacggacagcagaagagatctgtgagagcagctccaagatgatcaccttcatcgacctggcaggccaccataagtacctacacaccaccatctttggcctcacatcatactgccccgactgcgccctgctcctcgtcagtgccaacactgggattgctggcaccacaagggaacatctggggctggccctggccctgaaagtgcccttcttcatcgtggtcagcaagatcgacctatgtgccaagaccacagtggagaggacagtacgccagctggagcgggtcctcaagcagcctggctgccacaaggtccccatgctggtcacctctgaggatgatgccgtcactgctgcccagcagtttgctcagtcacccaatgtcacccccatcttcacattgtccagtgtgtctggagagagtctggacctcctcaaagtctttctgaatattctgccgccactcaccaacagcaaagagcaggaggaactcatgcagcagctgacggagttccaggtggatgaaatctacacagtaccagaggtggggactgttgttggaggaacactttccagtgggatttgccgtgaggggaccagctggtggtgggccccacggatgatggctgcttcctggagctgagagtatgcagcatccagcgcaaccgctctgcctgtcgtgtgctgcgagckggtcaggctgctacacwkggcgcttggggactttgaccgtgcactgcttcgcaagg

SEQ ID NO: 55968 - DNA, 776 bp, Homo Sapiens
  misc_feature (612)..(612): n is a, c, g, or t
  misc_feature (684)..(702): n is a, c, g, or t
  misc_feature (704)..(708): n is a, c, g, or t
  misc_feature (710)..(723): n is a, c, g, or t
  misc_feature (726)..(727): n is a, c, g, or t
  misc_feature (729)..(730): n is a, c, g, or t
  misc_feature (732)..(734): n is a, c, g, or t
  misc_feature (736)..(736): n is a, c, g, or t
gactttgaagactacagcgggaggtgttggaggccctgggtgaagtcatggtcagccggccccgagagtgagctttccttcccagaagtctcccgagagacatatttgtgtggcctagaagtcctctgtggtctcccctcctctgaagactgcctctggcctgcagctgacctggcaaccattcaggcacatgaaggtggagtgtgaccttgatgtgaccgggatcccactctgattgcatccatttctctgaaagacttgtttgttctgcttctcttcatataactgagctggccttatccttggcatccccctaaacaaacaagaggtgaccaccttattgtgaggttccatccagccaagtttatgtggcctattgtctcaggactctcatcactcagaagcctgcctctgatttaccctacagcttcaggcccagctgccccccagtctttgggtggtgctgttcttttctggtggatttaatgctgactcactggtacaaacagctgttgaagctcagagctggaggtgagcttctgaggcctttgccattatccagcccaagatttggtgcctgcagcctcttgtctggttgaggacttggggcangaaaggaatgctgctgaacttgaatttccctttacaaggggaagaaataaaggaaaggagttgctgcccgannnnnnnnnnnnnnnnnnnannnnncnnnnnnnnnnnnnnaannannannnanaaaaaaaaaagggggggccgcctccaaaggaatcccccca

SEQ ID NO: 55969 - DNA, 942 bp, Homo Sapiens
ctcgacagcgagctctgctccagaaggcgcggagtcaaccttcccctatgctgccgctgcctgtagctgagggctgcccacctcccgccctcacagaggagatgctgctgaagcgcgaggagcgggcgcggaagcggcggctccaggcggcgcggcgggcagaagagcacaagaaccagactatcgagcgcctcaccaagactgcggcgaccagtgggcggggaggccgggggggcgcacggggcgagcggcggggagggcgggctgcggctccggcccccatggtgcgctactgcagcggagcacagggttccaccctttccttcccacctggcgtccccgcccccacggcagtgtctcagcggccatccccctcaggcccgccgccgcgctgctctgtccccggctgtccccatccgcgccgctacgcttgctcccgcacaggccaggcactctgtagtcttcagtgctaccgcatcaacctgcagatgcggctgggggggcccgagggtcctggatccccccttttggctacgtaaggcccttaacccggactctgcgccccgtcccatgcccggctcttgagtatcttccccaccctattaaattacctccggggcttaccgaccctgggtgcgggccaccccgacggggcgcggggggaacgccggggggatctatggggggcggcgcgaaacacagggaggggaaagggccaccggggcccatagctgggttccctggaccccggtttttcttggaccacagggggcgaaaacgggcccggcccccccttaaagcgggaggccgctactaaagtttgaaaaaaggccgcgggaaaacctggccatcaagggaatcccgcggcggggccccccggggaattttaaccccccccacagggcgcgggggcctttcttcttccggggccccaagggttgc

SEQ ID NO: 55970 - DNA, 476 bp, Homo Sapiens
ccagacctggtgccttgacgcccccaccccagctgggacggtacagagaagggtcttggtttcctctcctactcccttccttaggctcctgaactcgtttgctcctaaatcttgttaattctttttctctggattttggtttcttttggctttcccttgccttcccctttctctgtctccaacactctttccccatgtctttctggctgtctctatgttcctcttctcttatcctcaactttctgtccattcgggcctcctccccacctcccacgccccagcccctccctccttggtctccttttcgatatgccaaaccaattttgggtcgagtgcatttaacgagaacaaaacaaaaggctcataacaacaagaacgtttcagaaaaaaacaaaaagttttaaaaaaattgttgagtcaaaaagtcaaacaataaagaaattaagatttcttggaatgacaaaaaaaaaaaaaaa

SEQ ID NO: 55971 - DNA, 501 bp, Homo Sapiens
cacagcagcttgggtaccccccaacctccaggagctagtggaggggtgtgtaacagggtcataccccctccctcttgtccaccctacccccagggtaaggggagcctctctccttccccatcagactggatgtgcctttatcctctaatgccccaatctctctctgaacacccccattctccacctgttggtggggggtgctcctcgacccacccagatttgaccgttcagggggcctcccctgctatccctcctcccatcctgtaccccccatttctggggcctcatcactgtggaagacggggatagtaagagataagtgggtgggaggcacggggaaggttttggagtagaaccaggggtgtgtatgaaggggggtgacaaggtccccctggggaggggaccaaccttgtctggtggatgagaaggcgtatttatttttcactgtacagtatttaaaaagagaataaaaaaatccaaatggcaaaaaaaaaaaaaaag

SEQ ID NO: 55972 - DNA, 573 bp, Homo Sapiens
ccgccctttttagctggctcaggggcttctatgggatcctggaagttccttagggacttgcccagggtcccagggccacccacacttcatctgctccctcataggccccacctccacgtcccggctgggccccagaccccagcttcctgccctccaccgggagtctgcatggttgggagtcctgggtggaggggcctttgtgaggctggacccggctcagggcaggtggaggagctgggcctcccacagggtgcccgggcagtgccatcctggtgggggagggcagccttcaaacgtgtggggtctacagtcctcaggtctaggcagggctgccggttctccacctccccatccgccccaggccccctgcctgtgcctgccttgcaccccctctgcttgggccacggtgtctctgcattgcctgcctttttgccttcacctcttttcttccccgccccctgcacattcggggtctcagcccccaggctgtgagctccttgggggcaggccctcaataaatgtgaactgctgctgccaaaaaaaaaaaaaaaaaaaaaaaaaaaaaaaaaaggg

SEQ ID NO: 55973 - DNA, 436 bp, Homo Sapiens
ctagtcctaattgcagaaagagcgtcagtttccctcccccgagcacttcagatcagtattgtattcattttattcataaatggatatctttttcattgtcatataaagctgggttttatttttttttcctgaaaaataattgcctttattttctctcgttgcctccttggtttcagaagagagtagttttattataaatattgtatggactttgtatattaagagaggagctcatttcagattcctaaagaaatagacattttactgttattttgaaagggcatcttttgatttttttgttgttgttgttcacttttggcatatgtatataagtaatattgacggtgatatgaaaacttttgttatgtgaagatatttaagtcagaaaattgttaaataatattacttcttttccaaaaaaaaaaaaaaaaaaaaa

SEQ ID NO: 55974 - DNA, 704 bp, Homo Sapiens
gcattgtggcggastgcaggcccctgacctgaggaatttccgggcagttttcatggctgtggtgatggggcagggccagagagtggctgagctgatcctgcatcatgcccgggccagcgagtgcagggacgtggaggggttcaaaaccgagatggccatgctggtgacccaggccaggaagaacaccatcaccctggagaagcttcatgtgtccagccttctctctagtgtctttaagttgctgatgactcacaaggtaaagcttgagagcaactttgcctccattgtgtttgccatcatggtgttggaggggcttggccgctcactggaccccaaactggacatcctggaggcagcgaggcccttcctcctcacgggcccagtgtgccccccgtgatggggcagtggcctctgtgggcccttgtcaagagctggaggccactcccaagagcctctcctatggcagctgggacgttttaaaattgggacaccaatttcaaatgtaaccctccagtggtggaaggcacaccatggcttcctctgcttggtttgagggtctgttcaaaagctttgggccaattagggagtaaaaggagggaaggggcctatccattccattgtggaagctgggccaggtgccagggacactctccttcagggaaaatgttatgtggaggaggacgaataaatttattttgttttcc

SEQ ID NO: 55975 - DNA, 235 bp, Homo Sapiens
ccacgcgtccgagccccaggggtccatcctcccccacttccctccgaaggcccagggaacatacctccccctcccccaaccaactgagaagctgctccctcccccagcaagcccagcgccaggtgctcttgccttttcccactgagagaaggctgctcttttgtactgccccccgctcattaaacagcctcccccagccctgagtgcactgatgtccgcaaaaaaaaaaaaaaag

SEQ ID NO: 55976 - DNA, 412 bp, Homo Sapiens
ctgacttctgactggctgagcagtgggttccttcaggttccttgccaaccctcctcccctgcccacaacttctccaaacaaagcaggctgtttgctcacttcttcaaaaggaggaatgataacccaaatctgcccaagtgacacttgagaaggttttggctggggttcctggtggatttcttactacctaacgcccaagaaaaccaactaaggactctcaaaccatacctggtgggggttcttcgctcaacctcttcttccctaggtcaaagccactatcatctgatgtgttagggatgggttctgattggcagaaattaatcagctcccaatgggagcccacggaactaagtagggtcccaagaaaaaaaacgggagctatttcacagagctgagcttctggcaaatttca

SEQ ID NO: 55977 - DNA, 284 bp, Homo Sapiens
tttttgagacagggtctcagtctcactctcacccaggctgcagtgcagtgagctgagattgtgccacttcactccagcctgggtgacaaagtgagactccgtcacaacaacaacaacaaaaagcttccccaactaaagcctagaagagcttctgaggcgctgctttgtcaaaaggaagtctctaggttctgagctctggctttgccttggctttgccagggctctgtgaccaggaaggaagtcagcatgcctctagaggcaaggaggggaggaacactgcactc

SEQ ID NO: 55978 - DNA, 915 bp, Homo Sapiens
tcaggctgtgttcctggaaccccaataaccctgggcccccagggccagcctgttgtagagggaggctatctgaccgccggtctggcagaggagatgggtgggcagctcccagacaccccaaaggacccggttctcttcccagagcgtcctaaggttactcttggaacctgatctttgttccctcatcccagggaaatgacacactctgtatttctgttttatttagaaatgatttaaaaaacattatacaaaggctgatcagtttaaaatgtgactgacactgaaatgctgtgatgtcccccaggctgaggggaagctaggctctggggcccccagtgctttgcccctctgtctgccctgtcctggggtgatggacaaacagatgaccacaggcaggagaatctgagattggaagcctctaggctgagccctctgggcctggccccacatccctcacctctgcagcctgggctgcctgcctccatctcctgttcattctcagctggcctgccaggagccaacggggagcctggcgggaggcgggggtgcctagagctttcaagaagtgagagcaccaacctgaggagtggacagggaccaggaagtgggggaagggaggccaggaagaggtggatacaggagacacttctcatctcatctcagaccctagaggggtccacagatggggacacaagacccagccagcccactggatggcccgggcaagtaacaacctctctgtgcttcatctgagggcacggtgaagagttaccgtcggccctcccagggcctaacacgagtttcatgggagtggaacagggggaacttaataaagggcttttgcaagccaaacaaccccacctttgtgttaagggcgcgcccctccaaaaagaatccctcaagggggcccaagtt

SEQ ID NO: 55979 - DNA, 628 bp, Homo Sapiens
  misc_feature (47)..(47): n is a, c, g, or t
  misc_feature (579)..(579): n is a, c, g, or t
  misc_feature (613)..(613): n is a, c, g, or t
gacgaggttcagcaccagagcccgaagagcccgcagcagcgtctccntggagctgctccaccgaagcggaattctccatgcccgagcggtctgtggggaagacgacagcagtgaggcggactccccgagctcctctgaggaggaaccggaggtctgcgaggacctggcaggcaatgcagcctctccctgaagccccccagaaggccgatggggaaggagaaggagtgccataccttctcccaggcctctgccccaagagcaggaggtgcctgaaagctgggagcgtgggctcagcagggctggtcacctcccatcccgtaagaccaccttcccttcctcagcaggccaaacatggccagactcccttgctttttgctgtgtagttccctctgcctgggatgcccttccccctttctctgcctggcaacatcttacttgtcctttgaggccccaactcaagtgtcacctccttccccagctcccccaggcagaaatagttgtctgtgcttccttggttcatgcttctactgtgacacttatctcactgttttataattagtcgggcatgagtctgtttcncaagctagactgtgtctgaatcatgtctgtatcnccagtgcccggtgca

SEQ ID NO: 55980 - DNA, 905 bp, Homo Sapiens
  misc_feature (17)..(17): n is a, c, g, or t
  misc_feature (804)..(804): n is a, c, g, or t
  misc_feature (863)..(863): n is a, c, g, or t
aggtgtcagcactgggnaggtggcattggcggggtaccagggatggaagcccatggtggctataccttctgtggcctggccgcgctggtaatcctcaagagggaacgttccttgaacttgaagagcttattacaatgggtgacaagccggcagatgcgatttgaaggaggatttcagggccgctgcaacaagctggtggatggctgctactccttctggcaggcggggctcctgcccctgctccaccgcgcactgcacgcccaaggtgaccctgcccttagcatgagccactggatgttccatcagcaggccctgcaggagtacatcctgatgtgctgccagtgccctgcgggggggcttctggataaacctggcaagtcgcgtgatttctaccacacctgctactgcctgagcggcctgtccatagcccagcacttcggcagcggagccatgttgcatgatgtggtcctgggtgtgcccgaaaacgctctgcagcccactcacccagtgtacaacattggaccagacaaggtgatccaggccactacatactttctacagaagccagtcccaggttttgaggagcttaaggatgagacatcggcagagcctgcaaccgactagaggacctgggtcccggcagctctttgctcacccatctccccagtcagacaaggtttatacgtttcaatacatactgcattctgtgctacacaagccttagcctcagtggagctgtggttctcttggtactttcttgtcaaacaaaaccatggctctgggtttggagacacagtggctggntttaaaaattctttcccacctgtcaaacaaaaatctatcacccacgtggtgtgggtggntgacagggcatgccagaggaagcagtcctcctcacaggtttc

SEQ ID NO: 55981 - DNA, 800 bp, Homo Sapiens
  misc_feature (761)..(761): n is a, c, g, or t
  misc_feature (764)..(764): n is a, c, g, or t
gcctccctgtgcagcctgaggacagagatggagcgggtgcagcaggaacagagcaaggcccagctcccagacctcctctcagaacagagggccaaggtgctgcggctgcaggcagagctggagaccagtgagcaggtgcagagggatttcgtgcgactgtcccaggccctgcaggtgcgcctagagcggatccgccaggctgagaccctggagcaagtgcgcagcatcatggatgaggcgccactcacggacgtcagggacatcaaggacacctgaggggtcaggatatccccacccccaccctgggaaagacgcctttccccactcctgaaccatgaggcctcgctctggggtcttggatggcttttccaccgtccctgagactggggttgaggggactgacgggggccaccaccgccccgccctccagcgcctcctcccagggtggctgggcctcctgttctcagggatcacacctgggtgaggggcccaagcccctcccggaaccaaaggtgcaggctcaggcctgcggctttctggctgctgtgctgcctcctgggctccagccctcccctgcccccagcccgtcccctgcccagggcacagcggagcccatgggggctgggagtccccatcagaggcagtgagggtgggccccggccctgggacaggcagctgccttctggtctgcatgacactaagacgcttgtccacagcggcgacccaggcctccaagcttgcacagaggcaaggccagactnttncgtcgtttattttcaataataagcagctcagcgcag

SEQ ID NO: 55982 - DNA, 642 bp, Homo Sapiens
agggccacacggacggcgccagctgcattgatatttccgattacggcactcggctctggacagggggcctggacaacacggtgcgctgctgggacctgcgggagggccgccagctgcagcagcatgacttcagctcccagattttctccctgggccactgccctaaccaggactggctggcggtcggaatggagagtagcaacgtggagatcctgcacgtccgcaagccggagaaataccagctgcacctccacgagagctgcgtgctgtccctgaagtttgcctcctgcggacggtggtttgtgagcaccgggaaggacaacctgctcaacgcctggaggacgccgtacggggccagcattttccagtccaaggagtcgtcctcagtcctgagttgtgacatctccagaaataacaaatacatcgtgacaggctcgggggacaagaaggccaccgtgtatgaggtggtctactgagacatgaccccccttcctgtacccgaagtccagactcccaggggaatcagcagccaggacagacatcctagcagccgcctcccagccctgcctaggaaccgtacatcccatctgctctctggccaacggcttcacaccttcccctgctgcatgtgggggccgatgg

SEQ ID NO: 55983 - DNA, 357 bp, Homo Sapiens
ggaaggacccctcaccacccccactggcgagacagtttactttgccgacttgccatgtttttgccaaaaccaagattttgaaggaaatgagtggccagcgccagggcccaggccatgtggcctgcccagcctcaatgtcacttggtggcggggtggggtgggggtgggcagcagcatcccagccttgagatgcttcactttccttctctgtaaccagactttgaaaaattgttcgtttcatcaggctctgttcctcaatggccttttgctacgtgcctcccgagaaatttgtctttttgtataaatgacaaagtgttgaaaatgtatttcctgaaataaatgtttcaaatgcagaaa

SEQ ID NO: 55984 - DNA, 423 bp, Homo Sapiens
  misc_feature (380)..(380): n is a, c, g, or t
ggcagtcgggcccctggctgtgggctgcctcaccaagtgcagccacgccttccacctgctgtgcctcctggccatgtactgcaacggcaataagggccctgagcaccccaatcccggaaagccgttcactgccagagggtttccccgccagtgctaccttccagacaacgcccagggccgcaagcctccaggggcttccagaacccggagacactggctgacattccggcctccccacagctgctgaccgatggccactacatgacgctgcccgtgtctccggaccagctgccctgtgacgaccccatggcgggcagcggtggtgcccccgtgctgcgggtgggccatgaccacggctgccaccagcagcccttctgcancgcgcccctccctggccctggaccctatcgtacagaacctgct

SEQ ID NO: 55985 - DNA, 612 bp, Homo Sapiens
  misc_feature (589)..(589): n is a, c, g, or t
ctcttgggcatgggctgagggctggagcgagtccctcagaaattccaccaggctgtcagctgacctcttttgcctgctgctgtgaaggtatagcaccaccccaggtcctcctgcagtgcggcatccccttggcagctgccgtcagccaggccagccccagggagcttaaaacagacattccacagggcctgggcccctgggaggtgaggtgtggtgtgcggcttcacccagggcagaacaaggcagaatcgcaggaaacccgcttccccttcctgacagctcctgccaagccaaatgtgcttcctgcagctcacgcccaccagctactgaagggacccaaggcaccccctgaagccagcgatagagggtccctctctgctccccagcagctcctgcccccaaggcctgactgtatatactgtcaatgaaactttgtttgggtcaagcttccttctttctaccccccagactttggcctctgagtgaaatgtctctctttgccctgtggggcttctctccttgatgcttctttctttttttaaagacaacctgccattaccacatgactcaataaaccattgctcttcanaaaaaaaaaaaaaaaaaaacact

SEQ ID NO: 55986 - DNA, 485 bp, Homo Sapiens
  misc_feature (429)..(431): n is a, c, g, or t
ccacgcgtccgagaagggtcaacctattctctctcaaagccaacccctaggccaattgcctggatctcctcccctctcccttctttaaacgagcttgcctccctcctgccaagtttgagggcaaggctaagaaatgtcagccacggaaacaactctattatctggtgactttgggtaatgtgaatcagtgcctgaggacctttgctgtgtccttggtacagaaccatccacttgacctaactacctcccctggccgcgctctcgctcttctcttctttgttaagccaacaactatcaccctctcctactcttcttctccctgccccctggagggcactgtgtttggttgtgcaaatgtatttactatgcgtgtttccagcagttggcattaaagtgcctttttctaataaaatcagtttattatgacgnnnaaaaaaaaaaaaaaaaaaaaaaaaaaaaaaaaaaaaaaaaaaaaaaaaaaaaag

SEQ ID NO: 55987 - DNA, 761 bp, Homo Sapiens
aggagagggtaccctacactgatgacggctagaagccatcatcttcacggcccaggagacatgaggcaggcgctgaacaacctgcagtccaccttctcaggattggcttcattaacagtgagaacgtgttcaaggtctgtgacgagccccacccactgctggtaaaggagatgatccagcactgtgtgaatgccaacattgacgaagcctacaagattcttgctcacttgtggcatctgggctactcaccagaagatatcattggcaacatctttcgagtgtgtaaaactttccaaatggcagaatacctgaaactggagtttatcaaggaaattggatacactcacatgaaaatagcggaaggagtgaactctcttttgcagatggcaggcctcctggcaaggctgtgtcagaagacaatggccccggtggccagttagagcagagacttcactgactgacttacaggtgccctattctgaggtacaggagccgcggctttctgatgggggaaaatgccgccttaggctgagccaacatgactgtcctttaaactccagtggctggccaggcacggtagctcacgcctgtaatcccaacacttgggaggccgaggcaggtggatcacctgaggtcagaagttcaagacagcctggcaacatggggaaacctgtcttactaaaaatataaaaattagtggtgtgggggcgggcactgtatcccagtatcgggagggtgtgagaatcgtgaaccagagtgag

SEQ ID NO: 55988 - DNA, 545 bp, Homo Sapiens
gtccggtttgagatcccctacttcaccgtctctgggatccaggtccgatacatgaagatcattgagaaaagtggttaccaggccctgccctgggttcgctacatcacccagagtggcgattaccaacttcgtaccagctagaagggagaagagatgggggcttgaacacggggcttccttacagccccggatgcagattttagagggagggcaggtgcgggctgtgtgtgtctgtgtgagggcaggtcctggacttggcagtttcttgctcccagcacccgccccttcctcacctcttccttattccataggctgggagagaaactctctctgcttccctcgcccttggagctttccccatccccctgattttatatgaagaaatagaagaggggcttgaagtccccctcgcgagtgccttcttgcaattacctgccttagcgggtgttgcgggtccctccttcacagccgctgagcccagaggtcccgctggcccctcctctgaattttaggatgtcattaaaaagatgaatctaaaaaaaaaa

SEQ ID NO: 55989 - DNA, 423 bp, Homo Sapiens
tggctcatgggtggccacgtcacaacctctgatctcagaccgtgcatgccttgtcctcttaagacaactcctgtggcaccatttctccctccacagggccaaagccatagtgtccggtcccaaggacaaggctcttccagtgctaggagaggtatgagcagcctctcacctgtgagctgtggggatcacaaggctgcctgcctcagtcttggagtcctgttgggtgaatgaggcagatgggaaagagcctcaccagcagctgcttttggagcaggggtccaaggaagagagggtggcctcgacatcaaactgcctggatttttctaccaccctgttacatcataacaacttctgaaacacacaccagccctgagttctgggctcatttgaagcctggaatagcaataaatctttttaacttgc

SEQ ID NO: 55990 - DNA, 1017 bp, Homo Sapiens
  misc_feature (14)..(14): n is a, c, g, or t
  misc_feature (52)..(52): n is a, c, g, or t
cggctggtaccggncccgcgttttggatatcgtcgaaccaggccgtcgccgncaaccccccgtgtcacctcccttctgttatcgctgacagctttcttgcgtctcatttgtcgccgagccccgagcgcacggtgatgctcgggtctgcccccgaccccctgccacaggccggaagccgcatgggtggcaccgtggggaagctaacccggccccgttcccccaggagtcactgtgccagccccagcacatcctggaagaggagggggccccgggaaggggcctcccccacatcgctgctgtcgtccacgccctgctggaccggccttaggggtgaaggtgggggcacatgggcccaccccgcccgggaccccgggagcagaagacgcgcctgggctccgcgctctcagagaagcacttggtgagggtggcctgggcctgggcacccttggcctgccggcctggctgcctctggggtcgagggtctgggtggaaggaccgcgggtgtcgcaggtgtcgtgtcagccgcaataaacagaagccagaagccctctgggtggccctcaggtgtaactgtgtctgagagcacgtgcgtcgcggggatgcgggggggccctctgtttccggaatttcaccggccaagtcgccagggagccgcccgcgggcagcccggccggggggcacgcgccacggtggccgggagacgcacagggcgccagagtacgccgcgagggcctctggggtggcgtccgcaggagggcacgtcgcgcccgcgccgcagaagggaaggctgaagacggggcagggaccgagccgtcgggaggacccacggcagggtaccggtccctggcgacccgggaaaacgcggcaatggttgcccctggtccggcgaccagacgatgacgggcgcgagaccaggaggaagacgcccgagggaacaaggcacttccgacgtgcacaagaccagggcgcacccatggcaacccagaacggaacgcaccaaggaaatcggacacccaa

SEQ ID NO: 55991 - DNA, 341 bp, Homo Sapiens
  misc_feature (306)..(306): n is a, c, g, or t
  misc_feature (308)..(308): n is a, c, g, or t
gggcccctcccggaaccaaaggtgcaggctcaggcctgcggctttctggctgctgtgctgcctcctgggctccagccctcccctgcccccagcccgtcccctgcccagggcacagcggagccatgggggctgggagtccccatcagaggcagtgaggtgggccccggccctgggacaggcagctgccttctggtctgcatgacactaagacgcttgtccacagcggcgacccaggcctccaagcttgcacagaggcaaggccagacttttccgtcgtttattttcaataaataagcagctcagctnanaaaaaaaaaaaaaaaaaaaaaaaaaaacatgtc

SEQ ID NO: 55992 - DNA, 782 bp, Homo Sapiens
aaaggcagggccttgcgtaccggggtccggaattcccggggatcgcacctgcacctgcaccagcaagatgctatccatgcagcctctgcctcggtgcaccctctcattgaccccctggcctcagggtctcaccttacccggatcccctacccagctggaactctccctaaccccctgcttcctcaccctctgcacgagaacgaagttcttcgtcaccagctctttgctgccccttaccgggacctgccggcctccctttctgccccgatgtcagcagctcatcagctgcaggccatgcacgcacagtcagctgagctgcagcgcttggcgctggaacagcagcagtggctgcatgcccatcacccgctgcacagtgtgccgctgcctgcccaggaggactactacagtcacctgaagaaggaaagcgacaagccactgtagaacctgcgatcaagagagcaccatggctcctacattggaccttggagcacccccaccctccccccaccgtgcccttggcctgccacccagagccaagagggtgctgctcagttgcagggcctccgcagctggacagagagtgggggagggagggacagacagaaggccaaggcccgatgtggtgtgcagaggtggggaggtggcgaggatggggacagaaagcgcacagaatcttggaccaggtctctcttccttgtcccccctgcttttctcctcccccatgcccaacccctgtggccgccgcccctcccctgccccgttggtgtgattatttcatctgt

SEQ ID NO: 55993 - DNA, 519 bp, Homo Sapiens
tggcgctttagccaccaggccggtctcatcaggcacaagcggaagcactcgagggagaagccctacatgtgcaggcagtgtggactgggctttggcaataagtcagctctaatcacacacaagcgggctcactcggaagagaagccttgtgtgtgcagagagtgtggccaaggctttctccaaaagtcacacctcaccttacatcaaatgacacatacgggggagaagccatatgtgtgcaagacgtgtgggcggggcttcagcctcaagtctcacctcagcagacacaggaagaccacgtctgtccaccacagactgccagtgcagcccgaccctgagccgtgtgcagggcaaccttcggattccttatactctctctgaaggcaaagatgggaacaaggactaagagtcagaatgttgacactttgatgaaatggagtagagaaatgcattctgtaagtggtcaaaggacatttgactgtttactttctccacactaagtcttctccatgttttgtg

SEQ ID NO: 55994 - DNA, 349 bp, Homo Sapiens
cccacgcgtccgggctttcccctgcctcgcggccgggcgtcccgtgctttgggtttcttggtttgggttttttaatgccagttctcagtacataagtgcattttgaaagaggttccagctatcacttgtaaccatatatatatacatatatattctatctacaaagtgtttatttgcgagatgtttcaacggtgagttcgggccccgcccgccttgtgaccatctgtccccggtcctcgtccccgccccgcgccctggtcccgagtggcgtggggacgggccatcactgtatgtattaaaatgactgtatcaaataaatgtttattgatttttttccaaaaaaaaaaaa

SEQ ID NO: 55995 - DNA, 596 bp, Homo Sapiens
  misc_feature (554)..(554): n is a, c, g, or t
aggtggaaagcgagttcagaaggggtgaatgaagcatggagagcacactgtcaatggaggaggagagaatttcaacacagagaaggaatgttagcaaaatctcacggcggctgtttgaaagtatgcacaccttctcaagcaccattggtctttttaaaagaaaagccaaatacaaatggaaatgctctgggaggggagagataagaggtgtgcctcccctgctctgaagtcttgggtcttttgggtgcgaaggctggagtcaggtgtcctccggggactcaccacccgcccgagaggggagagacacatgcgattctggaagctgagagcattgcttattgttgattccttggttgccgtgctgagtcctgctttaaggaagcaggtcgcgtctccttcttcacctcggggtccgagaacctacaccgcgtggagaaggtccactggggcacccgttacgccattaccatcgccttcagctgcaaccccgagcatggcatcgaggacccagcgttcccgtagccagcagctgggccaaggtaacttcaggaggngccgtgtggaggcagccgcgccagtcgtgcacccaaccccaa

SEQ ID NO: 55996 - DNA, 464 bp, Homo Sapiens
cgttgtgccctctgagtgtctggctgatcacatcagagaggtctgcgtggcagtttggggctgtcacgtgaccagtgacccacactctctgctgcccagtactgccaagtggggagggtcctgcctttttctctgccccaggtctgggacgcaggtgatgccagccaggcccaggagtgcccagcatcccccaactgatgacacagtagcactgattctgtcttttcctcagaatctggcctttttccatggcaatgaggtggggcccagcctcctctaaagtgactttgtttctgcacagttgtaactgctcttggggatgtcagtgaggctgggagcagggagccacgggatgctgagagaggaggcccgagaggacaccccaccctccagcgtggcctttgatccagacttagggacgaggctgtcactggtgggcaccctctgttcctgtttgtgtgttt

SEQ ID NO: 55997 - DNA, 727 bp, Homo Sapiens
  misc_feature (707)..(707): n is a, c, g, or t
gcggccgctgctcatcggcgtggtggccatcctggtgttcctgaccaagtgcctcaagcattactgctcaccactcagctaccgccaggaggcctactgggcgcagtaccgcgccaatgaggaccagctgttccagcgcacggccgaggtgcactctcgggtgctcgctgccaacaatgtgcgccgcttctttggctttgtggcgctcaacaaggatgatgaggaactgattgccaacttcccagtggaaggcacgcagccacggccacagtggaatgccatcaccggcgtctacttgtaccgtgagaaccagggcctcccactctacagccgcctgcacaagtgggcccagggtctggcaggcaacggcgcggcccctgacaacgtggagatggccctgctcccctcctaaggaggtgcttcccatgctctttgtaaatggcactgcttggtcccaaactgaaccccactgcttgctcacatccatatcagaaggggatttttaaaaaactgttatcttcttggccaggggaaaggaccacaaggcaatctggggtgtggacagacccagtagacaatggaagccccagccagcagggccaggtgacagtgaagctcaccagtgggctcctttatggtactctatgcagttaacatgtatctagctgcatagggacacccagcgcagcagtgcaccactggggaangtggctccagcctcgtgccg

SEQ ID NO: 55998 - DNA, 612 bp, Homo Sapiens
gaagctgggaacgtgtgtccaggctctgggcacagtgctgccccttgcaagccataacgtgcccccagagtgtagggggccttgcggaagccatagggggctgcacgggatgcgtgggaggcagaaacctatctcagggagggaaggggatggaggccagagtctcccagtgggtgatgcttttgctgctgcttaatcctaccccctcttcaaagcagagtgggacttggagagcaaaggcccatgcccccttcgctcctcctctcatcatttgcattgggcattagtgtccccccttgaagcaataactccaagcagactccagcccctggacccctggggtggccagggcttccccatcagctcccaacgagcctcctcagggggtaggagagcactgcctctatgccctgcagagcaataacactatatttatttttgggtttggccagggaggcgcagggacatggggcaagccagggcccagagcccttggctgtacagagactctattttaatgtatatttgctgcaaagagaaacgcttttggttttaaacctttaatgagaaaaaaatatataataccgagctcaaaaaaaaaaaaaaaaaaaa

SEQ ID NO: 55999 - DNA, 584 bp, Homo Sapiens
ggggtgggcagggcgagagcttaggcttgaaggctgggaaagggacttggggaggagggtgaaggcagaatggagggtgcacgaggggtcccactgatcccttgcttttcctgtcagacacaagctcctgaaatggtgggctcagtcattcctcccaggggtcccgaatgttgttgctggcttccgtaacccagacggttttgtctcttccctcaagacctttcctaccatgaagatgtttgaatatgtcaggaatgaccgtgacggctggaatccctctgtgtgcatgaacttctgtgccgccttccttagctttgcccagagcacggttgtccaggatgaccccaggctcgttcatctcttctcttgggagcctggcggcccagtcaccgtgtctgtacaccaagatgcaccttacgccttcctgcccatatggtatgtggaagctatgactcaggacctcccatcaccccccaagactccctctcccaaatagtaatgctttagagggaggcagtcatatctctgtgtgcagataataaaagcatatttctaagaaaaaaaaaaaaaaaaaaaaaacgcgg

SEQ ID NO: 56000 - DNA, 382 bp, Homo Sapiens
cctccccctgcccccaccacggccactggccatctccacccccagctgcttgtgtccctcctgggatctgctcgtcatcatttttccttcccttctccatctctctggccctctacccctgatctgacatccccactcacgaatattatgcccagtttctgcctctgagggaaagcccagaaaaggacagaaacgaagtagaaaggggcccagtcctggcctggcttctcctttggaagtgaggcattgcacggggagacgtacgtatcagcggccccttgactctggggactccgggtttgagatggacacactggtgtggattaacctgccagggagacagagctcacaataaaaatggctcagatgccacttcaaaaaa

SEQ ID NO: 56001 - DNA, 1027 bp, Homo Sapiens
atcagcctttccccaccccacgasgccctcgactaccacttcggcctcgaggagggcgagggcatcagagacctcttcgactgtgactttggggacctcacccccctggatttctgacagggcttggagggaccagggtttccagagatgctcaccttgtctctgcagccctggagccccctgtccctggccgtcctcccagcctgtttggaaacatttaatttatacccctctcctctgtctccagaagcttctagctctggggtctggctaccgctaggaggctgagcaagccaggaagggaaggagtctgtgtggtgtgtatgtgcatgcagcctacacccacacgtgtgtcccgggggtgaatgtgtgtgagcatgtgtgtgtgcatgtaccggggaatgaaggtgaacatacacctctgtgtgtgcactgcagacacgccccagtgtgtccacatgtgtgtgcatgagtccatgtgtgcgcgtgggggggctctaactgcactttcggcccttttgctctgggggtcccacaaggcccagggcagtgcctgctcccagaatctggtgctctgaccaggccaggtggggaggctttggctggctgggcgtgtaggacggtgagagcacttctgtcttaaaggttttttctgattgaagctttaatggagcgttatttatttatcgaggcctctttggtgagcctggggaatcagcaaaggggaggaggggtgtggggttgataccccaactccctctacccttgagcaagggcaggggtccctgagctgttcttctgccccatactgaaggaactgaggcctgggtgatttatttattgggaaagtgagggaggggagacagactgactgacagccatgggtggtcaratggtggggtgggcctctccagggggcarttcagggcccmgctgcccccargattgatatgaratgggaragtgaktggggrcctyamtkatgtgggmagrrgggkgtgaagscyccccaaccaaacctktgtcc

SEQ ID NO: 56002 - DNA, 735 bp, Homo Sapiens
ttcacgcctggaaaacgctcttctgagaggatctgtggaggtcaacccaggagagagaagacaggactgaagcactgaaagggtcctgccgttaagggcgcaggattgtatagaatatataatagcagtagcagctctgtttacggagcattaaccttacgtggagttatttcctgcatttcctcctttcgtctttacaaggtagccgtttggcgtcgtgaggtatggatgttcccatccctaatttgcaaaataggtaactgaggctcaggagagctagactagtttgtgcacagccgagaagtggtcaagctagaatgggaccccaggtttgtgctccctactctccaccgataacctatcaaagggctttgcaagagcttttgactaatcgtctgtcaatggttcttcattcacgtattaattgcacatcagtatgtgccaaatctactagacattggagaaacagtaggaacaacacatggtaccggcacatggatctttcaggaaaacgaagtaggtaataaacaggaaaaagcccgagtctgatgctaagaagaacataaacaggatgctgagagattgggtctctccacattgccccggctgctctccaacccctgagttcaagtgattcacctcccttggcctcccaaagtactgggattacaggcgtgagccaccgtgcctggctgagaagatggatttaagacatattttggaggtaacattgtc

SEQ ID NO: 56003 - DNA, 518 bp, Homo Sapiens
gccatctctctggccaagaccactttcgacgaggccatggctgatctgcacaccctcagcgaggactcctacaaagacagcaccctcatcatgcagctgctgcgagacaacctgggcctggccctgaacttttccgtcttccactacgagagggactggcagagctgaggccacctggggctggggatcccactcttcttgcagctgttgagcgcacctaaccactggtcatgcccccacccctgctctccgcacccgcttcctcccgaccccaggaccaggctacttctcccctcctcttgcctccctcctgcccctgctgcctctgatcgtaggaattgaggagtgtcccgccttgtggctgagaactggacagtggcaggggctggagatgggtgtgtgtgtgtgtgtgtgtgtgtgtgtgtgtgtgcgcgcgcgccagtgcaagaccgagattgagggaaagcatgtctgctgggtgtgaccatgtttcctctcaataaagttcccctgtgaca

SEQ ID NO: 56004 - DNA, 718 bp, Homo Sapiens
attaattcaagacaagagactgcagagaactaaaattgcttagtactgaaacttttgcttatataaactgtagtttatggagaaaataaagaatttttttgtttttttttgaggcaggatctcactctattccccaggctagagtgcgatggcaccatctcggctgactgcaacctccattttccaggaaggctctttaattccccctgattacaaaggttttgtgtgaacataatttggtgtaataaaaaaaaatttacaccacaagagacaaacatactcttcagtgtgtgtggtcataatttgtttgaacgagcccttttaaacttctagatatcattgaaactcctatgttgattaaaaatcatcaaagatctttccagtgagaaggatgaaaatattactgagaatgaagtatcactatttcatgtatgtgcctgtatgtgcttatataacatgctgtaatacaaggtgacatttaggggctgagactgttaacatctgactgtaccttgctatttgtaacttacaatcttattcacatttctcaagtgccatgcctttaggtgcctatacatcatgctatcataggatttctagggataagccgagtgcggtggcagatgcctgcaatcccagcactttaggaggccgaggggggtggatcatgaggtcaggagttcgagacagcctcgccaacgcagtgaaagcccatctc

SEQ ID NO: 56005 - DNA, 901 bp, Homo Sapiens
  misc_feature (740)..(740): n is a, c, g, or t
  misc_feature (743)..(743): n is a, c, g, or t
  misc_feature (746)..(746): n is a, c, g, or t
  misc_feature (877)..(877): n is a, c, g, or t
cagctggtgaagctctactacccgccccgtccggaggacctgcggcggagtgtcaagcacgactccatcccggccgcggacaccttcgaagacctcagtgacgtggaggggggcggctcggagcccactcagagggacgcgggcagccgcgatgagaaggccgaggcgggagaggcgggacaggccacggcagaggctgagtgtcacaggactcgggagaccctgcctccgttcccgacacgcctcctggagctgattgagggctttatgctatccaagggcctgctcaccgcttgcaaactgaaggtgttcgatttgttaaaagatgaagcaccccagaaggctgcggatattgccagcaaagtggacgcctctgcgtgtggaatggagaggcttctggacatctgtgctgccatggggctcctggagaagacagagcaaggttacagtaacacagagacagcgaacgtctacctggcatcggatggcgaatactctctgcacggcttcatcatgcacaataatgacctcacatggaacctctttacatacctggagtttgccatccgagagggaacaaaccagcaccacagggcgttggggaagaaggcggaagatctgttccaggatgcgtactaccagagcccggagacgcggctgaggttcatgcgggccatgcacggcatgacgaagctgactgcgtgccaggtggccacggccttcaatctgtcccgcttctnctncgnctgcgacgtgggaggctgcacgggtgcactggcccgagagctggcccgtgagtaccctcgtatgcaggtgactgtgtttgacctcccagacattatcgagctggccggccactttcaaacccccggaccgnaggcagtgcagatccacttcggag

SEQ ID NO: 56006 - DNA, 450 bp, Homo Sapiens
ccttgcagcaggaaggtctcctctcccgttacaagcagcagcgactgttgacagttcttccttccctactggataagaagaaatctgtggtgtccagccccaggcctccagagtgttcagcatctgcacctgtagcagcagcagtgcccaccagggagtccataaaagggtccctctctgtcctgctcgatgacctgcaggacctgagtgaagccatttccaaagaggaagctgtttgtcaaggagacaaccttgacagatgctccagctccaatccccagatgagcagctaagcagctgacagttggagggaaagccagcctgggggctgggaggatcctggagaagtgggtggggacagaccagcccttccccatcctggggttgccctgggggataccagctgagtctgaattctgctctaaataaagacgactacagaaggaaaaa

SEQ ID NO: 56007 - DNA, 841 bp, Homo Sapiens
ctggagtgtgggccctcccctgaagcctctgatgtttgagaaggatgatgacagcaacttccatgtggactttgtggtagcggcagctagcctgagatgtcagaactacgggattccaccggtcaaccgtgcccagagcaagcgaattgtgggccagattatcccagccattgccaccactacagcagctgtggcaggcctgttgggcctggagctgtataaggtggtgagtgggccacggcctcgtagtgcctttcgccacagctacctacatctggctgaaaactacctcatccgctatatgccttttgccccagccatccagacgttccatcacctgaagtggacctcttgggaccgtctgaaggtaccagctgggcagcctgagaggaccctggagtcgctgctggctcatcttcaggagcagcacgggttgagggtgaggatcctgctgcacggctcagccctgctctatgcggccggatggtcacctgaaaagcaggcccagcacctgcccctcagggtgacagaactggttcagcagctgacaggccaggcacctgctcctgggcagcgggtgttggtgctagagctgagctgtgagggtgacgacgaggacactgccttcccacctctgcactatgagctgtgacaaggcagccaccctgtcacctagctccatggagccccggatcccaagcccctgcattgtaagccccacagtaggcacctccataaatgccttgtttaaacggaagaaaatcccatctaccaacctaccttcacttattccattcttaactaaatataaaggggggggccgcctcctaaaaataatccc

SEQ ID NO: 56008 - DNA, 537 bp, Homo Sapiens
ctcaaacaggtacagatggtagttgtgacgtgggtgtaggcagtaagttttcaaattgggaagttgggcagctttatgatctggaacctggctgtccatctctcacacaactcctctctgggcctccagagtccctttactctcccagctttcctccggccccggggtgctgtttcccagcctttccacatgggctttcccaggtagtccttagggtgtcggctcctcctctctctcctcatcacagttcccagcccccaccttcaacggaactcaacaaaatcttcaacttcatacagtagtcacatggttagtaataacagtggcatttttatttggataaaatagaccgtttaaatttgagagatcctaccttatatggtgtgaattatatcctaaagcaaataagtagggatgtaatgtcatgggggaccaagatttgtagggtaaatgacacccgatcccaaatataaactcaagtaaacaccctgtagtctttcacatgaatgggaaatatcagaataaagtcatgatttt

SEQ ID NO: 56009 - DNA, 728 bp, Homo Sapiens
acccaggtgccatttccagtctgacttccagaaatgtgcaccatgtcctagagcacagacccattggctggagcctcctgggagggttcaaaccatcagctctatgagaaatgcccagaaaggctttgccgactccatccgtctgtggaggctgcctgcctccggggtgggatgggtggtttctcctccaattcagacccaagaggtagcccccgagggcatgtacctggtgggaagcagctcaggtacccttgggggttgcagggcccttacgcaggtatttctctctctctcctctctggggtgcgtgtgtgcgtgcgcgtgtgcgtgcctatgcttttctctgtgggcacatcaggatgcccctcggagagcatgtgcacgtgtccccacctgagcgagcgtgtgtgtgtgctcctctgcgtcccaggtttggacgtctagggtttggtgtgcctgtcttctgccctccctgagcccacagggtcagtcaatgtatcttctacgtgcctctccctctgccttctctcacagtgcccccggctccagagctcaggggtaggggttctcctgagggtgcaggggatccttctcatctcctggaccctccagggcactctggtccctattccccagctcctaggcagctgagccgggtcccttaagggaggtgaccaggagctttggtgcagggagctcttggtggggcaaagggctggacccctgcc

SEQ ID NO: 56010 - DNA, 413 bp, Homo Sapiens
caatgccaccattgttgatgtgactccagagccagttattaggaagagcaagctcaccacagaggagtggaactgaggccccccagatgttgcctccggtgtccaagccacagcggtctggctgttgggaagatggccaggaatggactcataccattggcacattaggctaatcctggttttatgtgaagtcagcaattaagtgttcccactagaactgacctaagccactgattaatatttaatgagggaaggtaggggagaatctagccattttataatgccagaaatctatatatgttatctgatgccatttttctgaagtagcctcacatgtggtccccctgcagttcagcagttaacagatgacttttttagtgtaataaaatgtttatcatctatgaaaaaaaaaa

SEQ ID NO: 56011 - DNA, 376 bp, Homo Sapiens
tggacttcgcgcacacagctccacaggttgggaaccgtcgtgggacctgggtccccaccgtgaggaccccgtgggcgacagcaggtgtggccagggtggggctccgagccccgggtcaccgcccgcccagcgttccaggcacatgaagagaaagcattccaaagcctctgattgttgtttcctttttctcctcccgaaggaacagctgattcatgctcctcccgcaattgtcacgtctgtgatttatttggtgtttcgggcgtggcctctggagccccggcacgtggtgggccacgctgctggcgctcatgggccctggtgtttgcaccgcactttgtaatcagtcccgtggttgtctgtacagaattaaactatt

SEQ ID NO: 56012 - DNA, 191 bp, Homo Sapiens
cgcgtccgccgccttgtggctgagaactggacagtggcaggggctggagatgggtgtgtgtgtgtgtgtgtgtgtgtgtgtgtgtgtgtgcgcgcgcgccagtgcaagaccgagattgagggaaagcatgtctgctgggtgtgaccatgtttcctctcaataaagttcccctgtgacactcaaaaaaaaaa

SEQ ID NO: 56013 - DNA, 857 bp, Homo Sapiens
  misc_feature (54)..(54): n is a, c, g, or t
  misc_feature (475)..(475): n is a, c, g, or t
  misc_feature (617)..(617): n is a, c, g, or t
  misc_feature (620)..(620): n is a, c, g, or t
  misc_feature (623)..(623): n is a, c, g, or t
  misc_feature (627)..(627): n is a, c, g, or t
  misc_feature (632)..(632): n is a, c, g, or t
  misc_feature (661)..(661): n is a, c, g, or t
  misc_feature (671)..(671): n is a, c, g, or t
  misc_feature (673)..(673): n is a, c, g, or t
  misc_feature (680)..(680): n is a, c, g, or t
  misc_feature (682)..(682): n is a, c, g, or t
  misc_feature (685)..(685): n is a, c, g, or t
  misc_feature (687)..(687): n is a, c, g, or t
  misc_feature (692)..(693): n is a, c, g, or t
  misc_feature (706)..(706): n is a, c, g, or t
tggagatcctggagggccgcaccgagtgtgtgctgagcaacctgcggggccggncgcgctacaccttcgccgtccgcgcgcgtatggctgagccgagcttcggcggcttctggagcscctggtcggagcctgtgtcgctgctgacgcctagcggtgaggccccaggcgggggtgtaggaggagccagggcgaatcacggggcaagcccaccgccctgacctcctccccgcctcttagacctggaccccctcatcctgacgctctccctcatcctcgtggtcatcctggtgctgctgaccgtgctcgcgctgctctcccaccgccgggctctgaagcagaagatctggcctggcatcccgagcccagagagcgagtttgaaggcctcttcaccacccacaagggtaacttccaggtaggtggcctggttgtcccctcagtgcctgggcttccctgcttcttgcagccaaactgcangcctctctgagcaggttggtgctatttcttcagctgtggctgtaccagaatgatggctgcctgtgggtggagcccctgcacccccttcacggaggacccacctgcttccctggaagtcctctcagagcgctgctgggggacnatncangcantgganccgggggacagatgatgagggcccccctnctggagccantnggcagtnancantncccanngatacctattctngtgctggacaaatgggttgctgcccccggaacccgcccawgtgarggmctcccaagggcmtgggtggcagtgtggacatagtggcratggatgaaggctcagaagcatcctcctgctcatctgctttggctcgaagccmrcccagagggag

SEQ ID NO: 56014 - DNA, 633 bp, Homo Sapiens
gactcatccatttgtgaggaggacttctcgccctctggctggaagctgatacctgaagcactcccaggctcatcctgggagctttcctcagcaccttcaccttccctcccagtgtagcctcctgtcagtgggggctggacccttctaattcagaggtctcatgcctgcccttgcccagatgcccagggtcgtgcactctctgggataccagttcagtctccacatttctggttttctgtccccatagtacagttcttcagtggacatgaccccacccagccccctgcagccctgctgcaccatctcaccagacacaaggggaagaagcagacatcaggtgctgcactcacttctgccccctggggagttggggaaaggaacgaaccctggctggaggggataggagggcttttaatttatttctttttctgttgaggcttccccctctctgagccagttttcatttcttcctggtggcattagccactccctgcctctcactccagacctgttcccacaactggggaggtaggctgggagcaaaaggagagggtgggacccagttttgcgtggttggtttttattaattatctggataacagcaaaaaaactgaaaataaagagagagagaga

SEQ ID NO: 56015 - DNA, 500 bp, Homo Sapiens
cagaagctatagccctctccccaacaggtctctcttgttggccagagggcctgcttcccatgggcattgcaagtgccaccgtgcggggcctggctctgcacacccaggaaaagtctgcagacccccagccctccgcaataattcaccagaccagaagccactggtgtacagagaacacttaaaaaaatgtattttatgtgaaaaaaaattaaaactctgtatactgtatcagcagctttgtgtaaaaatggcaatcaagagagtctaatatatttaaaacttttttaaaaaaaatcttcgcagatctttgatatcgtactgaggtaacttccacgtagccccttgccacgcggcaccggtgggccttgggtccaaaactgtggctcagccacatcccaaagggggcacatgtccctggagttgcttccagctgccaaggcctgtgacagaattcgctgttaagagtttttaattaaaattattaaattccttttaataac

SEQ ID NO: 56016 - DNA, 801 bp, Homo Sapiens
  misc_feature (697)..(697): n is a, c, g, or t
aagatccccatccgctggactgccccagaggccatagcctatcggaagttcacttctgctagtgatgtctggagctacggaattgtcatgtgggaggtcatgagctatggagagcgaccctactgggacatgagcaaccaggatgtcatcaatgccgtggagcaggattaccggctgccaccacccatggactgtcccacagcactgcaccagctcatgctggactgctgggtgcgggaccggaacctcaggcccaaattctcccagattgtcaataccctggacaagctcatccgcaatgctgccagcctcaaggtcattgccagcgctcagtctggcatgtcacagcccctcctggaccgcacggtcccagattacacaaccttcacgacagttggtgattggctggatgccatcaagatggggcggtacaaggagagcttcgtcagtgcggggtttgcatcttttgacctggtggcccagatgacggcagaagacctgctccgtattggggtcaccctggccggccaccagaagaagatcctgagcagtatccaggacatgcggctgcagatgaaccagacgctgcctgtgcaggtctgacaccggctcccacggggaccctgaggaccgtgcagggatgccaagcagccggctggactttcggactcttggacttttggatgcctggccttangctgtggcccagaagctggaagtttgggaaaggcccaagctgggacttctccaggcctgtgttccctccccaggaagtgcgcccccaaacctcttcatattgac

SEQ ID NO: 56017 - DNA, 647 bp, Homo Sapiens
ccggatgcgggcctgtctgacgacgaggagcctcccgatgccagcctgcctcctgacccgccaccccttactgtgccccagacgcacaatgcccgtgaccagtggctgcaggatgccttccacatcagcctctgaagggctggggggcagggggcatgcaccctgcgccttcccccctaccgcctcacctcacaggagggccaggcatgtattcctcagaggcgaaactgccaaactctttctcctgtcttgggttggctggcactggggcgggcatctagggtacagcctctgctcatggcactgggcctccagttcttccacatgtgtgcacccccagcttggccaaccctcagccttgcggtggggcccgaagcatcttcccttccgcttggcgtctctgggattgggatgagtgcctggctcccatctcctcctcaccttttgttgctatcggcagctgctggctcaggggcatcccacctccgggctctgggttcctctgccctggaagggctccaggacccgtcccaataaccacccacggccaggagggccaaggccccgtgctggatatttaaatttaggggccggtctccagggcgcgtagataaataaatacactcagcgtcgttgtaaaaaaaaaa

SEQ ID NO: 56018 - DNA, 584 bp, Homo Sapiens
  misc_feature (452)..(452): n is a, c, g, or t
  misc_feature (502)..(502): n is a, c, g, or t
  misc_feature (549)..(549): n is a, c, g, or t
  misc_feature (560)..(560): n is a, c, g, or t
ggaaagaggggctccccgacctgcccatcccccaggctcttctgggccttccccttgggaactggcctcatcacactgggagttggtgcttcttgtctctgggtctccagagtttgccccgcctgtgcacacctcacattccagactctagccatctcggcaggatctcctggctccttgagtgcccaggtgccaccaagaggaagggccttgtgggatacaccttgcagaatagggatcggtgtgccccgctgcgaggggccccccatgggggctgtggcccctccgcaggcaggacatcccaacccctggctgggactgaaccacccagagcggagcggctcccttttcagccttgtgagtcacctggcaggccccagctgggctggctgtccgtgtccctcagcctggctggtgattccttgcaggccagaaatgaagagtccctgtangttttggttttgtttgttttattttgttctttcaccttttttcctcattnaaaaaaaaaagtcccctgtggagtgtacttatttattttttgattanagggaagtaanatgcaaaaaaaaaaaaaaaaaaac

SEQ ID NO: 56019 - DNA, 749 bp, Homo Sapiens
cagagcttcagccgattcacacgggtcccctcgggtggctattcttccatcaacaatgtccaggatcctcagaagcccgagcctagggacaagatggagagcttcttcctgggggagacgctcaagtatctgttcttgctcttctccgatgacccaaacctgctcagcctggacgcctacgtgttcaacaccgaagcccaccctctgcctatctggacccctgcctagggtggatggctgctggtgtggggacttcgggtgggcagaggcaccttgctgggtctgtggcattttccaagggcccacgtagcaccggcaaccgccaagtggcccaggctctgaactggctctgggctcctcctcgtctctgctttaatcaggacaccgtgaggacaagtgaggccgtcagtcttggtgtgatgcggggtgggctgggccgctggagcctccgcctgcttcctccagaagacacgaatcatgactcacgattgctgaagcctgagcaggtctctgtgggccgaccagaggggggcttcgaggtggtccctggtactggggtgaccgagtggacagcccagggtgcagctctgcccgggctcgtgaagcctcagatgtccccaatccaagggtctggaggggctgccgtgactccagaggcctgaggctccagggctggctctggtgtttacaagctggactcagggatcctcctggccgccccgcagggctttgggagggctggacggcaa

SEQ ID NO: 56020 - DNA, 602 bp, Homo Sapiens
ctccctgcaagcgctcagtctcatcccagcaagtcaaagacctcctggccaagtcctgccctcttaagtctccaggaacgctgcagggaaaacccagctgaggcctgggcctagactgtggtgaggtcactagattctactgctcttcccccacattaataccttttccttcctcagagagaaatctcccctaacctgaattgcagccccctccagtttgctttcctttggccttccagaccccaggaagttggccttcccttcctagtgctatggtttctgccattggccatgatttcagggagctggctgaggccggctgaggccacacctgtgccagtggggcttccctggtgctgcagcacttgtaaaccacacacacagcctctctccctggacatacgttagcacattggcattcagtattggtggcctggcatggtaggtactacccaatgaagagtgtactatatattttcattactataggccatacttatacagacgtgtatatatatttatataagatctacctatcttaggatggaaccttggggaaaaataaaattgaggggaagtaaaaagtatgtaacacttccagt

SEQ ID NO: 56021 - DNA, 584 bp, Homo Sapiens
cgcgtccggtagtcccagctactcaggaggctcagcagcaggacgacttgagcccaagagttccagaccagcctggccaccttagtgagatcccttctcttaaaaataataacttattgccagatttggggcatttggaaagaagttcattgaagataaagcaaaagtaaaaaaaaaaaaaaaaaaacaaggggaaagggttggttaggcaatcattctagggcagaaagaagtacaggataggaagagcataatacactgtttttctcaacaaggagcagtatgtacacagtcataatgatgtgactgcttagcccctaaatatggtaactactctgggacaatatgggaggaaaagtgaagattgtgatggtgtaagagctaaatcctcatctgtcatatccagaaatcactatataatatataataatgaaatgactaagttatgtgaggaaaaaaacagaagacattgctaaaagagttaaaagtcattgctctggagaattaggagggatggggcaggggactgttaggatgcattataaactgaaaagcctttttaaaattttatgtattaatatatg

SEQ ID NO: 56022 - DNA, 522 bp, Homo Sapiens
acgtggtgagctaagatatgttgttctctccctgcggcccagatgtgccggtgacttcagcgccagtcaccgcgttctaccgcggctgcatgacactggaggtcaaccggaggctgctggacctggacgaggcggcgtacaagcacagcgacatcacggcccactcctgcccccccgtggagcccgccgcagcctaggcccccacgggacgcggcaggcttctcagtctctgtccgagacagccgggaggagcctgggggctcctcaccacgtggggccatgctgagagctgggctttcctctgtgaccatcccggcctgtaacatatctgtaaatagtgagatggacttggggcctctgacgccgcgcactcagccgtgggcccgggcgcggggaggccggcgcagcgcagagcgggctcgaagaaaataattctctattatttttattaccaagcgcttctttctgactctaaaatatggaaaataaaatatttacagaaaaaaaaaaaaaaaaaaaaag

SEQ ID NO: 56023 - DNA, 619 bp, Homo Sapiens
  misc_feature (590)..(590): n is a, c, g, or t
ggagcggccgcacctattttttttttttttttttttgcccaagttaaaatcctgtgactgtgtactggatctggcctgcggttgtcatatttattgatctgagtccaggcagtgtttttaagtgatatgagttagtagtgaaaattgaaaaggatattttacaaccaaatacaggttttctggtgtcttttgaaaaatccaaagatttggcaactcgacctaggctccgacaaaaccacagttgttgggagctgagccggagccagaactcacaattcaccgtggcccggccacccatccccaccactcccgtgggctcctgaccaagcaccacgtgccattcatcatggcttgcttttagtgtttttggtgtttatcttaaagtacagcgaagaagaaagggaagtatttcttagacccatgtctctgtccaaataggcctttccatctggcatttcccgctcatttatatgacttgctgagttcctatggtcatttgagtttgcaaacagtggtctgtagcactcaggttttctggagttggagagaaagggtggcaagagagaagtaaaagttggttttatttttanaaaaaaaaaaaaaaaaaaaaataggtgcg

SEQ ID NO: 56024 - DNA, 745 bp, Homo Sapiens
ggggcatttctgggcagattgtgaattggaggaatctctttaactgaagtactctggctggaccctgcccttgtgtgaccatgtctcctattgcaccagcatttgaattccatggctcaagagggttctggtaccatttattcacagactgtatcctcgagagagctgctatatatgggagtgtaccagccaactccttttccagtgtctgtaagtcacctcattaaagtataattagctgtctcctctgggagatcctaccccatcagacaagggcagtgagcccaagcagtgccagaggccctcagaaagggattagggtagatgattgcaactgaaacacaatcttctttctttgccagggtatcttgggggttttgccccaaaatataccctgggcatagcattactgcagtcttggatgtctaccccaaacttccacaccatccttcgacccacagctgcacctttatttatttatttggctctgttgcccaggctggagtgcaatggcgtgatctcggctcactgcaacctctgcctcccgggttcgggtgatcctcctgccttagcctcccaagtagctgggattacaggcacctgcccacaagcctggctagtttacgtattctagtagagacgatgtttcaccatgttgaccaggctgggtctcgaactcttgacctcaggtgatccgatcgcttcggccctccaaggtgctggcattataggcgtgagccactgt

SEQ ID NO: 56025 - DNA, 439 bp, Homo Sapiens
gccctcctggccctgctgcccagtgagggctcctacgggtgggttcattggcctgggcccagcaagcccccacctgcattgaccttaggcccatagagagggcctgtcccggtgctgccccagccaggatctggtcgctgccccagggggactgatgggcagagtcgcccctgtggctggactgtgaccatccctgatggggcctgaccgcgggagctgaggaagcgccgctccaccgtctgccctccaaggacccgcatggaggcagtgggctggcagcttcctgctgctccctgtcagagtcaaagcacaaatcctcaggacgggctcaagggccagggcagccgagggaagctccaggtggggaccacgtcttcctgaggttggtgcccactggctgggaccctttgcagtggggtggcctcccctctgtctgcct

SEQ ID NO: 56026 - DNA, 281 bp, Homo Sapiens
tccacatcgattcacccgacaaagtctgaagttccagggcaatttatctggaaaagctcacctggaatcatgtgtcatttcaaccaacaactgtcgaagaggacgtggcatcaaaaccaaggttatcaattatttataagggttgtgtggtggttggtccaagcatctctccttcatgccatcactcctttcaagagctgcctctattttctaatttagcacaggaatttagatgcccctaaataagtaggcatccagtatctgcccacaccagttttagt

SEQ ID NO: 56027 - DNA, 768 bp, Homo Sapiens
  misc_feature (753)..(753): n is a, c, g, or t
gtgctctggagggcaaataaaaaagcagcagtcagtcagtagtcagtgatggagagaacaagaggagagatgcctggcctctgcccaagaaattagctttgatggaagcctgagcaagtcacctggttattgtaacgtggagatctttgtaggtttagacatggctccctgtctccagtaaacatccagccattcagacaaagggggcctggagatacagagagcccaaataatgcctgctggattgtctcctgatgagtacatgtggactcacctgaggaagggaaggaagggaataatcttttatgtttcatttaccttatgaaaagtgttaaaacattgccaactcaaaataacattatttaatgcatgtgcaaagttaggtcttcccagttgtctcagtgctgaggaacctcatcagagaagcatggaagatgccaaaggatttttggaaggtaaagaaggctgaatagtgaccacatgggcctgttttcagggtcccagcttagttaagtcacccatgcacctggtcattgtgtctcccatgcacatccagcgtttctcagaagcagacccacccttaagttgacaggattgatggaacatgctctcctgctcaaggcacaacctctgggctggagtagaggactctggtgggaaggttttgctgctaatgtatttatggaatgaatgtatttcattcaaatctgtattcctctaggaaggattaaaattaaactttttttaaataanaaaaaaaaaaaaaaa

SEQ ID NO: 56028 - DNA, 628 bp, Homo Sapiens
  misc_feature (525)..(525): n is a, c, g, or t
  misc_feature (531)..(531): n is a, c, g, or t
caaactgtataaggaaatagtgactgattgttcaggtttgacattttcattgctacctgcctgcagaattaatgccctcttccttgtctaagatattactgtgttaagtgtcctgttaattataaatagttcaaaatggacagactgtcaacttgaaatttacctatgtaaaaagcttaggtgattcttagggtttccatgttcataactttacaaagctttataaagataaaattgcaacttaatagagctaattaacttgtatttgtataaaaagaaaaaagaattgcagctcgatattgtgaagtttttcaataacttcattaaaccatatttatgatgggagggaccagacattctatagtaataatgtatagtgctgtgtataattccatggtttcttcaacatcttatcaaccaagtaaaattaatacaagatacgcaaaagatagtaaaataagaatctaattataggtgcaaggggactcaggcttatgctggaagaatctgacaagtggtatagtntgtttntctaggaagaattactgatgagtcacataacttgcatgtaatattaggttctcattttttagcttcgaaactgtgtccatgcaaagactctataact

SEQ ID NO: 56029 - DNA, 663 bp, Homo Sapiens
acgcgtgggcagcaataggaaagccagggccagagcgagccatgccagccctactgccgatgccaaatatttgagagaagggaacttttgctgaggttttctctgaggtttttttgatgctttataggaaactattttttaaaaaaagccatttcccacccaaggacacagtggatgtgttttccctgactccagcagggcaaggaatgtagccgagaggttgtgtgggctgggctctggtgccctcttccctggccaggacacctctcctcctgattcccttggcaccttgtctttctgtctgtttacctgtctccctgcctgcccatctgcatcttttgcagcccactctgacttccatctgggggctgagaccacccttgcctgcccccttctttctgccttaagaatgtccttttaggctgggcatggtggctcacgcctgtaaccccagcactttgggaggcggagacgggcagataacctgaggtcaggatttcgagaccaacctgacctacatggagaaactccgcctctagtaaaaatacaaaattagccgggcatggtggtgcacgcctctaatcccagctactcgggaggctgaggcaggagaatcacttgaacccgggaagtggaggttgcagtgagccaagagtacaccac

SEQ ID NO: 56030 - DNA, 631 bp, Homo Sapiens
cggaattcccgggatcgcgagcggccccttcctagaagcccctgtcgcccacccagctggtcctgtggatgggatcctctccaccctcctctagccatcccttggggaagggtggggagaaatataggatagacactggacatggcccattggagcacctgggccccactggacaacactgattcctggagaggtggctgcgcccccagcttctctctccctgtcacacactggaccccactggctgagaatctgggggtgaggaggacaagaaggagaggaaaatgtttccttgtgcctgctcctgtacttgtcctcagcttgggcttcttcctcctccatcacctgaaacactggacctgggggtagccccgccccagccctcagtcacccccacttcccacttgcagtcttgtagctagaacttctctaagcctatacgtttctgtggagtaaatattgggattggggggaaagagggagcaacggcccatagccttgggggtggacatctctagtgtagctgccacattgatttttctataatcacttggggtttgtacatttttggggggagagacacagatttttacactaatatatggacctagcttgaggcaattttaatccc

SEQ ID NO: 56031 - DNA, 668 bp, Homo Sapiens
cgcccttctctcccaccccttccttctgagccgggccctggggattggggagcctctgttcctgatgagggtcagctgagggggctgagcatccatcactcctgtgcctgctggggtggctgtggggcgtggcaggaggggcctaggtgggttgggcctgagaaccaggcacgggtgtggtgtctgctgggctggagataagactggggagagacaccccaacctcccagggtgggagctgggccgggctgggatgtcatctcctgccgggcgggggagggctctgcccctggaagagtcccctgtggggaccaaaataagttccctaacatctccagctcctggctctggtttggagcaaggggaagggttgccagagtcctgggggccccagaggagcaggagtctgggagggcccagagttcaccctctagtggatccaggaggagcagcacccgagccctggagtggcccagtacccttccaagaggccacagtcccagccaggacaaagtatgcggcccatcctggtgcgacagcgtgggacaatgtgaacatggactcgaagacatggccctttctctgtagttgattttttaaatgtgccattatgtttttaaaaaaaaaggaaaaaagaaaagcaaacaaaataaaacacctttaagagg

SEQ ID NO: 56032 - DNA, 621 bp, Homo Sapiens
  misc_feature (22)..(22): n is a, c, g, or t
  misc_feature (577)..(577): n is a, c, g, or t
  misc_feature (580)..(580): n is a, c, g, or t
  misc_feature (582)..(582): n is a, c, g, or t
  misc_feature (584)..(585): n is a, c, g, or t
  misc_feature (587)..(616): n is a, c, g, or t
ctcggtccacccataccgctgnagtgataactccgggggtcggacgggacctgggctctctccacgatctggctgtttgcccaggaacttagggtgggtacctctgagtcccagggacctgggcaggcccaagcccaccacgagcatcatccagtcctcagccctaatctgcccttaggagtccaggctgcaccctggagatcccagacctagccccctagtgggacaaggacctgaccctcctgcccgcatacacaacccatttcccctggtgagccacttggcagcatatgtaggtaccagctcaaccccacgcaagttcctgagctgaacatggagcaaggggagggtgacttctctccacatagggagggcttagagctcacagccttgggaagtgagactagaagaggggagcagaaagggaccttgagtagacaaaggccacacacatcattgtcattactgttttaattgtctggcttctctctggactgggagctcagtgaggattctgaccagtgacttacacaaaaggcgctctatacatattataatatattcgcttactaaatgnaananannannnnnnnnnnnnnnnnnnnnnnnnnnnnnnaaggg

SEQ ID NO: 56033 - DNA, 586 bp, Homo Sapiens
gtagattccgggcggtcggagccgccgggagctgtagttctcccgcggctcagagaagtaggcagagagcggacctggcggccgggcagcatggcggggccggcgctcttgtcggaccagggctaccgggtggacgggcggcgcgccggggagctgcgcaagatccaggcgcggatgggcgtgttcgcgcaggctgacggctcggcctacattgagcagggcaacaccaaggcactggctgtggtctacggcccgcacgagatccggggctcccgggctcgagccctgccggacagggccctagtgaactgtcaatatagttcagcgaccttcagcacaggtgagcgcaagcgacggccacatggggaccgtaagtcctgtgagatgggcctgcagctccgccagactttcgaagcagccatcctcacacagctgcacccacgctcccagattgatatctatgtgcaggtgctacaggcagatggtgggacctatgcagcttgtgtgaatgcagccacgctggcagtgctggatgccgggatacccatgagagactttgtgtgtgcgtgctcagctggcttcgtgg

SEQ ID NO: 56034 - DNA, 472 bp, Homo Sapiens
ctggggtgtgaatgccagcctgtgagtcccggaactatgtgggtacccctacccctcacagaagccaagggcatggaggaggtccctccacagtgacaacggtgtggggtaggggaggtgcattcaggacaccacccagggacagtgcctatgtgatcacctcctaaaggctaagcttaggggcatttcccaaagtggggacagagggcaggacgcccaggctgggggctctcctcgcccgccctggtgtctgacagcctcaaggaaggagcagtgcctgtgtcagccatggggcccttggagctgccgctggtgcctagggggcctgggtttctgcccaggcagccagtggctgttgggagcctctgtttcccctgtgctgggggccttgagtgctatgctagcaggggcctggccccaagtgtgagtgatgagcaataaacgtaccgtccccctcaaaaaaaaaaaaaaa

SEQ ID NO: 56035 - DNA, 498 bp, Homo Sapiens
gcacgaggaggagcccatggggcgggcagcccccagaaagcgggcagcaggccccgataccgggaagagccgacacagccacgaaccagacaagcagacaatcagcggacaatcggttctggactcacccctcatccgggcccccagccccgccagagcctccgtggctgcgggtgttgggaaccatgcctgccagccagtatgtgcccctcacccaggcctggctgggccctggagagtcctgtttgcacagcccaggggtgtccggcctctggcccgccccggagcagggagggtggctggggccaagccccgagggcccctgcaagcactttacttcctgttcctccccagccttaaccccaaagccctcctgcaccccaaagaagccactgaggctggccgagccacactgtctccccaggggcgtcgacctggcccagctgggtccccagggccagcacatggaataaaatagccagggccacactcagaaaa

SEQ ID NO: 56036 - DNA, 682 bp, Homo Sapiens
cactgacaggagcacaggtaaggctaacaagatcaccatcaccaatgacaagggccggctgagcaaggaggaggtggagaggatggttcatgaagccgagcagtacaaggctgaggatgaggcccagagggacagagtggctgccaaaaactcgctggaggcccatgtcttccatgtgaaaggttctttgcaagaggaaagccttagggacaagattcccgaagaggacaggcgcaaaatgcaagacaagtgtcgggaagtccttgcctggctggagcacaaccagctggcagagaaggaggagtatgagcatcagaagagggagctggagcaaatctgtcgccccatcttcttcaggctctatggggggcctggtgtccctgggggcagcagttgtggcactcaagcccgccagggggaccccagcaccggtcccatcattgatgacgttgattgaatggcccttcgtgataagtcagctgtgactgtcatggctatgctatgggccttcttaaatgcttttatgatcctgcctttcagagatgaactttctcttcaaagcttgaactttctttccaagattacttgaagtcttttgacttttttgccgggagggctgatcaatcctttttgtttaaattaaaaagtctttaattatttaaacttgagttgtactttaact

SEQ ID NO: 56037 - DNA, 1181 bp, Homo Sapiens
tgactgtggtgccgtacttggaggacctgcacggcgcggacgaggacgaggacctcttcgacatcgaggatgacatcatctacactcaggacttcacggtgcccggacaggtcccagaagaggaggccagtcacaatggacagcgccggggcctccccaaggccgtgtgtatgaacggcacagaggcggcgcagctgagcaccaaatccagggcggagggccgggcccccaaccctgcccgcaaggcctgctccgccagcagcaagatccgccggctgtcggcctgcaagcagcagtgaggctggccgcctgcagcccgtgtccaggagccccgccaggtgcccgcgccaggccctcagtcttcctgccggttccgcccgccctcccggagaggtggccgccatgcttctgtgccgaccacgccccaggacctccggagcgccctgcagggccgggcagggggacagcagggaccgggcgcagccctcccccctcggccgcccggcagtgcacgcggcttgttgacttcgcagccccgggcggagccttcccgggcgggcgtgggaggagggaggcggcctccatgcactttatgtggagactactggccccgcccgtggcctcgtgctccgcaaggcgcccagcgccgtccggcggccccgccgcagatcagcttgcgggctgtggagaactgcgcccctgattcccgccctgcaatgccacgcccctcccggaaccccgtcacgcaccgctttggcgtctccggttccgcccgcctcgatcagtcaccccgccccgtgatgtactctgccctaaccgccatcttctttgccccagctacggcgacttatccatcgctcgacctccttctccttttagtcccgcgttggagggcgataaggcatgcgaaacttggacaggcgcctgcaccgtgcgcggccaccgcttccacgcacaatacccaatgtaggtggctgtgctctcatgttttcccgcctcatggactcccctcttcctcgtttccggacgcttccccactctgcgcgcgcatgagtgcgccccctgtcgcgctctgctggctctggaggatcctccctgtgtgtaacgtcgacgtgctttacagtgtgccaacgcccccctctgtgctcgtctattgtgggtcgcctcctcccccacccctc

SEQ ID NO: 56038 - DNA, 577 bp, Homo Sapiens
gcacgagcacacaaggggcccttggagcgtggactggttggttttgccattttgttgtgtgtatgctgcttttcttttctaaccaagaggctggttttggcatctctgtcccattccctgggatctggtggtcagccctaggataaaaagccagggctggagaacaagaaagggccaggagatggaattccttcaggccggcacccacaccctaggacatgtaagccctcatgtccaagggagcctcatgcagatagtaggaaatcaggtctggaaatttaaaaataaaaggcatgagactaaggctatctgcttcccttatgccctgactggagaggggagggaggagaggcaaggcccacagagggcatcccagctaggccttgggatggctgcagtgaggagaaatcccgggaactgtattgacacaaagattcttattgcacttgtattttttgtattaaagtttgcatggtttctaataaaggattcaaacataagtttgtagtgaaatggcctgggagattccaagggcttctctggagggggattggctgcagtgtagatttgcctctga

SEQ ID NO: 56039 - DNA, 628 bp, Homo Sapiens
gccaccaggaacccagacaccacctccaactctgagccttccagagcttcagcctctcttcgtcgtcttaccccactgaaaccaacagggatcgggccaggctcccagattcttgaggacagggacttcggcatttactaatgggggactactgtggggtaagggggcgcctgcttgcctgatacaggatggggtcaagggacagtgggcaggtcctcactcaggagtggggggtgtaggctggccagcccccagggcttgtccaccagtcttctccccgcaaggccctcagagcagcgcctgtgggtgtcagtattacctgagcctaggccaaagctagcccaaggctggggaaggggaggagactccaggtcagaatgtgaggtctcagtctgtgatttaaggtgttgcatgtggactcttaactgtacgtgtagtttctagtggagaaatcaaggctctgatcattttgtttttagtatgaaaatgtgatttcctttctgtttgtaactcatcatagaaacattgtgtgggaggagaggggatagtctacagctaatgagggaaacaccaaagatcacatcattaaaatgatgacatgcccctcaaaaaaaaaaaaaaaaaaaag

SEQ ID NO: 56040 - DNA, 456 bp, Homo Sapiens
gcaagctacgcaattgcagccacccggccgccaaggcaggcttgggctgggccaggacacgtggggtgcctgggacgctgcttgccatgcacagtgatcagagagaggctggggtgtgtcctgtccgggaccccccctgccttcctgctcaccctactctgacctccttcacgtgcccaggcctgtgggtagtggggagggctgaacaggacaacctctcatcacccccacttttgttccttcctgctgggctgcctcgtgcagagacacagtgtaggggccatgcagctggcgtaggtggcagttgggcctggtgagggttaggacttcagaaaccagagcacaagccccacagagggggaacagccagcaccgctctagctggttgttgccatgccggaatgtgggcctagtgttgccagatcttctgatttttcgaaagaaactagaatgctg

SEQ ID NO: 56041 - DNA, 502 bp, Homo Sapiens
ctctggagtcacaccaccccgacccaaacaccatgggcggggccagccaccgggacagggctctctcggtgactgccaccgtaggggaaaccaaagggaaggaccctgccccagcccagcctcccccagctaggaaacagaacgtgggcagagacgtgaccaagccatccccagccccaaacactgaccgccccatctctctttctaatgagaaggactttgtggtacggcagaggcgggggaaagagagtttgcgtagcagccctcacaaaaaggccttgtaacggggagggcccaggggcaggactgtggagacccgtcctgaacgggcgactgtgtcttgactacctttcaaaaccagcactgtgtgggaatgtccgccaggcagagctcggagcctcattgagacaggggagagagaaagacaaagaggggaccttcttccagatgccttcccagttgtaaccggtaaaactgttaccagatagtgtttgtacaaaaa

SEQ ID NO: 56042 - DNA, 933 bp, Homo Sapiens
  misc_feature (34)..(34): n is a, c, g, or t
  misc_feature (731)..(731): n is a, c, g, or t
  misc_feature (810)..(810): n is a, c, g, or t
  misc_feature (836)..(836): n is a, c, g, or t
  misc_feature (878)..(878): n is a, c, g, or t
  misc_feature (925)..(925): n is a, c, g, or t
taagctcaggcacgcactgaagcactttactgantattcattccattattcatatgacagttgttttgagtttcgtaccaccttattgtccccttatacagataaggaaactggggtgcagaaaggtgaattaactttacaaagtagacatgacaagtgaacagcagagctgggatctaaacagcaataactaacattaacagagaatttaaaatgttcttagtgctgtgttataagctttggtggatgtcactcctttaatcctcacaacaccctgtcgggtagtcatattttgcaagtatggaagctgaggcagggcaacatgaagtaacttacataactcatacagtaatttgtgcagttgggagatgttcagccttagtccctggctaattgcctgttcttttccagcctgattttttttcccacaggaagagcccacatgtagccctgaggtttccttcccaggacagctgcagggtagagatcattttaagtgcttgtggagttgacatccctattgactctttcccagctgatatcagagacttagacccagcactccttggattagctctgcagagtgtcttggttgagagaataacctcatagtaccaacatgacatgtgacttggaaagagactagaggccacacttgataaatcatggggcacagatatgttcccacccaacaaatgtgataagtgattgtgcagccagagccagccttncttcaatcaaggtttccaggcagagcaaataccctagagattctctgtgatataggaaaattgggatcaggggagctanaagaattacagggatgttttttaatnccactatggactcagtctcctgggaataaggtctgtccactnctggtcattggtgggatgttaaaccccatattcctttcaactgctgnctgctagg

SEQ ID NO: 56043 - DNA, 383 bp, Homo Sapiens
ccggctaaaagatggctgctggcgcctggcagccaccgcctgggaggttactgtaaggcccgcagctcccgccagctcccgcggactgctgccgcctccttaccatgaagccagtaagtcgtcgcacgctggactggatttattcagtgttgctgcttgccatcgttttaatctcctggggctgcatcatctatgcttcgatggtgtctgcaagacgacagctaaggaagaaatacccagacaaaatctttgggacgaatgaaaatttgtaactcttctggatttaattatctgaaaatacagttctttccctcatgcttatgtagatataaaaataaaattcataatgcaaagttcccaaaaaaaaaaaaaaaaaaaaggac

SEQ ID NO: 56044 - DNA, 548 bp, Homo Sapiens
gcacgaggccaactgaagaaacatatcaccttgctctgcgatagattatccaaaggtggccgtctctgcctaagtaccgatgcagcagccccacagaccatggtcatgccaggtggttgtactacaatcccagagtcagacctagaagaaagatcagtagaacaagactctacagaactgtttaccaaccacagacatctcactgcagagacacccaggcctgaagtttcacccctccaaggagtctcggaataattcaagtagagttgtttggttgagaggaacatccccatctcaaggccgaacctgtgtgaacctcatgccaagcacagatatagggctggcgcaggtgcttcccaaagcttaccttcctggagatgacatgcatagaaagaggggttgggactttttacttcactaggagaacttgtaacaccatggggaagtcagctgaaacttgtcttgttttgccaggaaaggaagtagttgcctttggtcatccatctgctaatagtcacagaatacagtgaaatgacatagttttgggt

SEQ ID NO: 56045 - DNA, 447 bp, Homo Sapiens
tgaatttcttccctctgcttcctggacacagaggaggtctaacgaccagagtattgccctgccaccactatctctagtctccctagcttggtgccttctcctgcaggagtcagagcagccacattgcttgccttcataccctggaggtggggaagttatccctcttccggtgctttcccatcctgggccactgtatccaggacatcactcccatgccagccctccctggcagcccatgttctcctcttttctcaccccctgactttccctgagaagaatcatctctgccaggtcaactggagtccctggtgactccattctgaggtgtcacaagcaatgaagctatgcaaacaataggagggtgtgacaggggaaccgtagactttatatatgtaattactgttattataatactattgttatattaaatgtatttactcacaaaaa

SEQ ID NO: 56046 - DNA, 917 bp, Homo Sapiens
ggatgcagtggtcgtccctgccctccccggccccggggtgcaccccgcaaggctcccgctggtgtccctggagcatgggaggctgctgagcgtgagtggcggtgtctggcaggagctgcgtggcagggagggcgtccatggctgcagccaacaagggcaacaagcccagagtccggagtatccgctttgcgccaggccacgatgcagaaggatcccacagccacgtccactttgatgagaagctgcatgactcggtggtcatggtcacccaggagagtgacagcagctttctggtcaaggttggcttcctgaagatcctgcacaggtatgagattaccttcactctgcccccagtgcacaggctgagcaaggatgtccgcgaggcacctgtccccagcctgcacctcaagctcctcagcgtggtgcccgtccctgaaggttatagtgtcaagtgtgagtactcggcgcacaaagagggcgtcctcaaagaggagatactgctagcctgcgaaggtggcactggcacctgtgtgcgcgtgacggtgcaggcccgcgtcatggaccggcaccacggcacgcccatgctgctggatggtgtcaagtgtgtgggcgccgagctggaatacgactcagagcacagcgactggcacggctttgactgaggcccgaggccccgcctgccccgggcccctcagccttaaaccccgccttgtccccccgacatgctgcgtgatggtgtggcttcctcgcccctctctggggtgggtgtgggggtggagtggccttgcccacgcctctcacctctgccttcatttgtgctgccaccctgcccctccctcgtcctcctctcccgcttcctcctctctgtgtgcctcagtctcctgccggaagaaatgggttgagcccgaaaggaggct

SEQ ID NO: 56047 - DNA, 499 bp, Homo Sapiens
gagcgtggaattgctgccctgtggacactggctgggaaggcaggtcttcccctagcacatggggaccccggcctcgagggtgacctccctaccttgcccctgccagccaccaagcgcaggtgcagcgggggccagactcctgccggcctcagaggacacctggcccagcacaggcagctagaagggccggtgggcaccggggccgggaagcccccacctcaccacctgagggcccctgggaggctcctctggcctggctgggctgggtctggggccgccacaggcccctcacggggcggcagaggcaacttcagtgtccctgttagagcaacacgggtccctccgtggggggctgggtgcggccccctgccggtgtatttcctccccagggagtggggcctccccgggagctgacgccaccaccctgcttagccctcacagggccccaaggtgtccgagtgtgttgggtctgaacgcgaaataaagaaatcctctcaaa

SEQ ID NO: 56048 - DNA, 1370 bp, Homo Sapiens
gcgggacccaactgattgtcaaaggcggcagattgtagtttttgttttggccggaaaggcttaccatgagttgccagggctgagagagatggagaaggattcgcggcggtgacagattaaattccccagttacattatagacttggaggtgggggatcttctcatcgttagaggccccgatcatgggagataggcggttcggagccagttctgcctaactttgtgttcactgatgttagggctgctagggctgcaaaggtgggcacccctactcgcctaagagctttctcctctcttctctttttcccctttgcctctctccttacatcacctgcccactaagtagacttgtccttgtgtggacgggagccggaaagccttgagaacttattcctcgacccggacatggcacaggagaaaatgaaactaggtttcaagtcgctgccgagttccactaccgcagacggcaacattctgagaagagtcaacagtgcccctttgatcaatggacttggttttaattcacaggtgttgcaagctgacatgttaagaattaggacaaacagaacaacatttaggaatcgacgctctctgttgttgccacctcctccctttcatggttccatcagccgccttcatcaaatcaaacaggaagaagccatggatttaataaatagagaaacaatgtctgaatggaagctacaaagtgagatacagataagtcactcttgggaagaaggcttgaaactgaatgacaatggcttacagaaatcatcctctctaaagtgcattgatttaactccagtatcctcaatggcttcttccatcaagaagactgggaagtctacttccagctacttttgatggaaacgacagcaatgctggatcttctggtaattcgtcagctgaaatcggcactgtcacaaactctcctgtgtcaccttctgatactggttctcatttgttctagtagacaaactttcaactaaatgattcacccatcccaagactttctcaccagtggagaaacacacacatcaagcaaaccaagtcagagcaatgagaattgtactgtataatttaaactatctcctatttatcttttttcctcaatttcctaaaattctatttatctacagaacttgcgtgtataattcttgtgtacatccttaaatttaatgtaataacatgttaaagatgttttccaaatcagaaccatgttgaagatacaagcgtaaattgttaggctgctattttctagaaaatgctgtaccttgactttttaaaataatcttatgaaacataattctgataaaatataattgttcaattaacaaaggaaaaaaaaaaaaaaaaaaaaaaaaaaaaaa

SEQ ID NO: 56049 - DNA, 3815 bp, Homo Sapiens
ctccccgctgccctgcgctcggcgggctggcatcgggcccggggaaagcggagcagtagttcggtgtagcactgtttgcggcgaggagaaaggaaggagaggagaaaactgcactggatcaaggaggtcttcccataggcctgcagtagggctgtttaccattggaagcaagggaaagaggaggagatcaatctagaagcatggagatctgcctgcatgtctgctgcagggcttaagatcactggaagcaaagaaacaaagaggagattgctcctgatcagtatagactgggtgtattgccaagagaagcaagaggagaggagggaactgcctcggatcattacaggtccacctccagaggcagctgtagtggcctttgagtggctgaagaccagcaccctcacaggcctacacccacaactaccactctctttaccccagcccgagtgcgctctaccataccttgttcgtgcttttagcaggggtgattacatgggccgcattcaggaagtgggctgggtgactgcaggactggtgatctgggctggcacctgctactacatttacaaatttaccaagggaagagcccagagtgtgaggactcttgccagaaatggatccacagttaagatggagactgtggttggggtacagagccagaccttggccataaatgaagcagagattaagactaaaccccaagtcgagattggagcagaaactggagcaagaagtgggcctggggctgaagtagagaccaaggccactgctatagccatacacagagccaactctcaggccaaggcaatggttggggcagagccagagactcaatctgagtccaaagtggtggctggaacactggtcatgacagaggcagtgactctgactgaggtcaaggccaaagccagggaagtggccatgaaagaagcagtgacccaaactgatgctgaggctggcaaaatagttaagaaagaagcagtgacacagaccaaggctaaagcttgggcgctggttgccaagacagaggccaagagagaagcaatgacccagaccaaagctgaaactcatatattggctgaaaaagagacagagattaacagagtaatggttacacagagtgagaccttggcagtacccagggaagtggccaagatgggggccacgaacaagactggaattgtggatgaaaccaagacaagagctctggaagagactgtgttgatcccaagagcattccctagtaaaaacgcttcatgctgaactctatctctgggcctgcttcctgggaagccaacctgcaacagttggtacaagaagtggttcgagaaagcaaacactgtgatgaaattttggagatgaatcacctgctacccagctgtcaatgaagactccatcattggtggtaggtggagtagataggcctctggaataaggtagcagaggaattgttaaaattttcaatggtggttaactgggttggcatactggtaaaaggggacacattaactggtgccatgtatcagacctttgagaaatatgggatatattaaatataaggaaggccagaaaattgggcggctgttgctaagcagattgagctctggaaaagaataacaaaaagctgaattaaattaatcaacaattgaaagctatgtttgaaagtcagatggctttattcataacatataaagaggctctcatcttttccaggtagaaggtggagaaatctgaggagtagactcaggatttgttaaaagcaagcttcaaagaaagttaaaattctaaccaagacaagtcttctatgccgagttatgtgccatggttaagaaggaatgggactctgacacttggaatgggggacatctggattgatgtccctaaaaatcttatatccccagattcccctgagccccttgagaagtgtcctactcctccctattaagggccggcactccatcttgcttcaatatatggaatcctttcccctgtaagataacctgggtttccctcagaatctgcccgcacctcctatcctggccactgggcctataactagggttaagccacgcataatctagctggtgatgtgctgggtgtaataaggaaagaaagagaatacaccaacaaagagtttcgggacataacctagccagcatatactagaaggtgctgagggagtaagtatggcatcaaattctaaggagcttgatcaggagggctggaatataaacttgaatatgggagaattaatcaatttgaaagtgctttcccagaatacaggatttaataccctggagaaaaccacaggaaatgacacgaactcattactgcgatggctcctcgaagtatggaaaaagccatggcgtacataaagtgaggtgtaaatgccagagttgccatagaagatggcgggaaaagggatcaaagactcagagagacataaaggagaagatttgggagagggagaggattaatcctgatttgaactcttcgaatttgaagtgcttatgtactatgatttgaatatggtttatccccatccaaagtcatgttgaggatgggttcccaatgtgacagtgttgggaggtggtacccttaagaggcatttgtgtcatgaggaatctctcctgatgagggtatgaatgcagtctctttggagtgggagagttcttgtgctcatgggactggattagttactgtgaggaggttggttgttataaagtgagtctgcctcttgtgcttggtgtcttttgcgtgtacctgtttccccttttgtttctttgccatgttttgatgccctcaaaagaagttgtcggatgtgactgcccagtcttgaacttcccagccctcaaaactaacatatcttccagtagcttcctgagaaagtgtatatgcaaagcacacttctgagatctttcagatggttttgccacattgcccaggatggccttgaactcctgggctcaagtgatccacttgccttggccccccaaagtgctgggattacaggttgctatgaaaagaaaaatcatgatattaaattttagcatcgatattatggaagctatgcctggactcaacaacacgaacttctactcaccaaggctgatcttgtactaatactaagtgcccaacctgacaacagagaagatgatgagcctttataagacaccattccttaggggcatcagccagtcccatggtgttaggattattacatgggacacctttcatcatcatgaaaacagaaacttttcctcatggaaatgaatatgtattttagacacacatttaccttctttgctgacaatgattctgtcatcaccatctccatggacttccagaatgccttaatcatcatcagagtatcctacacaaagttgtctctgaccaaggaactcatttaatgggactgcatcccccagactccatttgtaattgacttctgcttgggtttggtcaatggaatgccctggcacagctttggagggaagaagagagaagacaatgtatttcttcactgctcccactctgatttgggctatgttttattggcagggactgcatcccttcaagattttagcttcttccagaagtcccctcctccatgactctagctctcactaggctccagaaatactatttcttcctcttgccctcttaggcctagggtaacagctacctgctattgctaacctctgggtgccacaaaattgcttgttgggtctcataatcttgcatatacctctgtaagtagtccctacattaaagtcccttgaaccatcaaaaaaaaaaaaaaaaaaaaaaaaaaa

SEQ ID NO: 56050 - DNA, 1979 bp, Homo Sapiens
agcgggggcgggctctctgacgaaggactggaaggtggcggtggtgaaggtgcaggccgttggggcggctcagaggcaggtgactatgaaaggcttatatttccaacagagttccacagatgaagaaataacatttgtatttcaagaaaaggaagatcttcctgttacagaggataactttgtgaaacttcaagttaaagcttgtgctctgagccagataaatacaaagcttctggcagaaatgaagatgaaaaaggatttatttcctgttgggagagaaattgctggaattgtattagatgttggaagcaaggtatcattctttcaaccagatgatgaagtagttggaattttgcccctggactctgaagaccctggactttgtgaagttgttagagtacatgagcattacttggttcataaaccagaaaaggtcacatggacggaagcagcaggaagcattcgggatggagtgcgtgcctatacagctctgcattatctttctcatctctctcctggaaaatcagtgctgataatggatggagcaagtgcatttggtacaatagctattcagttagcacatcatagaggagccaaagtgatttcaacagcatgcagccttgaagataagcagtgccttgaaagattcagacctcccatagagaacagtacaattgcctgatttcctgtcctttacagcccgagtgattgatgtatctaatgggaaagttcatgttgctgaaagctgtttggaagaaacaggtggcctgggagtagatattgtcctagatgctggagtgagattatatagtaaagatgatgaaccagctgtaaaactacaactactaccacataaacatgatatcatcacacttcttggtgttggaggccactgggtaacaacagaagaaaaccttcagttggatcctccagatagccactgccttttcctcaagggagcaacgttagctttcctgaatgatgaagtttggaatttgtcaaatgtacaacagggaaaatatctttagtattccaagtgccttgcaagtattcatttaaacattaaaacagccttttgagatgtaagtactgttatcatccccatttcacaggtgaagaaacagaagcacagagatgttgatacagactcaaggacgcagcaagtggcggagcaagaatcacactcaggcagtctctctcctttctgaacagagatgagccctaagatacctggaagattttgtttttaacctcacattaaggaaagcacacatcaccttgaaaggttgcacacttactcctatgatggtgccattgcacagaaacatttcagaatacttttctaaattaaagagtttgtggagtgttttataaatatcaatgctaggaaatctttatcaaatgaagataggtttgactttttgaaacaaaagtcattcagagataagtctggtgtgattgaagccaaatcattccagttgagtaaaaataataaaaagtttggaatatacaaacaatttcaaaaagaaaggtgcaaacctctttagagtagggtcaacttaagaattccttttatttctaaaatgactggcttagaggcagcagcacttggtaaaagttttaatgtattggataaaaaaaaagttatcattacttgatagagcatatgtgtgtgtctgaagaaagatttacatagccttacacttctctctactgaatatcatacgttacttttcttaaatgtgtctagtcatatatgtgtgatatgtataaaggccagttccctccaggagcaatgacagtctttattcggagctttaaggtagttatgtaggccgggcatggtggcacatgcctgtaatcccagctactcatgaggctgaggcagaagaatcgcttgaacctgggaggcagaggtttcagtgagccaagattgcactactacactccagcctggtgacagagtgagactccatctc

SEQ ID NO: 56051 - DNA, 1856 bp, Homo Sapiens
aggactagaatcaggacagtcagatctgtggtcacatcctgcccaattccagctctgaggtccatcaaaccatctgcttctcccttggcaagaagctccctctgtctgactggcagcagggtcagtggccatccttttctaccttcagctgttgcgcatctcctccacgttttcctggagtaaaggaacaagcaggttcttatccaaatacccaacctgtgaagatgagacggcccttgggaagaggtattagccaagttttcagtatgatgcccggcagaaagaatttgttgtctttgtcttaagcttattatcctcccaggtcataggaagatctaaagtccaatcaatctccttactcagaattcacagctttcccctcaaacttaaaatgcccatgtcatttcacgagtacccataactacccatcgtttagatacatgtcctcccttggactagaaatctgcagcagttcctacttaaactgatggatgctttgggctttggaggtatctcatccctatgcctgttgccctgaagctgccggaaggaaaggccccactcaactactgggaagaaagcccataattcaaggcttttaatacagtcactacacaagctctccctctgatttaggagatcttgttacctcctcatctacatgtgcttaaaaacaaaaagaaacctataattattcaattcacctgtggtccaaataagtctcacatccagccattcccctgagagggcaggaggccagactttgaactttccacagctgggtcttcattttactagtgagataaagaggtgcagattagggtgacagtccatctaagcaagtggacgatctggggaactgtaggccttgctgaagcatcctcccacagaaaggagataagggccttatccaattggctgtacacaatagatcagtgcttctttcctagacaaggctgaaaggggccaacattatttctgaagacttcattattggaattctatgggagtgatctcactgagctattttggaatagaaatgtggctagttgcctgacctccctcaatggtttcacgtggctttcaaagggaaggaagggcagtgctgacttttggtaaaatgggcgaaagggtccatgccagcaacacaatcactcaaagtccagatgagggatcagtaaatacaacgtgcctgaaaggtggcccttgagcacattcctccggtagacattaacttattaaattgattctgattacaaatataaactttgcccccatctcacccagtaacaatgcaagagttgatgtcagtctataaaaggaagtaggaactgtccctggctttcaggctccaacatcctccccctgtcaagatgtggcacctcaaactttgtgcagtcctcatgatcttcctgttgctgttgggccagatagatggctccccaataccagaagtgagttcggcaaagagaaggccacggagaatgaccccattttggagaggggtttccctcaggcctattggagcctcctgccgggatgattctgagtgtatcacaaggctatgcagaaaaagacgctgttccttaagtgtggcccaggaatgatgtacataccagggaaagaaaggacagcagtcacctccgacaatgctccgttctatggaatattgattaactgcattttggctggagacacccaagtgaagcaatcttgtatttttaatatttaaaggcagatgtacgctttaaattggtctccatttcttcttagaatgttgatatatggataagcataactaaacttgtcaatttagagtttatttttctatggatactattaaatgtctcaaattg

SEQ ID NO: 56052 - DNA, 2571 bp, Homo Sapiens
agaagctttttcatttattcgtccagcagcatcttgtactagtcctgactggaaatttatcagtggtgtggttcctcgtgcaacaaatatgaacgtctgaaggcaaaccaggtagctactggcattcggtacaatgaaaggaaaggaaggtctgaactaattgtcgtggaagaaggaagtgaaccctcagaacttataaaggtcttaggggaaaagccagagcttccagatggaggtgatgatgatgacattatagcagacataagtaacaggaaaatggctaaactatacatggtttcagatgcaagtggctccatgagagtgactgtggtggcagaagaaaaccccttctcaatggcaatgctgctgtctgaagaatgctttattttggaccacggggctgccaaacaaattttcgtatggaaaggtaaagatgctaatccccaagagaggaaggctgcaatgaagacagctgaagaatttctacagcaaatgaattattccaagaatacccaaattcaagttcttccagaaggaggtgaaacaccaatcttcaaacagttttttaaggactggagagataaagatcagagtgatggcttcgggaaagtttatgtcacagagaaagtggctcaaataaaacaaattccctttgatgcctcaaaattacacagttctccgcagatggcagcccagcacaatatggtggatgatggttctggcaaagtggagatttggcgtgtagaaaacaatggtaggatccaagttgaccaaaactcatatggtgaattctatggtggtgactgctacatcatactctacacctatcccagaggacagattatctacacgtggcaaggagcaaatgccacacgagatgagctgacaacatctgcgttcctgactgttcagttggatcggtcccttggaggacaggctgtgcagatccgagtctcccaaggcaaagagcctgttcacctactgagtttgttcaaagacaaaccgctcattatttacaagaatggaacatcaaagaaaggaggtcaggcacctgctccccctacacgcctctttcaagtccggagaaacctggcatctatcaccagaattgtggaggttgatgttgatgcaaattcactgaattctaacgatgtttttgtcctgaaactgccacaaaatagtggctacatctgggtaggaaaaggtgctagccaggaggaggagaaaggagcagagtatgtagcaagtgtcctaaagtgcaaaaccttaaggatccaagaaggcgaggagccagaggagttctggaattcccttggagggaaaaaagactaccagacctcaccactactggaaacccaggctgaagaccatccacctcggctttacggctgctctaacaaaactggaagatttgttattgaagagattccaggagagttcacccaggatgatttagctgaagatgatgtcatgttactagatgcttgggaacagatatttatttggattggcaaagatgctaatgaagttgagaaaaaagaatctctgaagtctgccaaaatgtaccttgagacagacccttctggaagagacaagaggacaccaattgtcatcataaaacagggccatgagccacccacattcacaggctggttcctgggctgggattccagcaagtggtaaattggtatttgtaaaaagcaaacaaacattacaaggcagttatctcattgctgttttgggagaggaacgggaaaagctttttgcttatttgtcttttgaaaattaaggctgggcgcggtggctcacacctgtaatcccagcactttgagaggatgaggtaggcggatcactggggtcaggatttcgagaccagcctggccaacatggcgaaacctcgcctctactaaaaatacaaaaaaattagctgcgcgtggtggtgcacgcctgtagtccctgctacttggaaggctgagacaggaaaattgcttgaacccaggaggctgaggttgcagtgagccaggattgcgccaccacactccagcctgggcaacagagactctgtctcaaaaaaaaaaaaaaaaaaaaattaacctcaaccaaacgcctattttttaatgcttagttttggcttgaaattcttcttcacctggagttttcttacgttaatacattaaaataacctgaaggaaactttcgttatgggccaatattagctcttatggaaactgatttatatcttttttatgacctttcaaaagtaaaatactatgcataatctagaaagatttgtcagataggaaattttataatgcattagccattagtcagagttgttttttaacatgccagagaaaaagttgtaatgccttggaagttattctcttttctatagattgtgttcaaaagatgtgtatacttgcaataaggtttatgttaaggtggctttaacaattggttgctattttccttctttagtcaatatgactttgatgtcattaactgctaagtgttattttctaagaggaattttatcttttttttaaccttattaaaagcctttgaaaacac

SEQ ID NO: 56053 - DNA, 1528 bp, Homo Sapiens
gacgggtcgcgtcagttccgacccggacccgtacgctgctgcgctgacgtggctcctggaagcagggctggcgtagggccgccatgttgcagcaggatagtaatgatgacactgaagctgtttcactgtttgatgcggaagaggagacgactaatagaccaagaaaagccaaaatcagacatccagtagcatcgtttttccacttattctttcgagtcagtgcaatcatcgtctgtcttctctgtgagttgctcagcagcagctttattacctgtatggttacaattatcttgttgttgtcgtgtgacttttgggcagtgaagaatgtcacaggtagactaatggttggcctacgttggtggaatcacattgatgaagatggaaagagccattgggtgtttgaatctagaaaggagtcctctcaagagaataaaactgtgtcagaggctgaatcaagaatcttttggttgggacttattgcctgttcagtactgtgggtgatatttgcctttagtgcactcttctccttcacagtaaagtggctgagacggtctcgccacattgcccagactggtctgaaagtcttgggctcaagagatcctcccgcttccgccttccaaagcgctgggataacaggcgtgagccgctgcccgggccatccctcgagtaagtttcatcaggtagacattaattctttcacgaggatcacggatcgagctctttactggaaacctgcgccccgccttagttctccacctcttcgtgcggctccaggcaactgccaacagatggcgcccgcccgcctatttctctccttgcggctttgggcctggaggggaggtggggagagtcccaatagcagaggaactggtgagcccgggccaaaatttcatctggcatccggaatgcattaaaaacaacccacaaatctgaagctcctcgcaggagagagagagagagagagagaggagagagaggagagaggagagagggagggaagagagtgacggagaaggagagaaagagacgggagagaggagagagaaagagagagagaggagagagagaaagaacgaacgaacagggaacttgtaaaactaaggggaaaagggcagaagagaggcagcagcgtggtccctgcaagcgtccgctttcctggccaagcagcccccagcacgcctgctttgtggggcagggccatgcggccccgaggaaggatgcggtgagccagagggttccagacaaaggaggggatccccaaggctctgggccagccagtccctgttttactggcaccacggtccctcctaggcgaggacgaagagggaaggggtggagacctccaccttctctgcgtgtggctgcgtccctttacagaatgacaggcccttacttccgagggcggggactaatgtgtaaggcttaacagatccaattccagaaattatctgtgtttttttcaatcaccctcttgtgcccccccaccccccattaaatttcatcttttatctttaaaaaaaaaaaaaaa

SEQ ID NO: 56054 - DNA, 1443 bp, Homo Sapiens
ggggggggtggatgaggaggagccggagacgccgcggaggagaccggaccgaagacggaccgtgccgggaagagcaggcgggtgaaaatgaaagccggctgtagcatcgtggaaaagccagaaggaggtggagggtatcagtttcctgactgggcctacaaaacagagtcatccccaggctcccggcagatccagctgtggcacttcatcctggagctgctgcagaaggaagagttccgccatgtcatcgcctggcagcagggagagtacggggaatttgtcatcaaggatccagatgaggtggcccgcctctggggccgcaggaaatgcaaaccacagatgaattatgacaagctgagccgggccctcagatactattacaacaagaggatccttcataaaacaaaagggaaaagatttacctataaatttaacttcaacaagctggtgatgcccaactacccattcatcaacattcggtcaagtggtaagatacaaactcttttggtagggaattaattttgaattgaaaagaatttttaaaaatccaaatctaagacatggcatgtttaggaagattttagaaacactaaaataatgtgatcctttggattgcctcaatgttcttactcaagtcatctcacttataaggagagttataggctattcagtatcaagatagatttctttggtttatttggttggttcccttttctgcatattgtttgtaatctcctagatactattacgctatcttgtttgggaatgatgtttcataggtttgtgatgatctttacgttcaggactcagttttaacacccagcccagtggttctttcatagatgggaacctgtttctacaaacacttccgattttctgtgaaactaccaagctctcccttatcaagtgaatatcatcaaaaccacagcatccttgatcagagaagggggaggttcacatgtttgcagtgaaaagcagtgtctttgatctgcaacagcaaatcctcagagaaaaagattctggggttacttgaccttctctcctgttaagtgcagtagggcttcccctcttgactttcctggttatagctttccatcacagctccccacattctctcttgatgttgaaagcagtctctcaaaagactttgttgttgtgtggttttttgtttgtgatttttttccttatgcaaatcatactcctgcccaagaaaatacagtagttccccttatctgagcagtatatgttctaagacccctagtagattcgcaaaccacagatagtaccaaactccattcatatatatgatgttttttcttcccttaaccccactcatatgtatctgtgataacgtttaatttataaattaggcacagtaagagattaatgacaataataaaatagaaaaattataaaaaaaaaaaaaaaaaaaaaaaaaaaaaa

SEQ ID NO: 56055 - DNA, 2070 bp, Homo Sapiens
cctgtctccgcgtggtgcgagcgctgcaccagcccctggctggtggttactgtccgaacggcgtggtgtggtcgctgactctctgggcgtgcagctccgcagccctgccggctcggttcggttcgtgagcggccgggattgacttacgcaggattctcagcccttgcctgggagaacagttcaggagacagatggcccccaagagcccagatccagggaccgctgacatttggggatgtggctgtggcctttacccggattgagtggagacacctggatgctgctcagcgggccctgtacagggatgtgatgctggagaactatgggaatctggtgtctgtggggcttctctcttccaaaccaaaactaattactcagttggagcaaggggcagagccctggactgaggtgcgagaggctccatcaggcacacatgcagtcgaggattactggtttgaaacaaagatgtcagccctaaagcaaagcacttctgaagcatccgttctgggagagcgaacgaaaagtgtcatgatggaaaaaggcctggactgggagggcagaagctccacagagaagaactataagtgcaaggaatgtgggaaagtcttcaaatacaattcgtcctttattagccaccagagaaatcacaccagtgagaaaccacataaatgtaaagaatgtgggatcgcctttatgaacagttcatcccttttaaatcaccataaggttcatgcaggcaaacagccttatagatgtattgaatgtgggaagttcctgaagaagcactcaacgtttatcaaccatcagagaattcattctagggagaaaccccacaaatgcattgaatgtggaaaaactttcagaaagaactcaatccttttaagtcatcagagaattcatactggccagaaaccctacaaatgtaatgactgtgggaaagccttcgctcagaatgcagctcttactcgtcatgaaagaatacatagtggagagaagccttttaaatgtaacaagtgtgggagagctttcagggataattcaactgtgttggaacatcagaaaatccatactggtgagaagccatatcagtgtaatgaatgtggaaaagcctttaggaagagctcaactcttattagtcaccaaagaatgcatactggggagaaaccctatcactgcagtaaatgtggaaaatctttcaggtatagctcatcctttgctggtcatcagaaaactcacagtggaaataaaccgtatcagtgtcgtgactgtgggaaggcctttacaaagagctcaacccttactggacatcagagaattcatactggagaaaaaccctatcactgtaagaaatgtgggaaagcctttcggcacagctcaggccttgttgaacatcagagactccatactggggaaaaaccttataaatgtaatgaatgtgggaaagcttttccccgaagttcagcccttaagcaacataagaaaattcataataaagaaagagccatgaaatgtagttagtgtggcaaattgtgcagagtagtttattccttctgaccatcatagaggagacattaaataaattatgcatttaacagaaatactctgtacttctgagagaacacatcacttgtgaggatattcattgtgaggttctactagtgaaatatttgaagaaactaaatgtatgtcagtatggaagtacttatagcatactgtgtgctaattgaaaagaatgaggtggagctgtaaatactgtacaaagccaggcatggtggcatatgcctgtagtcccagttacttgggaggctgagacaggattgcttaagcccaggagtttgagtctgtaatgcactatgattgtgcatgtgaatagccactgcactccagcctgggcaacatagcaagactccatctctaagtaaaaaaatacaacagtagaagtatacccatgataatatacccaatatacccttgttaaagaagcaagtttcaggaaatctatattatatgcattcaaaaagacctggacaaataaagaccaatcttaacagcaaaaaaaaaaaaaaaaaa

SEQ ID NO: 56056 - DNA, 1264 bp, Homo Sapiens
ggagggagcagtcggtcgctgcgccccggcgggccactttcccgggaccccgctcgtcttccttgggccgagattttccactgcgcccctccgagtacccgggttccaaacccctagccacgacatggaagaatttttgcaacgcgccaaatctaaactgaatcgaagcaaacgcttggagaaggtccatgtggttattgggcctaaatcgtgtgacttggattctctcatttctaccttcacatatgcttactttctagacaaggtcagtccaccaggggttctgtgtttaccagtgctgaacataccaagaactgaattcaactacttcaccgagacgaggtttattttagaagagctaaatatttccgaatcattccacatattccgggatgaaattaacctgcatcagctaaatgatgaagggaagttatcgataacacttgttggcagcagtgtgctggcgagtgaagacaaaactttagaatcagcagttgtcaaagtcattaatccggttgagcagagcgatgccaacgttgagttccgagagtcttcctcttctctcgtgctaaaggagattctccaagaggctcctgagctcatcaccgagcaactggctcatcgcctcagaggtagcattcttttcaagtggatgaccatggaatcagagaagatctcagagaagcaggaggaaattctttctatcctggaagaaaaatttcctaacttgcctccaagagaggacatcatcaacgtcctacaggagacccagttcagtgctcagggtttaagtattgaacagacaatgttgaaagatctaaaggagctgtcagatggagaaataaaagtggccattagtactgtgagcatgaaccttgaggtaagggtgggaatgcttttttagcattgattgatttcccacaattgcagtctgagcaactggaatgtaactctctccattggataagtccatgatagtcctttgcttctttgtgatacatttgacttggaatatagtggcaggttattatttgggtgaaaacactatgctaagtcaatgaaaaatgccaaacctggattctcaagatgaatgctctttcattcatctcagtaaaacaaagcctaaaacaaacactcagatgtgggtgtatatttaacctgtttaatagcaattatgatatgtgtgattaggttcacttccatattttctgtgtaccaccctgtattgttcatagaacttttcttaaaaaaaaaaaaaaaaaaa

SEQ ID NO: 56057 - DNA, 2394 bp, Homo Sapiens; identical to SEQ ID NO: 30809

SEQ ID NO: 56058 - DNA, 2776 bp, Homo Sapiens
agaagggcaaaaacattgactgcctcaaggtctcaagcaccagtcttcaccgcggaaagcatgttgtggctgttccaatcgctcctgtttgtcttctgctttggcccagggaatgtagtttcacaaagcagcttaaccccattgatggtgaacgggattctgggggagtcagtaactcttcccctggagtttcctgcaggagagaaggtcaacttcatcacttggcttttcaatgaaacatctcttgccttcatagtaccccatgaaaccaaaagtccagaaatccacgtgactaatccgaaacagggaaagcgactgaacttcacccagtcctactccctgcaactcagcaacctgaagatggaagacacaggctcttacagagcccagatatccacaaagacctctgcaaagctgtccagttacactctgaggatattaagacaactgaggaacatacaagttaccaatcacagtcagctatttcagaatatgacctgtgagctccatctgacttgctctgtggaggatgcagatgacaatgtctcattcagatgggaggccttgggaaacacactttcaagtcagccaaacctcactgtctcctgggaccccaggatttccagtgaacaggactacacctgcatagcagagaatgctgtcagtaatttatccttctctgtctctgcccagaagctttgcgaagatgttaaaattcaatatacagataccaaaatgattctgtttatggtttctgggatatgcatagtcttcggtttcatcatactgctgttacttgttttgaggaaaagaagagattccctatctttgtctactcagcgaacacagggccccgagtccgcaaggaacctagagtatgtttcagtgtctccaacgaacaacactgtgtatgcttcagtcactcattcaaacagggaaacagaaatctggacacctagagaaaatgatactatcacaatttactccacaattaatcattccaaagagagtaaacccactttttccagggcaactgcccttgacaatgtcgtgtaagttgctgaaaggcctcagaggaattcgggaatgacacgtcttctgatcccatgagacagaacaaagaacaggaagcttggttcctgttgttcctggcaacagaatttgaatatctaggataggatgatcacctccagtccttcggacttaaacctgcctacctgagtcaaacacctaaggataacatcatttccagcatgtggttcaaataatattttccaatccacttcaggccaaaacatgctaaagataacacaccagcacattgactctctctttgataactaagcaaatggaattatggttgacagagagtttatgatccagaagacaaccacttctctccttttagaaagcagcaggattgacttattgagaaataatgcagtgtgttggttacatgtgtagtctctggagttggatgggcccatcctgatacaagttgagcatcccttgtctgaaatgcttgggattagaaatgtttcagatttcaattttttttcagattttggaatatttgcattatatttagcggttgagtatccaaatccaaaaatccaaaattcaaaatgctccaataagcatttcccttgagtttcattgatgtcgatgcagtgctcaaaatctcagattttggagcattttggatattggatttttggatttgggatgctcaacttgtacaatgtttattagacacatctcctgggacatactgcctaaccttttggagccttagtctcccagactgaaaaaggaagaggatggtattacatcagctccattgtttgagccaagaatctaagtcatccctgactccagtgtctttgtcaccaggccctttggactctacctcagaaatatttcttggaccttccacttctcctccaactccttgaccaccatcctgtatccaaccatcaccacctctaacctgaatcctaccttaagatcagaacagttgtcctcacttttgttcttgtccctctccaacccactctccacaagatggccagagtaatgtttttaatataaattggatccttcagtttcctgcttaaaaccctgcaggtttcccaatgcactcagaaagaaatccagtttccatggccctggatggtctggcccacctccagcctcagctagcattacccttctgacactctctatgtagcctccctgatcttctttcagctcctctattaaaggaaaagttctttatgttaattatttacatcttcctgcaggcccttcctctgcctgctggggtcctcctattctttaggtttaattttaaatatgtcacctcctaagagaaaccttcccagaccactctttctaaaatgaatcttctaggctgggcatggtggctcacacctgtaatccctgtactttgggaggccaaggggggagatcacttgaggtcaggagttcaagaccagcctggccaacttggtgaaaccccgtctttactaaaaatacaaaaaaattagccaggcgtggtggtgcacccctaaaatcccagctacttgagagactgaggcaggagaatcgcttgaacccaggaggtggaggttccagtgagccaaaatcatgccaatgtattccagtctgggtgacagagtgagactctgtctcaaaaaataaataaataaaataaaatgaaatagatcttataaaaaaaaaaaaaaaaaaaaaaaaaaaaaaaaaaaaaaaaaaa

SEQ ID NO: 56059 - DNA, 1838 bp, Homo Sapiens
agagcgggatcttcagggcagcgggcaaccccttggcccaggaagcctggaacgcaaggaccggagggcgtgggctgggacgcccctaccttggtctttcagggaaaggccttggaaagcagtcgttgcgccagacagcccagggaagagcggcagcctgaggacctagggccacctgctgttccctgggattcatgtccttctggggaggagggaggacccaggacaatggctgctgttcatgatctggagatggagagcatgaatctgaatatggggagagagatgaaagaagagctggaggaagaggagaaaatgagagaggatgggggaggtaaagatcgggccaagagtaaaaaggtccacaggattgtctcaaaatggatgctgcccgaaaagtcccgaggaacatacttggagagagctaactgcttcccgcctcccgtgttcatcatctccatcagcctggccgagctggcagtgtttatttactatgctgtgtggaagcctcagaaacagtggatcacgttggacacaggcatcttggagagtccctttatctacagtcctgagaagagggaggaagcctggaggtttatctcatacatgctggtacatgctggagttcagcacatcttggggaatctttgtatgcagcttgttttgggtattcccttggaaatggtccacaaaggcctccgtgtggggctggtgtacctggcaggagtgattgcagggtcccttgccagctccatctttgacccactcagatatcttgtgggagcttcaggaggagtctatgctctgatgggaggctattttatgaatgttctggtgaattttcaagaaatgattcctgcctttggaattttcagactgctgatcatcatcctgataattgtgttggacatgggatttgctctctatagaaggttctttgttcctgaagatgggtctccggtgtcttttgcagctcacattgcaggtggatttgctggaatgtccattggctacacggtgtttagctgctttgataaagcactgctgaaagatccaaggttttggatagcaattgctgcatatttagcttgtgtcttatttgctgtgtttttcaacattttcctatctccagcaaactgacctgcccctattgtaagtcaattaataaaaagagccatctggaggaaataaaaaaaaaaggaagactctatgaagaaacagagaagtctcagaaaaggctaacaattttatatagaggacaaaacagcattaaactcatcagttgcaaagattgcctataaaaggaccttaggatttaaggaaggggcttcttaatgtagaaagggaagaagaagagagaaaagaagggtagtaaaaactagagattggggccaggcgcagtggctcacgcctgtaatcccagcactttgggaggctgaggcgggtgaaatcacctgaggtcatgagttcaagaccagcctgaccaatatggtgaaaccctgtctctactaaagaaaatacaaaaattagccgggcgtggtggcgtgtgcctgtagtcccagctacttgcgaggctgaggcaggagaattgcttgaacctgggaggcgaaggttgcagtgagccgagattgcgccactgcactccagcctgggtgatagagcgacactcggtctcaaaaaacaaaacaaaacaaaacaaaattagagattgggtctttcccaggcatatggtattctataaaacagacttactctccttggaggatatattttggagaatgcttcataaaatctatgaatactgtacaatgctgataataaaaactttttatacctga

SEQ ID NO: 56060 - DNA, 3109 bp, Homo Sapiens
gggggccggccagaaacgggctggggagggggggccccgcagcccccctgggccatgctgactcccggggcctgacccccccgggccagccccccctcccccagctccgcggcccgccgactggggggggccagcccagccccctggggacccccggagaggtggggggcagccgggggggccgggacggagcggtcgccggcccccaccggagagacggggcgacggccgcagggggggcggccgggggaccggtcgggccgggaccaagggcaccatgtcgtccggggccaaggagggaggtgggggctctcccgcctaccacctcccccacccccacccccacccaccccagcacgcccaatatgtgggcccctatcggctggagaagacgctgggcaaaggacagacagggctggttaaactcggggtccactgcatcacgggtcagaaggtcgccatcaagatcgtgaaccgggagaagctgtcggagtcggtgctgatgaaggtggagcgggagatcgccatcctgaagctcatcgaacacccacatgtcctcaagctccacgacgtctacgagaacaagaaatatttgtacctggttctggagcacgtctcggggggtgagctattcgactacctggtaaagaaggggagactgacgcccaaggaggcccgaaagttcttccgccagattgtgtctgcgctggacttctgccacagctactccatctgccacagagacctaaagcccgagaacctgcttttggatgagaaaaacaacatccgcattgcagacttcggcatggcgtccctgcaggtgggggacagcctcctggagaccagctgcgggtccccccattatgcgtgtccagaggtgattaagggggaaaaatatgatggccgccgggcagacatgtggagctgtggagtcatcctcttcgccctgctcgtgggggctctgccctttgatgacgacaacctccgccagctgctggagaaggtgaaacggggcgtcttccacatgccccacttcattcctccagattgccagagcctcctgaggggaatgatcgaagtggagcccgaaaaaaggctcagtctggagcaaattcagaaacatccttggtacctaggcgggaaacacgagccagacccgtgcctggagccagcccctggccgccgggtagccatgcggagcctgccatccaacggagagctggaccccgacgtcctagagagcatggcatcactgggctgcttcagggaccgcgagaggctgcatcgcgagctgcgcagtgaggaggagaaccaagaaaagatgatatattatctgcttttggatcggaaggagcggtatcccagctgtgaggaccaggacctgcctccccggaatgatgttgaccccccccggaagcgtgtggattctcccatgctgagccgtcacgggaagcggcgaccagagcggaagtccatggaagtcctgagcatcaccgatgccgggggtggtggctcccctgtacccacccgacgggccttggagatggcccagcacagccagagatcccgtagcgtcagtggagcctccacgggtctgtcctccagccctctaagcagcccaaggagtccggtcttttccttttcaccggagccgggggctggagatgaggctcgaggcgggggctccccgacttccaaaacgcagacgctgccttctcggggccccaggggtgggggcgccggggagcagcccccgccccccagtgcccgctccacacccctgcccggccccccaggctccccgcgctcctctggcgggacccccttgcactcgcctctgcacacgccccgggccagtcccaccgggaccccggggacaacaccaccccccagccccggcggtggcgtcgggggagccgcctggaggagtcgtctcaactccatccgcaacagcttcctgggctcccctcgctttcaccggcgcaagatgcaggtccctaccgctgaggagatgtccagcttgacgccagagtcctccccggagctggcaaaacgctcctggttcgggaacttcatctccttggacaaagaagaacaaatattcctcgtgctaaaggacaaacctctcagcagcatcaaagcagacatcgtccatgcctttctgtcgatccccagcctgagtcacagtgtgctgtcacagaccagcttcagggccgagtacaaggccagtggcggcccctccgtcttccaaaagcccgtccgcttccaggtggacatcagctcctctgagggtccagagccctccccgcgacgggacggcagcggaggtggtggcatctactccgtcaccttcactctcatctcgggtcccagccgtcggttcaagcgagtggtggagaccatccaggcacagctcctgagcactcatgaccagccctccgtgcaggccctggcagacgagaagaacggggcccagacccggcctgctggtgccccaccccgaagcctgcagcccccacccggccgcccagacccagagctgagcagctctccccgccgaggcccccccaaggacaagaagctcctggccaccaacgggacccctctgccctgaccccacggggccggggagggaggggacccccctccaccccccttccgtgccccccaactgtgaatctgtaaataaggcccaaggaacatgtcgggaggggggtggacacaaaaaccggccttgccctgcagggatggggctccacaggccgtgcccaactgggggtggttctaggggaacagggggcgggggagctgtttctattttatttattgattaatttattattttatttattgatcaatctctctgcggggtggggtgggggagggacgggagctggttggggtggcttagcagatccggacagggccctctgtccctgtgtcgtccccaaccccctcttcccgggcccctcctcccctggtcctccccccacgaccttctgtacggatttgctctccggaaggaattctggtttcgcgtgatcctgcctgcgtccgtgtctctgattccgccggcggcaaaaaaaaaaaaaaaaaaaaaaaaaaaaaa

SEQ ID NO: 56061 - DNA, 2124 bp, Homo Sapiens
acacaggtaggagctcctaggaccaggctgaggcccagggacagtgaggccgaggctgggtggcctccaggccaagggcttgggccccatcctgagtctccaggacccaagggcaagagacgccaggcttgggcagcaggagggaggatctagacctgggcctgggtctgtccctgcccgaaatccatgccgagttcccttcccggcagccaggtcccccaccccactctggacgcggttgacctagtggaaaagactctgaggaatgaagggacctccagttctgctccagtcttggaggaaggggacacagacccctggaccctccctcagctgaaggacacaagccagccctggaaagagctccgcgtggccggcaggctgcgccgcgtggccggcagcgtcctcaaggcctgcgggctcctcggcagcctgtacttcttcatctgctctctggacgtcctcagctccgccttccagctgctgggcagcaaagtggccggagacatcttcaaggacaacgtggtgctgtccaaccctgtggctggactggtcattggcgtgctggtcacagccctggtgcagagttccagcacgtcctcctccatcgtggtcagcatggtggctgctaagctgctgactgtccgggtgtctgtgcccatcatcatgggtgtcaacgtaggcacatccatcaccagcaccctggtctcaatggcgcagtcaggggaccgggatgaatttcagagggctttcagcggctcggcggtgcacgggatcttcaactggctcacagtgctggtcctgctgccactggagagcgccacggccctgctggagaggctaagtgagctagccctgggtgccgccagcctgacacccagggcgcaggcgcccgacatcctcaaggtgctgacgaagccgctcacacacctcatcgtgcagctggactccgacatgatcatgagcagtgccacaggcaacgccactaacagcagtctcattaagcactggtgcggcaccacggggcagccgacccaggagaacagcagctgtggcgccttcggcccgtgcacagagaagaacagcacagccccggcggacaggctgccctgccgccacctgtttgcgggcacggagctcacggacctggccgtgggctgcatcctgctggccggctccctgctggtgctctgcggctgcctggtcctcatagtcaagctgctcaactctgtgctgcgcggccgcgtggcccaggtcgtgaggacagtcatcaatgcggacttccccttcccgctgggctggctcggcggctacctggccgtcctcgcgggcgccggcctgaccttcgcactgcagagcagcagcgtcttcacggcggccgtcgtgcccctcatgggggtcggggtgatcagtctggaccgggcgtaccccctcttactgggctccaacatcggcaccactaccacagccctgctggctgccctggccagccccgcagacaggatgctcagcgccctgcaggtcgccctcatccacttcttcttcaacctggccggcatcctgctgtggtacctggtgcctgcactgcggctgcccatcccgctggccaggcacttcggggtggtgaccgcccgttaccgctgggtggctggggtctacctgctgctcggattcctgctgctgcccctggcggccttcgggctctccctggcagggggcatggtgctggccgctgtcgggggtcccctggtggggctggtgctcctcgtcatcctggttactgtcctgcagcggcgccggccggcctggctgcctgtccgcctgcgctcctgggcctggctccccgtctggctccattctctggagccctgggaccgcctggtgacccgctgctgcccctgcaacgtctgcagccccccgaaggccaccaccaaagaggcctactgctacgagaaccctgagatcttggcctcccagcagttgtgacgggcagttgctgcgcagaccgccccaccctccccggctgggagggctctggagggccctggagggggggtccccgcggcagctgacctccggtcacctgcttccccttctgtgcaaataaaccaggctgttatctgg

SEQ ID NO: 56062 - DNA, 1907 bp, Homo Sapiens
cccaagaccaagtcgtaatagcaacttcccttcctcagctgcctgaactttttttttcccttgtagctggagagaagtgtcacattttgctcactctcaaccttcctcgcccacccccttcccggagaacctgtgcggtgtgtagagggtgctgtgagccacctccagcctcgggtggctgcttaagtaactttcaactcctctcttcttaacactatgaagtgtctcgggaagcgcaggggccaggcagctgctttcctgcctctttgctggctctttttgaagattctgcaaccggggcacagccacctttataacaaccgctatgctggtgataaagtgataagatttattcccaaaacagaagaggaagcatatgcactgaagaaaatatcctatcaacttaaggtggacctgtggcagcccagcagtatctcctatgtatcagagggaacagttactgatgtccatatcccccaaaatggttcccgagccctgttagccttcttacaggaagccaacatccagtacaaggtcctcatagaagatcttcagaaaacactggagaagggaagcagcttgcacacccagagaaaccgaagatccctctctggatataattatgaagtttatcactccttagaagaaattcaaaattggatgcatcatctgaataaaactcactcaggcctcattcacatgttctctattggaagatcatatgagggaagatgtctttttattttaaagctgggcagacgatcacgactcaaaagagctgtttggatagactgtggtattcatgcaagagaatggattggtcctgccttttgtcagtggtttgtaaaagaagctcttctaacatataagagtgacccagccatgagaaaaatgttgaatcatctatatttctatatcatgcctgtgtttaacgtcgatggataccattttagttggaccaatgatcgattttggagaaaaacaaggtcaaggaactcaaggtttcgctgccgtggagtggatgccaatagaaactggaaagtgaagtggtgtgatgaaggagcttctatgcacccttgtgatgacacatactgtggcccttttccagaatctgagccggaagtgaaggctgtagctaacttccttcgaaaacacagaaagcacattagggcttatctctcctttcatgcatatgctcagatgttactgtatccctattcttacaaatatgcaacaattcccaattttagatgtgtggaatctgcagcttataaagctgtgaatgcacttcagtcagtatacggggtacgatacagatatggaccagcctccacaacgttgtatgtgagctctggtagctcaatggattgggcctacaaaaatggaataccttatgcatttgctttcgaactacgtgacactggatattttggatttttactcccagagatgctcatcaaacccacctgtacagaaactatgctggctgtgaaaaatatcacaatgcacctgctaaagaaatgtccctgagacagcccaaggctcaggtcaactgccataggattctgagcaaggcctacttggccctggatagaaattgttttcaaagagaagggcagctgcttagagtgaacatgtctatggactttaaaaagaccccacgcaatttgactttgtggcaatagaaaacagtaaaaaacagggcatagcctagtttgttataagaaaaagcatccattttctatccttttagagtcttatttgattatggtgggagggaatgttttcaaatttcccatttctcaagaaatgttcatattaattgaggatttcccttcaataaatctcatgtcctcaattataaaaaaaaaaaaaaaaaaaaaaaaaaaaaaaaaaaaaaaaaaaaa

SEQ ID NO: 56063 - DNA, 3438 bp, Homo Sapiens
gcagagtctgcagtgcggagggggcgggaagtccaggccccgcactcgatccacgctggctccctacggaggcccacctactcgaggcccaccgactcctactgcaatcagtactatgcgatcgtcctagagagtccattcagctgcacttccgcctcagtatggcatcacagctgcaagtgttttcgcccccatcagtgtcgtcgagtgccttctgcagtgcgaagaaactgaaaatagagccctctggctgggatgtttcaggacagagtagcaacgacaaatattatacccacagcaaaaccctcccagccacacaagggcaagccaactcctctcaccaggtagcaaatttcaacatccctgcttacgaccagggcctcctcctcccagctcctgcagtggagcatattgttgtaacagccgctgatagctcgggcagtgctgctacatcaaccttccaaagcagccagaccctgactcacagaagcaacgtttctttgcttgagccatatcaaaaatgtggattgaaacgaaaaagtgaggaagttgacagcaacggtagtgtgcagatcatagaagaacatccccctctcatgctgcaaaacaggactgtggtgggtgctgctgccacaaccaccactgtgaccacaaagagtagcagttccagcggagaaggggattaccagctggtccagcatgagatcctttgctctatgaccaatagctatgaagtcttggagttcctaggccgggggacatttggacaggtggctaagtgctggaagaggagcaccaaggaaattgtggctattaaaatcttgaagaaccacccctcctatgccagacaaggacagattgaagtgagcatcctttcccgcctaagcagtgaaaatgctgatgagtataattttgtccgttcatacgagtgctttcagcataagaatcacacctgccttgtttttgaaatgttggagcagaacttatatgattttctaaagcaaaacaaatttagcccactgccactcaagtacatcagaccaatcttgcagcaggtggccacagccttgatgaagctcaagagtcttggtctgatccacgctgaccttaagcctgaaaacatcatgctggttgatccagttcgccagccctaccgagtgaaggtcattgactttggttctgctagtcacgtttccaaagctgtgtgctcaacctacttacagtcacgttactacagagctcctgaaattattcttgggttaccattttgtgaagctattgatatgtggtcactgggctgtgtgatagctgagctgttcctgggatggcctctttatcctggtgcttcagaatatgatcagattcgttatatttcacaaacacaaggcttgccagctgaatatcttctcagtgccggaacaaaaacaaccaggtttttcaacagagatcctaatttggggtacccactgtggaggcttaagacacctgaagaacatgaactggagactggaataaaatcaaaagaagctcggaagtacatttttaattgcttagatgacatggctcaggtgaatatgtctacagacctggagggaacagacatgttggcagagaaggcagaccgaagagaatacattgatctgttaaagaaaatgctcacaattgatgcagataagagaattacccctctaaaaactcttaaccatcagtttgtgacaatgactcaccttttggattttccacatagcaatcatgttaagtcttgttttcagaacatggagatctgcaagcggagggttcacatgtatgatacagtgagtcagatcaagagtcccttcactacacatgttgccccaaatacaagcacaaatctaaccatgagcttcagcaatcagctcaatacagtgcacaatcaggccagtgttctagcttccagttctactgcagcagctgctactctttctctggctaattcagatgtctcactactaaactaccagtcagctttgtacccatcatctgctgcaccagttcctggagttgcccagcagggtgtttccttgcagcctggaaccacccagatttgcactcagacagatccattccaacagacatttatagtatgtccacctgcgtttcaaactggactacaagcaacaacaaagcattctggattccctgtgaggatggataatgctgtaccgattgtaccccaggcaccagctgctcagccactacagattcagtcaggagttctcacgcagggaagctgtacaccactaatggtagcaactctccaccctcaagtagccaccatcacaccgcagtatgcggtgccctttactctgagctgcgcagccggccggccggcgctggttgaacagactgccgctgtactgcaggcgtggcctggagggactcagcaaattctcctgccttcaacttggcaacagttgcctggggtagctctacacaactctgtccagcccacagcaatgattccagaggccatggggagtggacagcagctagctgactggaggaatgcccactctcatggcaaccagtacagcactatcatgcagcagccatccttgctgactaaccatgtgacattggccactgctcagcctctgaatgttggtgttgcccatgttgtcagacaacaacaatccagttccctcccttcgaagaagaataagcagtcagctccagtctcttccaagtcctctctagatgttctgccttcccaagtctattctctggttgggagcagtcccctccgcaccacatcttcttataattccttggtccctgtccaagatcagcatcagcccatcatcattccagatactcccagccctcctgtgagtgtcatcactatccgaagtgacactgatgaggaagaggacaacaaatacaagcccagtagctctggactgaagccaaggtctaatgtcatcagttatgtcactgtcaatgattctccagactctgactcttctttgagcagcccttattccactgataccctgagtgctctccgaggcaatagtggatccgttttggaggggcctggcagagttgtggcagatggcactggcacccgcactatcattgtgcctccactgaaaactcagcttggtgactgcactgtagcaacccaggcctcaggtctcctgagcaataagactaagccagtcgcttcagtgagtgggcagtcatctggatgctgtatcacccccacagggtatcgagctcaacgcggggggaccagtgcagcacaaccactcaatcttagccaggtaagtgctatgggctactgccttctgtttgggccctgcactgttgttactttctggagaaccctgcttctggctggatgctgaataaagccaaatgaagccccttttgtgtcaaacaaaaaaaaaaaaaaaa

SEQ ID NO: 56064 - DNA, 2087 bp, Homo Sapiens
tttctccgggaaccgtgccgggagagcgcgcggtgctggagccgcaccgggtggccgaagcagaagactttccggaagctgctgggggatgtctgactagctctcatggagctccactaccttgctaagaagagcaaccaggcagacctctgtgatgccagggactggagttcaagagggctgcctggtgaccaggcagatacagcagccacaagagctgctctctgctgtcagaaacagtgtgcatccaccccaagagcaaccgagatggaagggtctaaacttagttcttctccagcatccccctcctcctctctgcaaaacagtactcttcagccagatgcctttccaccaggacttctccactcagggaacaaccaaataacagcggaacggaaagtctgtaactgctgcagccaggaattagaaacttcttttacctatgtggacaaaaacatcaacttggagcagcggaaccggagctcgccatcagcaaaagggcataatcaccctggggagcttggctgggaaaatccaaatgagtggtcccaagaggctgccatatctttgatatctgaagaggaggatgatacaagttcagaagccacgtcttcagggaagtctatagactatggtttcatcagcgccatcttgttcttggtcactgggatcctgctcgtgatcatctcttacatcgtcccacgggaagtgactgtggaccccaacactgtggcagcccgggagatggagcgcctggagaaggagagtgcgaggctgggggctcacctggaccgctgtgtgattgcggggctctgcctcctcacgctggggggcgtcatcctgtcctgcttgttaatgatgtccatgtggaagggggagctctatcgtcgaaacagatttgcctcttccaaagagtctgcaaaactctatggttctttcaacttcaggatgaaaaccagcacgaatgaaaacactctggaactgtccttggtagaggaagatgcgcttgctgtacagagttaattctggttgtgaatatcttgagagtctgccttggcattttataatatgaaaaaagttaatttataaaaattcacagtgcaatttatttgcctggcaagaaaagtttatttcacaaaccaacagccagtaagtgtttttgttctctatgtgtcttctatttagaagaaaagccatgtaagatgtataagaaaccacaaccagccacacctatccttctgaagagctgaaggctaattaatctgtaatggccaagaacttctacttcgatagaaaaatatttctaatgacccagtctacaaattatttcttttacacaaatatatgatgttattctttggacactaggtggtcctacacacagtaggatcaattgctaatctactttgtgaaaaagaactaagcactaatcaataataaggcttacatctaattctcaaaggtgcttatccattttcttgctaaattatccttcttgtaatttggctaaacactaaaacatggaatttttagtttgaatattttgaagtttgaggatgttgggctttccttattgtaaaaaatgttatgtttgaaattattcctgttttcaaaaatggtaattaagtcattaggataaactttctaataaaaaaaaattatgtaaatcattgtaagaccaatgtgaatttaaaccacagtgttggtgccagatattagccagggtcacaggctcttttttaaaatgaagtcaaattagttactgatataagttttatattttgtgattttgccatcatactggttatctgtgctcttgaagtctgctggttctcacaccagcagcaagaggcaaggcatgagacattttaaatatatttccagacatctaaacatctagacaggcctgagtcatgattggctctggtgtgcttccaggtaacatcttgttattgctgtttggggaaaaccaccaatagaattgcagctagacttttggggactgtgcctcgcaggctgtatcacttgctgtaggccaagcaacgagcacttccctcatggtagcaacagtccttaagcccaaagcc

SEQ ID NO: 56065 - DNA, 1741 bp, Homo Sapiens; identical to SEQ ID NO: 26165

SEQ ID NO: 56066 - DNA, 1344 bp, Homo Sapiens
gacatagctgccctaaaaggaatgaggaagcgagagctctccagtgtctggctggctccgtccgtgtgacagcccatgatgttctttccggtctctgtaatattctgaatttccacctgcccgccccttcgcttataatgcagagcatgtgaagggagaccggctcggtctctctctctcccagtggactagaaggagcagagagttatgctgtttctcccattctttacagctcaccggatgtaaaagaactctggctagagaccctccaaggacagaggcacagccacacgggagtgaaatccacccctggacagtcagccgcaatactgatgaagctgagaagcagccacaatgcttcaaaaacactaaacgccaataatatggagacactaatcgaatgtcaatcagagggtgatatcaaggaacatcccctgttggcatcatgtgagagtgaagacagtatttgccagctcattgaagttaagaagagaaagaaggtgctgtcctggccctttctcatgagaaggctctcccctgcatcagatttttctggggctttggagacagacttgaaagcatcgctatttgatcagcccttgtcaattatctgcggtgacagtgacacactccccagacccatccaggacattctcactattctatgccttaaaggcccttcaacggaagggatattcaggagagcagccaacgagaaagcccgtaaggagctgaaggaggagctcaactctggggatgcggtggatctggagaggctccccgtgcacctcctcgctgtggtctttaaggacttcctcagaagtatcccccggaagctactttcaagcgacctctttgaggagtggatgggtgctctggagatgcaggacgaggaggacagaatcgaggccctgaaacaggttgcagataagctcccccggcccaacctcctgctactcaagcacttggtctatgtgctgcacctcatcagcaagaactctgaggtgaacaggatggactccagcaatctggccatctgcattggacccaacatgctcaccctggagaatgaccagagcctgtcatttgaagcccagaaggacctgaacaacaaggtttgttctgcttactgatgagaaatccccaacttatgatctcaccatctgtttgccaagtccaggcaataaaatgcttcagaatgtctccaactgactcagaatcacagtgaaaatataaaatgcaaaatgcttttgtcatagttccactctctcagatacatgtatctaatgaaactgaataaatccgtgtcttctgtcaaaaaaaaaaaaaaaaaaaaaaaaaaaa

SEQ ID NO: 56067 - DNA, 1891 bp, Homo Sapiens; identical to SEQ ID NO: 31072

SEQ ID NO: 56068 - DNA, 3717 bp, Homo Sapiens
cgcgcctgggtctcggcggggctgcgggaccgcgagtgagtgtggtcgctcctggttctgccagctcccctgagagcctgaacccgggcttgagagcctcgccaccccgggtgacatccctgccgtgggcttgggggctctgggtgtgattccgccggtccgggtcccgcagcgaccacctacccagcgcagtcaggggcggggctgggacccagagcgggaccccggctgccgagtccaggtgtcccgcgggcctcgatttggggagcagaaaacgccaggtcttcaagggtgtctgccaccaccatgcctgacccatttggcagcagcctcgtgtgtggtggtctggtgtggacggtggaagcgtgattctgctgagtgtcagtgtgaccactcgtgctcagccgtatctcagcaggaggacaggtgccggagcagctcgtgcagctaagcagccaactgcagaaacgtcaggcctgttgcagtctccaaggcaccatgaatgccatcgtggctctctgccacttctgcgagctccacggcccccgcactctcttctgcacggaggtgctgcacgccccacttcctcaaggggatgggaatgaggacagtcctggccagggtgagcaggcggaagaagaggaaggtggcattcagatgaacagtcggatgcgtgcgcacagccccgcagagggggccagcgtcgagtccagcagcccggggcccaaaaagtcggacatgtgcgagggctgccggtcacttgctgcagggcacccgggatatatcagccatgataaagagacctccattaaatacgtcagccaccagcaccccagccacccccagctcttcagcattgtccgccaggcctgtgtccggagcctgagctgtgaggtctgccctggccgtgaaggccccatcttcttcggagatgagcagcacggctttgtgttcagccacaccttcttcatcaaggacagcctggccaggggcttccagcgctggtacagcatcatcaccatcatgatggaccggatctacctcatcaactcctggcccttcctgctggggaaggtccggggaatcatcgatgagctccagggcaaggcgctcaaggtgtttgaggcagagcagtttggatgcccacagcgtgctcagaggatgaacacagccttcacgccattcctacaccagaggaacggcaacgccgcccgctcgctgacatcgctgacaagtgatgacaacctgtgggcgtgcctgcacacctcctttgcctggctcctgaaggcgtgtggcagccggctgaccgagaagctcctggaaggtgctccgaccgaggataccttggtccagatggagaagctcgctgatttagaagaggaatcagaaagctgggacaactctgaggctgaagaggaggagaaagcccctgtgttgccagagagtacagaagggcgggagctgacccagggcccggcagagtcctcctctctctcaggctgtgggagctggcagccccggaagctgccagtcttcaagtccctccggcacatgaggcaggtcctgggtgccccttctttccgcatgctggcctggcacgttctcatggggaaccaggtgatctggaaaagcagagacgtggacctcgtccagtcagcttttgaagtacttcggaccatgcttcccgtgggctgcgtccgcatcatcccatacagcagccagtacgaggaggcctatcggtgcaacttcctggggctcagcccgcacgtgcagatccccccccacgtgctctcctcagagtttgctgtcatcgtggaggtccacgcagccgcacgttccaccctccaccctgtggggtgtgaggatgaccagtctctcagcaagtacgagtttgtggtgaccagtgggagccctgtagctgcagaccgagtgggccccaccatcctgaataagattgaagcggctctgaccaaccagaacctgtctgtggatgtggtggaccagtgcctcgtctgcctcaaggaggagtggatgaacaaagtgaaggtgctttttaagttcaccaaggtggacagtcgacccaaagaggacacacagaagctgctgagcatcctgggtgcgtccgaggaggacaatgtcaagctgctgaagttctggatgactggcctgagcaagacctacaagtcacacctcatgtccacggtccgcagccccacagcctcggagtctcggaactgacccgtcacacacacctgcctaaagacagggatggctgtccacaggatcctccagccccgtgagagggactgtcccttgagtttctcaactgctggaaggagctgtgtcccagcaaggaagggaaaccatcagggctgggctcggccctgtcaggtttggggcctgtgtgcttcccagactctccctccagccgttggaatcgctgaagatggcaatgaaaggcggagggatgatgggctctctctgtgttcaaactccttggagagacgactaggaggacagcttgcctcccaggccccttgtggacttagactcaaaacccgcaggagaaacaggtccgactcagtatgcagtcgcaataacatgtctgctcccgaggttaacattcaagcgtttctactttgaaattcagcaagagtttctgggccttatgtttgagggtaccttttgctgcagttgtgaatattcagtacattgccagctcttggtcactgagtgattgagttagggctccgcaagagactttggggagtgaagtggatctcttcctcatcttctggtcctctgaaatgtgtgttctgaagccatggggctcgtcttctggggtgttcccctgcaggtgctggtgaaggtaacctggggcttaatgatggagtccctgatcatttttgcacaagacaggttgctgaggggtcggcaagcatctgacttgcccaatcccctggatatggtgagccccgccatgcttttattctgtatcgcttttgtctttattgctgctttcaacatttacgtttggttacagttaactattttcggagtgtggtgattgaagacaatttcatcatcccactgtacttttttttttgagagggagtttcactcttgttgcccaggctggagtgcaatggcacgatcttggctcactgcaacctctgcctcctgggttcaagcaattctcctgcctcagcctccagagtagctggaactacaggtgcccgccactatgcccagctaatttttgtattttttagtagagacggggtttcaccgtgttggccgggctggtctcaaactcctgacctcaggtgatccacccacctcagcctcccaaagtgctgggattacaagcgtgagccactgtgcctggcccttttttttttttttttttttttttttaaagagatggcatcttgctatgtcgtccaggctggtcttgaactcctgagttcaagcagtcctcctgcttcaacatacagctacaggtaccccccactatacatttttaataaggattcatggctcagagggattttctgatggttttgctgatttgtttctagtttttttgtgtttatatttaacatgaagaccaagtttatataactaggtatctgtataatgcaacaacattggaacacaataaagatgtatttttgtaaaaaaaaaaaaaaaaaaaaaaaaaaaaaaaaaaaaaaa

SEQ ID NO: 56069 - DNA, 7542 bp, Homo Sapiens
aagcaatcgaaagaagatggccgctcccacgattgtgggggaggtctccaccggggaggggcagaggaaattcggtcgaaaaagagataaagttgaaggaaataaaattggcacggagtctgggaaagtagtttccctaaaggagtcttagaaatagggttggtctggaacctaaggggcggagccgacgcgtagagccgctttgcgcgtgcgcatcacctaggcggttagatttgaatacttcactgaggcgagccgggcgttgtgagcggactgctagaggcggctgtctgtttccgctctaaggaaactcagagcgtgtggaccccaaacaagtctgcgcaaaatttgtcgaggaggtttgccgcggcagaaaagttttcttcaaaaatggatggggtgtcttcagaggctaatgaagaaaatgacaatatagagagacctgttagaagacggcattcttcaatattgaaacccccaaggagtcctcttcaggaccacagaggtgggaatgaaagagttcaggaatccaatgctttgagaaataagaaaaactctcgtcgagtcagctttgcagatactataaaggtattccagacggagtctcatatgaaaatagtgagaaagtcagaaatggaaggctgcagtgcaatggtgccatctcagctgcaacttctgcctcctgggtttaagcgattctcctgcctcagcctcccagaaacagaaacaggagaaaatcttcttttgatacagaataagaaattagaagataattactgtgaaattactgggatgaacacattgctttctgctcccattcatacccagatgcaacagaaggagttttcaattatagaacatacccgtgaaaggaaacatgcaaatgaccagacagtcattttttcagatgaaaaccagatggacctgacatcaagtcacactgtaatgattaccaaaggccttttagataatcccataagtgaaaagtccaccaagatagataccacatcatttctagctaatttaaagcttcacaccgaggactcaagaatgaaaaaagaagtaaatttttccgtggatcaaaacacttcttcagaaaataaaatagatttcaatgacttcataaaaagattgaaaacaggaaaatgtagtgcttttcctgatgtgcctgataaagaaaattttgagatacctatttattccaaggaaccgaacagtgcctcttctacacatcaaatgcatgtatctcttaaggaagatgaaaataacagtaatattactaggctctttagagaaaaagatgatgggatgaatttcacccagtgtcatacagccaatattcagacattgattcccacatccagtgagaccaactcacgggaatctaaaggtaatgatattacaatttatggcaatgactttatggacttgacatttaaccacactttgcagatcttacctgcaacaggtaatttttctgaaatagaaaatcaaactcagaatgccatggatgtaacaacaggttatggaactaaagcttcaggaaataaaacagtttttaagagtaaacaaaatactgcttttcaagacctttccataaactctgcagacaaaatacatattaccagaagtcatattatgggggcagaaactcacatagtctcacagacttgtaatcaggatgccagaatattagccatgaccccagaatctatatattctaatccatctattcaaggttgtaagactgttttctattctagttgtaatgatgccatggaaatgaccaaatgtctctcaaatatgagagaggagaaaaatttgctaaagcatgacagtaattatgctaaaatgtattgcaatccagatgctatgtcttctctcacagagaaaactatttattccggagaggagaacatggacattaccaagagtcatacagttgcaatagataatcaaatttttaaacaagatcaatcaaatgtgcaaatagcagctgcaccaacacccgaaaaagaaatgatgctccaaaatcttatgaccacatcagaagatgggaaaatgaatgtaaattgtaactcagttcctcatgtatctaaggaaagaatacagcagagcctgtcaaatcctttgtctatttcattgactgatagaaagactgaactcttatcaggtgaaaatacggatttgactgaaagtcacacaagtaacttaggaagtcaggttcctcttgcagcttataatctagcaccggagagtaccagtgaatctcactctcagagcaaaagctcttcagatgaatgtgaagaaattaccaaaagtcgtaatgaaccatttcagcgatcagacataatagccaaaaacagcttaaccgacacctggaacaaagacaaagattgggttttgaagattttgccctaccttgataaagattctcctcagtcagctgattgtaatcaggagatagcaacaagccataatatagtctactgtggtggagttcttgataaacaaataactaatagaaatacagtatcatgggaacaatctttgttttctaccacaaagccattattttcatcaggacagttctctatgaaaaatcatgatactgctataagtagtcatacagtgaaatctgtactaggccagaattctaaactggctgagccactgaggaaaagtttaagcaatcccacacctgactattgccatgacaagatgattatatgttcagaggaagagcaaaatatggatctaacaaagagccacactgttgtcattggatttggtccttctgaactacaagaacttggtaaaactaatttagaacacactactggccagctaacaacaatgaacagacagatagctgtaaaagttgaaaaatgtggtaaaagtcccatagaaaaaagtggagtgcttaaatctaactgtattatggatgtgttagaggacgaaagtgtacagaaacctaaatttccaaaggaaaagcaaaatgtcaaaatttggggaaggaaaagtgttggtggaccaaaaattgataagacgattgtattttcagaagacgataagaatgatatggatatcactaagagttatacaatagaaataaaccatagacctttattagagaaacgtgattgtcatttggtgccattggcaggaacttctgaaactattttatatacatgtgggcaggatgacatggagatcactagaagtcacacaactgccttagaatgtaaaactgtctcaccagatgaaataactactaggcctatggacaaaactgtagtgtttgtagataatcatgttgaactagaaatgacagagtcccatactgttttcattgactaccaagaaaaggaaagaacagacagacctaactttgaactatcccaaaggaaaagcctaggaacaccaacagtgatatgtactcctactgaggagagtgttttctttccaggaaatggtgaaagtgaccgtctagtagcaaatgacagccagctaacccctctggaggaatggtctaataataggggccctgtagaggtagctgataacatggaattgtctaaatcagccacttgcaaaaacatcaaagatgtacaaagtcctggatttctgaatgaacctctatcaagcaaaagtcagagaagaaaaagccttaagctaaaaaatgacaagaccattgtattttcagagaatcataaaaatgatatggatattacccagagttgtatggtggaaatagataacgaaagtgccctggaggataaagaggacttccatttggcaggggcttctaaaactattttgtattcatgtgggcaggatgacatggagatcactaggagtcacacaactgccttagaatgtaaaactctcctgccaaatgaaatagctattaggcccatggacaaaaccgtattgttcacagataattacagtgatctggaagtcaccgattcccatactgttttcattgactgtcaagccacagagaaaatacttgaagaaaaccctaaatttggaataggaaaaggaaaaaacttgggtgtttcctttcctaaggataatagctgtgttcaagaaatcgctgaaaaacaagcactggctgtaggaaacaaaatagttcttcacaccgagcaaaagcaacaactctttgctgctactaatagaactactaatgaaatcatcaaatttcatagtgctgctatggatgaaaaggtcatagggaaagttgtagaccaggcctgtacattggaaaaagcgcaagttgaaagctgtcagttaaataatagagatagaagaaatgtggactttacaagtagtcatgcaactgctgtttgtggatccagtgataattattcctgtttaccaaatgttatttcctgtactgataatttggagggtagtgccatgctcttatgtgataaagatgaggaaaaagccaattattgcccagtgcaaaatgatcttgcttatgcaaatgattttgccagtgaatattacttggaatctgagggacagcctctctctgctccttgtcctttgttagagaaggaagaagttattcaaaccagtaccaaaggacagttagactgtgttataacactgcacaaagatcaagatctgattaaggatccacgaaatctattggctaatcaaactttagtatatagtcaagatctgggggagatgactaaacttaattcaaagcgagtatcttttaagcttccaaaggatcaaatgaaagtctatgttgatgacatttatgttattcctcagcctcatttctcaaccgaccaacctccattacctaaaaaaggacagagtagtatcaataaagaagaagtaatactgtctaaagctggaaataagagtttaaatattatagaaaattcctctgcacccatatgtgaaaacaagcccaaaatactcaatagtgaggaatggtttgctgcagcctgtaaaaaagaactgaaggaaaatattcaaacaactaactataatacagctctagatttccacagtaactcagacgtaactaagcaagtcattcaaactcatgtcaatgctggagaagcaccagatcctgtaattacatctaatgttccatgttttcatagtatcaaaccaaatctgaataatttgaatggaaaaactggagagtttttagcctttcaaactgttcatctaccaccccttccagagcaattacttgaattaggaaataaggcacacaatgatatgcatatagtgcaagctacagaaatacataatattaacataatctccagcaatgctaaagatagtagagatgaggaaaataaaaagtctcataatggagctgaaaccacctctctaccgccaaagacagtttttaaagataaagtaaggagatgttctttgggaatctttttgcctagattgcccaacaagagaaattgtagtgtcactggtattgatgacctggaacagattccagcagacacaactgatataaatcacttagaaactcagccggtctctagcaaagattcaggcattggatctgttgcaggtaaactgaacctaagtccttctcaatatataaatgaggaaaatcttcctgtatatcctgatgagatcaattcttcagactctattaacatagaaactgaggaaaaggccttgattgagacataccaaaaagagatttcaccatatgaaaataaaatgggaaaaacttgcaatagccaaaaaagaacgtgggtacaagaagaagaagatattcataaggagaaaaaaatcagaaaaaatgagattaagtttagtgatacgacacaagatcgggagatttttgatcaccatactgaagaggatatagataaaagtgctaacagtgtattgataaaaaacctgagcaggaccccatctagttgcagcagctctctggattcaatcaaggctgatgggacctctctggacttcagcacttaccgcagtagtcaaatggaatcacagtttctcagagatactatttgtgaagagagcttgagggagaaactccaagatgggagaataacaataagggagttctttatacttctccaggtccacatcttgatacagaaaccccgacagagcaatctcccaggcaattttactgtaaacacaccacctactccagaagacctgatgttaagtcaatatgtttaccgacccaagatacagatttatagagaagattgtgaggctcgtcgccaaaagattgaagaattaaagctttctgcatcgaaccaagataagctgttggttgatataaataagaacctgtgggaaaaaatgagacactgctctgacaaagagctgaaggcctttggaatttatcttaacaaaataaagtcatgttttaccaagatgactaaagtcttcactcaccaaggaaaagtggctctgtatggcaagctggtgcagtcagctcagaatgagagggagaaacttcaaataaagatagatgagatggataaaatacttaagaagatcgataactgcctcactgagatggaaacagaaactaagaatttggaggatgaagagaaaaacaatcctgtggaagaatgggattctgaaatgagagctgcagaaaaagaattggaacagctgaaaactgaagaagaggagcttcaaagaaatctcttagaactggaggtacaaaaagagcagacccttgctcaaatagactttatgcaaaaacaaagaaatagaactgaagagctactggatcagttgagcttgtctgagtgggatgtcgttgagtggagtgatgatcaagctgtattcacctttgtttatgacacgatacaactcaccatcacctttgaagagtcagttgttggtttccctttcctggacaagcgttataggaagattgttgatgtcaattttcaatctctgttagatgaggatcaagctcctccttcctcccttttagttcataagcttattttccagtacgttgaagaaaaggaatcctggaagaagacatgtacaacccagcatcagttacccaagatgcttgaagaattctcactggtagtgcaccattgcagactccttggagaggagattgagtatttaaagagatggggaccaaattataacctaatgaacatagatattaataataatgaattgagacttttattctctagctccgcagcatttgcaaagtttgaaataactttgtttctctcagcctattatccatctgtaccattaccttccaccattcagaatcacgttgggaacactagccaagatgatattgctaccattctatctaaagtgccactggagaacaactacctgaagaatgtagtcaagcaaatttaccaagatctgtttcaggactgccatttctaccactagacccttggaccaccattggaacaaccaagcagaatgtacttgatattatttcagggtcccattgctgttcagcctttgtttttacgtcattacaagctgagtaaaattccttctgatgatgtt

SEQ ID NO: 56070 - DNA, 3261 bp, Homo Sapiens; identical to SEQ ID NO: 31048

SEQ ID NO: 56071 - DNA, 3000 bp, Homo Sapiens
  misc_feature (1757)..(1757): n is a, c, g, or t
acgcttccatagcaaagggttgcccttggctacaggaggacgcgggctggcaggcttggttcctggcgagtttctaagcccccgcctgcggtctgaggcaccggctgaaccatgtcggagatcctgtgccagtggctcaacaaggagttgaaggtgtcccggaccgtgagtcccaagtcatttgcaaaggcattttccagtggctatctacttggagaagttctacacaagtttgaacttcaggatgatttttcagaatttttggacagcagggtttcaagtgccaaacttaataatttttctcgcttggagccaacacttaaccttctgggtgtgcagtttgatcagaatgtggcccatggcatcatcacagaaaagcctggggtggcaacaaagctgttatatcaattgtacattgctcttcagaaaaagaagaaaagtggactgactggagtggagatgcaaaccatgcaacgtctgacaaatttaagacttcaaaacatgaaaagtgatacttttcaagagagacttagacacatgataccacgtcaaactgatttcaatctgatgcggattacatacaggtttcaagaaaaatataaacacgtgaaagaagatcttgcccatttgcattttgagaaacttgaaagatttcaaaaactcaaggaagagcaaagatgttttgatattgaaaagcaatacttaaacagaagacgacaaaatgaaataatggccaaaatccaagcagctattatacagattcctaaacctgcatcaaatcgtactttgaaagcactcgaggcccaaaaaatgatgaaaaagaaaaaagaggcagaagatgtggctgatgaaattaagaagttcgaagcattaataaaaaaggatctccaagcaaaagaaagtgcatccaagacttctttagatacagcaggccagacaaccaccgatttgttaaatacttactcagatgacgagtacattaaaaaaatccagaagcgccttgaagaagatgcttttgcacgagagcaaagggagaaaagacggcggaaattgttaatggaccagttaatagcccacgaagcacaagaggaggcttatcgggaggaacagctgattaaccggctgatgcggcagtcccagcaggagcgcaggattgccgtgcagctcatgcatgttcggcatgaaaaggaagttttatggcaaaacagaattttcagagaaaaacaacatgaggaaagacgacttaaagatttccaggatgctcttgatcgagaagcggctttggcaaaacaagccaagattgactttgaagaacaattccttaaagaaaagagatttcatgatcagattgctgtggaaagagctcaagctcgttatgaaaagcattattcagtatgtgcagaaattttggatcaaatagttgatttgtccactaaagtggcagactatcgaatgttgacaaataatctgattccgtataagttgatgcatgattggaaggaactattttttaatgcaaaacccatatatgaacaagcctctgttaagacactacctgctaacccctcaagagaacaacttacagaactggagaaaagggacttgctagataccaatgattatgaagaatataaggtacctactgatatgaaataattagaatgctacataataaatcctttttctttaacattaattttgtgatattccttatttcatttctactaataaaaatagacatgttttgtttgcatttncccttgttttaatttgtatgtttgtactactttttagatgcttaaactatacataagctattatctattgttcctagtaatcttaggggagtggtctgaaaaaacatcaagcatagtaattgtctgggtagacagatttcagaatttttaaaatgctttaatttatttattagcatttttctttgtatgggctgtgtacttttgcttcaaaaaccattgttaaaaagtatttcttttgtaatcaatctaaataatagactttttttacaggcaaaatgaaagaggaggaagtctgggttttatgaatagcatagattcaaacaatcttttattcaaagattgaaataaaaagtatcgggtgccaactgtgatttttagaagaactgttgtaaagcctttgagattagacagactagagctacattactgaaattgccaactactaactgtgtgaccttaggtgaccagttcattaagggctaatagatttccatttttcaattaatggaaagggaatgctactatacctacttcatttaaaataacatgagttaaacacttagctgagtgcacttcatgttggatgcatataatacatatccatttctttcctcaccatcctactctccccatcccactccatctcacccttagaagtaaaggtgtaacaatcatagcttttggatagaaattttgagtggatcaacagcaatggaatgaggagtgaggctttttattagaaaaattacaaaatgagtcccggaaggtcagtaagtgcaacatgaaaaaaatctatgaaaagattatttgacctaattattcactgatagtacatactcaacaaaggtttgtgggacaaagggtgaataaaatgaatgaattacaatgaacaaagaaaagtgcaaaataacactaacaagtaaatattacaagaagataaccttgtggttaaaagataaggaaaaatatgagattatgagaaattaaatgtatactatattttaattaaatgaatctgtatttgtagcactaagagaattattattaaggattgactagaaccttaaaagatatatgtggatgtttgttttgtacggttgtaaaatatactagacctattacatccacctaaagtataatgccatgtaagaaaatgctttgacagtatcaacctgtgttaaggtatttctttccattgtaaattaaaagtcattttatttgacagaaaaaaaaaaaaaaaaaa

SEQ ID NO: 56072 - DNA, 2142 bp, Homo Sapiens
cggggggggggcggtgtgaaaggtgaccctcatttcgtttggaagcggtaacacttcggggtcacatctcagtccagttcctccagaataggcgctgctgtccgccccttccctgccccacgaaagaacaggtagccccaatcttgagacacgctcctccaccttcgaaatcttctcggtcccggttccccaggactcagccttcacagaggccaacttcaggtccgccactatcccaggattcccgactcccggtttcctgtccttctcccctcccagctcctggcgcctgcgatagcggcaagatggcggaccgtggcggcgtgggtgaagccgcagctgttggagcgtctcctgcatctgtccctggcctaaacccgacgctaggctggagggagcgactgcgggccgggctggcggggactggggcctcgttgtggttcgtggcggggctggggctgctttacgccctgaggatccctttgaggctgtgtgagaatttggcagcggtgactgtatttttaaattcattgacacccaaattctatgtggcacttacagggacctcttcattgatatcaggactaatatttatatttgaatggtggtacttccataagcatggcacatcttttattgagcaagtatctgtaagccatttgcaaccactgatgggaggaacagagagcagcatttcagaaccaggttctccttcgaggaacagagaaaatgaaaccagcagacagaatttgtcagaatgtaaggtatggagaaaccctctaaatcttttcagaggagcagaatataggagatacacttgggtgactggtaaagagccacttacatactatgacatgaacctgtcagctcaggaccatcagacctttttcacctgtgacacagattttttacgtccttcagacacagttatgcagaaggcttggagggaaagaaatcctccagctcgaatcaaagcagcctatcaagctttagaattaaacaatgactgtgccactgcatatgttctactggctgaggaagaagcaacaactattgtagatgctgaaaggttatttaaacaggcactcaaggcaggagaaacaatttataggcagtcacagcagtgccagcaccaaagtcctcagcatgaagctcaactgaggagagataccaatgtactggtatatattaaaagaagattggcaatgtgtgcaagaaaattaggaagaataagagaagcagtaaaaataatgagagatttgatgaaagaatttcctcctcttaccatgttgaacatccatgaaaatctcttagaatcacttttagaattacaggcctatccagatgttcaggcagtcctagcaaaatatgatgatataagccttccaaagtcagcagcaatctgttacacagcagcactgttgaagacaaggactgtttcagaaaaattctctccagaaacagcctccagaagaggattaagcacagcagaaattaatgccgtggaagcaattcatagagctgtggaatttaatcctcatgttccaaaatatttattagagatgaaaagtttaattttacctccagaacacattctgaaacggggtgatagtgaagcaattgcctatgctttctttcatcttcagcactggaaacgaatagaaggtgctcttaatctgttacagtgtacatgggaaggcacttttagaatgattccatacccgttagagaaaggacatctattttacccttatcccagctgcacagagacggctgatagagagctattacctacctttcatcatgtttctgtttacccaaaaaaggagcttcctttgttcatccatttcacagcaggattttgctcttctacagcaatgatagccattctcactcaccagtttcctgaaatcatgggtatttttgctaaagctgtaagtatgatctcaaggacttgtgtagattatttgtaaaacacacaagaaaccatctctgatctgcctgtgctaacccagctgaacaatggaagatatttgttgtaaattaaaggaattgatttgtatatagttgctgccataaatacatcaaacataaaaaaaaaaaaaaaaaaaaaaaaaaaaaaaaaaaaaaaaaaaaaaaaaa

SEQ ID NO: 56073 - DNA, 5106 bp, Homo Sapiens; identical to SEQ ID NO: 31190

SEQ ID NO: 56074 - DNA, 3368 bp, Homo Sapiens
agttgtttgggttgagttcaggagaagcatggccaggtcgagtccgtacctgcgccaacttcagggacctctgctcccacccagggatctggtggaggaggacgacgactacctaaacgacgacgtggaggaggatgaagagtccgtgttcatcgacgccgaggagctctgcagtgggggcgtaaaggctggcagcctccccgggtgcctccgcgtttctatttgtgatgaaaacacacaagagacatgtaaagtgtttggacgttttccgataacaggtgcttggtggagagtgaaggtacaagtaaagcctgtggtgggatcaaggagctatcaatatcaagttcaaggatttccgtcttactttttgcagtctgatatgtcaccaccaaatcaaaaacatatctgtgctctctttcttaaagagtgtgaggtctccagtgatgatgttaataaatttttaacatgggtaaaggaggtatcaaactacaaaaacctaaactttgaaaatcttagggaaacactaagaactttccacaaggaaactggaaggaaagatcaaaagcagcctacacagaatggtcaggaagagttgttcctagacaatgagatgagtcttcctctggaaaacacaattccatttagaaatgtaatgacagctttgcagtttccgaagataatggaattccttccagttcttctgcctcgacactttaaatggatcatagggtcaggttctaaagagatgttgaaagagatagaagagattttaggtacacatccgtggaaacttggatttagtaaaataacctacagagagtggaaactcctgcgatgtgaggcaagttggatagcattttgtcagtgtgagtctcttctccagctgatgactgatttggagaagaatgcattaataatgtattccagactgaagcagatatgtagagaagatgggcacacatatgttgaagtgaatgacttaactttgacattgtcaaatcatatgtcatttcatgctgcttcagagtctctgaagtttttgaaggatattggtgtggtgacatatgagaagtcctgtgtcttcccttatgacctttaccatgctgaaagagccatcgccttttcaatttgtgacctgatgaagaaacctccttggcatttatgtgtcgatgtcgaaaaggtgcttgcctctattcacaccacaaaacctgagaattcaagcgatgatgcattgaatgagagcaaacctgatgaagtaagattagaaaatcctgtggatgttgtggacacacaggacaatggtgaccatatttggactaatggtgaaaatgaaattaatgcagaaataagtgaagttcagctggatcaggatcaggttgaagttccactggatcgggatcaggtggctgctttggaaatgatttgctccaatcctgtgacagtcataagtgggaaaggtggatgtgggaagaccacaatcgttagccgtctttttaagcatatagagcagttggaagaaagagaagtaaaaaaagcctgtgaagattttgaacaagaccagaatgcttcagaagaatggattacctttactgagcaaagtcaactagaggcggacaaggctatagaagttttgctcacagcacctacagggaaagcagctggcttactaagacagaaaactggtcttcatgcctacacactgtgtcaggtcaattatagcttctattcatggactcaaacaatgatgaccacaaacaaaccatggaaattttcttcggttagagttctggttgtggatgaagggagtttggtatctgtaggaatcttcaaatcggtcttaaatttattgtgtgagcactccaaactttctaagcttattatccttggtgacattagacagttacccagtattgaacctggtaacttgctgaaagatctttttgagactcttaagtcaagaaattgtgctattgagctaaagacaaaccatagagcagaatctcagctcattgtggacaatgctacaagaatctcaagacgccaatttccaaaatttgatgcagaactaaatatctctgataatccaacattacccatctcaattcaagataagacatttatttttgtcaggctcccagaagaggatgccagttctcagtcatctaaaactaatcatcactcttgtttatattctgcagttaaaactttactacaagaaaataacttacaaaatgcaaaaacatcacaatttattgcatttagaaggcaagactgtgatctaattaatgactgctgctgcaaacactacacaggccacctcaccaaagaccatcagagtagacttgtttttggaattggtgataaaatttgttgtaccaggaatgcatacctctcagacttactacctgaaaatatctctggaagtcagcaaaataatgatctagatgccagtagtgaagacttttctggtacgcttcctgattttgctaaaaataagcgtgactttgaaagtaacgttcgactgtgcaatggagagatatttttcataacaaatgatgtaactgatgtaacttttggaaagagaagatctttgaccattaataatatggctggcctggaagtaactgtggattttaagaaactaatgaaatattgtcgcataaaacatgcatgggcaagaactattcacacttttcaggggtccgaggagcaaacagttgtctatgtggtggggaaggcgggccgccagcactggcagcatgtctacaccgccgtgaccaggggccgctgccgagtgtatgtgattgcagaggagtctcagctccggaatgccattatgaaaaacagttttcctagaaaaactcgtttgaaacatttcttgcaaagtaagctctcctctagcggcgcacctccagcagattttccgtccccacggaagagctctggagacagtggaggacccagcacaccgtcagcatctccactccctgtagtcacagaccacgccatgacaaatgatgtcacctggagcgaggcctcttcgcctgatgagaggacactcacctttgctgaaagatggcaattatcttcacctgatggagtagatacagatgatgatttaccaaaatcgcgagcatccaaaagaacctgtggtgtgaatgatgatgaaagtccaagcaaaatttttatggtgggagaatctccacaagtgtcttccagacttcagaatttgagactgaataatttaattcccaggcaacttttcaagcccaccgataatcaagaaacttagttttatttcaaattgttccgagtaactatgtttttctattggagacaaaatgaacatcgtaacgtcaaagtaccaa

SEQ ID NO: 56075 - DNA, 3012 bp, Homo Sapiens; identical to SEQ ID NO: 31000

SEQ ID NO: 56076 - DNA, 2468 bp, Homo Sapiens
attaaaggctagtctcaggctggggatggctcctgtctatttcttctctctcagagactgcagatggcttttccctgccgcaggtccctgactgccaagactctggcctgcctcctggtgggcgtgagtttcttagcactgcagcagtggttcctccaggcgccaaggtccccgcgggaggagaggtccccgcaggaggagacgccagagggtcccaccgacgctcccgcggctgacgagccgccctcggagctcgtccccgggcccccgtgcgtggcgaacgcctcggcgaacgccacggccgacttcgagcagctgcccgcgcgcatccaggacttcctgcggtaccgccactgccgccacttcccgctgctttgggacgcaccggccaagtgcgccggcggccgaggcgtgttcctgctcctggcggtgaagtcggcgcctgagcactacgagcgacgcgagctcatccggcgcacgtgggggcaagagcgcagctacggcgggcggccagtgcgccgcctctttctattgggcaccccgggccccgagaacgaggcgcgcgcggagcggctggcggagctggtggcgctggaggcgcgcgagcacggcgacgtgctgcagtgggccttcgcggacaccttcctcaacctcacgctcaagcacctgcacttgctcgactggctggctgcacgctgcccgcacgcgcgctttctgctcagcggcgacgacgacgtgttcgtgcacaccgccaacgtagtccgcttcctgcaggcgcagccacccggccgccacctgttctccggccagctcatggagggctccgtgcccatccgcgacagctggagcaagtacttcgtgccgccgcagctcttccccgggtccgcttacccggtgtactgcagcggcggcggcttcctcctgtccggccccacggcccgggccctgcgcgcggccgcccgccacaccccgctcttccccatcgacgacgcctacatgggcatgtgtctggagcgcgccggcctggcgcccagcggccacgagggcatccggcccttcggcgtgcagctgcctggcgcacagcagtcctccttcgacccctgcatgtaccgcgagttgctgctagtgcaccgcttcgcgccctacgagatgctgctcatgtggaaggcgctgcacagccccgcgctcagctgtgaccggggacaccgggtctcctgaggccagttgggcggcttcagccccgggcctccaaccatgtccatgctgagaaggcagctttcccgctctgggtaccttacgtcctgcccagctctgtgcacctgaaccccagctgcgcactgaaatcagctggggtggggggtgtggaaaatgcctacatcctggctccatctcccgaagtttcgatttgattagtctggggtggacccagacatgttaagtattttttaagttcctccagtgatgcgaatgtgcagctaggcctgaggaccactcggctagactatctcttcatcctcgcaaagccagctccaccgccctctctgcaagaattccgggcccctcgctcccacactcgggtcctcttgagcagtggagcaagggagacctgggagcgtgggagccaggatcagcgccccctgccatgtgcctacaaatgtcagttgtgacttccactgtttacaagtgagtggagctggagctgggctgacagtatcaggtggatcccgcttccccctcccccaagaagtcagccaacacgcagctgaggcgcatgtggtggccttcttcccaccactaccccagtacaccgtgaggtagaaatcttcaccgtgcaaagtggaaaccagaggcccggtcagacagtgactaatccagggccgtggcattcccagacagcacaccactgtggtcccctccacactcaccccaaccaaagctaatggcctagttgggtcctgcccgccaataatcacccccacgggtcagagacaggctccttgccggggtctgggcctcaggctcagtgggccttggacaacccagcagggagttccggggagtccgaagtggagaaaggctggtgggaacatggaggccagtgttggggagcctgtggaggcaggtgtgtagaattgtgttcgggaggtgggggatctgagaccgaagtggacagtggttaagattgtggggccgggcgaggtggctcacgcctgtaatcccagcactttgggaggctgaggaggtcggatcatgaggtcaagagttcgagaccagcctggccaatatggtgaaaccccgtctctattgggagtacaaaaattagccggccatagtggctcgtgcctgtaatctcagctatttgggaggctgaggcaggagaatcacttgaacctgggaggcggaggttgcagtgagccgagatcgtgccactgcactccagcctgggcgacagagcaagactgcatctc

SEQ ID NO: 56077 - DNA, 1200 bp, Homo Sapiens
gaaagtggagacggacctgagcccgaggaagaggcaggcagaggctgaggctgattccaccccagcctgcctggacaaccctccttagccgcagccccttccagttccctaggggttctgcccctccccctctctggggcaccagccccccagggtcctgcatcccaccatgtcgatggctgtggaaacctttggcttcttcatggcaactgtggggctgctgatgctgggggtgactctgccaaacagctactggcgagtgtccactgtgcacgggaacgtcatcaccaccaacaccatcttcgagaacctctggtttagctgtgccaccgactccctgggcgtctacaactgctgggagttcccgtccatgctggccctctctggctccacagactccccagcctcactgtcggggggcactggtctccttgtccggctgatgtctataaagggcccctgtgaagggaggcgtcttgcaagttgcaggttgagcgtccgctgtaaggaggcggtgtgtgtgcagggtatattcaggcctgccgggcactcatgatcaccgccatcctcctgggcttcctcggcctcttgctaggcatagcgggcctgcgctgcaccaacattgggggcctggagctctccaggaaagccaagctggcggccaccgcaggggccctccacattctggccggtaactgggggaaggtgatggggcgggggtccccctcaaccgcagacttcaggctgctttgtcctcatctaatctcctctccaattcccactcctcatgctcacctcccctaccctgctgcatggacacctgctcacccctgcctcatctgtactccccagatctcctggctgcaaatcagcccatcggcagtgtttcttgagctcccagtaggggctggccacggccaggtgtgggagggacttcgaagataagagtgagcggctgcctccgggagcttacatcctagctggggagcagagttagggtgcacgctatggcgcacacacacagtgcacgtccacagtgccataccacggggcatggtggctcatgcctgtaatcccagcactttggtaggctgaggtgggtggattacttgaggtcaggagttcaaaaccagcctggccaacatggtgaaaccctgtctctactaaaaatcccaaaaaaaaaaaaaaaaaaaaaaaaaa

SEQ ID NO: 56078 - DNA, 1792 bp, Homo Sapiens
ataggtggctgcagaggcgaggtgacggcgcgtgcggaacgaactctgcacccccaggaatggggagcgctggcttttccgtgggaaaattccacgtggaggtggcctctcgcggccgggaatgtgtctcggggacgcccgagtgtgggaatcggctcgggagtgcgggcttcggggatctctgcttggaactcagaggcgctgacccagcctggggcccgtttgctgcccacgggaggagccgccgtcagggctcgagatttctgtggctcctcaagatattggtcataatcctggtacttggcattgttggatttatgttcggaagcatgttccttcaagcagtgttcagcagccccaagccagaactcccaagtcctgccccgggtgtccagaagctgaagcttctgcctgaggaacgtctcaggaacctcttttcctacgatggaatctggctgttcccgaaaaatcagtgcaaatgtgaagccaacaaagagcagggaggttacaactttcaggatgcctatggccagagcgacctcccagcggtgaaagcgaggagacaggctgaatttgaacactttcagaggagagaagggctgccccgcccactgcccctgctggtccagcccaacctcccctttgggtacccagtccacggagtggaggtgatgcccctgcacacggttcccatcccaggcctccagtttgaaggacccgatgcccccgtctatgaggtcaccctgacagcttctctggggacactgaacacccttgctgatgtcccagacagtgtggtgcagggcagaggccagaagcagctgatcatttctaccagtgaccggaagctgttgaagttcattcttcagcacgtgacatacaccagcacggggtaccagcaccagaaggtagacatagtgagtctggagtccaggtcctcagtggccaagtttccagtgaccatccgccatcctgtcatacccaagctatacgaccctggaccagagaggaagctcagaaacctggttaccattgctaccaagactttcctccgcccccacaagctcatgatcatgctccggagtattcgagagtattacccagacttgaccgtaatagtggctgatgacagccagaagcccctggaaattaaagacaaccacgtggagtattacactatgccctttgggaagggttggtttgctggtaggaacctggccatatctcaggtcaccaccaaatacgttctctgggtggacgatgattttctcttcaacgaggagaccaagattgaggtgctggtggatgtcctggagaaaacagaactggacgtggtaggcggcagtgtgctgggaaatgtgttccagtttaagttgttgctggaacagagtgagaatggggcctgccttcacaagaggatgggatttttccaacccctggatggcttccccagctgcgtggtgaccagtggcgtggtcaacttcttcctggcccacacggagcgactccaaagagttggctttgatccccgcctgcaacgagtggctcactcagaattcttcattgatgggctagggaccctactcgtggggtcatgcccagaagtgattataggtcaccagtctcggtctccagtggtggactcagaactggctgccctagagaagacctacaatacataccggtccaacaccctcacccgggtccagttcaagctggccctccactacttcaagaaccatctccaatgtgccgcataaaggtgtgagggcataggagaaacactaggctg

SEQ ID NO: 56079 - DNA, 2850 bp, Homo Sapiens
actgctctcccatcccagtccctggaaatccacccacttggcccagctcaccccaactccaacccactgggacccagtctccaggggcctgactgtgggcggcagccactcctgagtgagcaaaggttcctccgcggtgctctcccgtccagagccctgctgatggggaagtccgaaggcccagtggggatggtggagagcgccggccgtgcagggcagaagcgcccggggttcctggagggggggctgctgctgctgctgctgctggtgaccgctgccctggtggccttgggtgtcctctacgccgaccgcagagggaagcagctgccacgccttgctagccggctgtgcttcttacaggaggagaggacctttgtaaaacgaaaaccccgagggatcccagaggcccaagaggtgagcgaggtctgcaccacccctggctgcgtgatagcagccgccaggatcctccagaacatggacccgaccacggaaccgtgtgacgacttctaccagtttgcatgcggaggctggctgcggcgccacgtgatccctgagaccaactcaagatacagcatctttgacgtcctccgcgacgagctggaggtcatcctcaaagcggtgctggagaattcgactgccaaggaccggccggctgtggagaaggccaggacgctgtaccgctcctgcatgaaccagagtgtgatagagaagcgaggctctcagcccctgctggacatcttggaggtggtgggaggctggccggtggcgatggacaggtggaacgagaccgtaggactcgagtgggagctggagcggcagctggcgctgatgaactcacagttcaacaggcgcgtcctcatcgacctcttcatctggaacgacgaccagaactccagccggcacatcatctacatagaccagcccaccttgggcatgccctcccgagagtactacttcaacggcggcagcaaccggaaggtgcgggaagcctacctgcagttcatggtgtcagtggccacgttgctgcgggaggatgcaaacctgcccagggacagctgcctggtgcaggaggacatggtgcaggttctggagctggagacacagctggccaaggccacggtaccccaggaggagagacacgacgtcatcgccttgtaccaccggatgggactggaggagctgcaaagccagtttggcctgaagggatttaactggactctgttcatacaaactgtgctatcctctgtcaaaatcaagctgctgccagatgaggaagtggtggtctatggcatcccctacctgcagaaccttgaaaacatcatcgacacctactcagccaggaccatacagaactacctggtctggcgcctggtgctggaccgcattggtagcctaagccagagattcaaggacacacgagtgaactaccgcaaggcgctgtttggcacaatggtggaggaggtgcgctggcgtgaatgtgtgggctacgtcaacagcaacatggagaacgccgtgggctccctctacgtcagggaggcgttccctggagacagcaagagcatggtcagagaactcattgacaaggtgcggacagtgtttgtggagacgctggacgagctgggctggatggacgaggagtccaagaagaaggcgcaggagaaggccatgagcatccgggagcagatcgggcaccctgactacatcctggaggagatgaacaggcgcctggacgaggagtactccaatctgaacttctcagaggacctgtactttgagaacagtctgcagaacctcaaggtgggcgcccagcggagcctcaggaagcttcgggaaaaggtggacccaaatctctggatcatcggggcggcggtggtcaatgcgttctactccccaaaccgaaaccagattgtattccctgccgggatcctccagccccccttcttcagcaaggagcagccacaggccttgaactttggaggcattgggatggtgatcgggcacgagatcacgcacggctttgacgacaatggccggaacttcgacaagaatggcaacatgatggattggtggagtaacttctccacccagcacttccgggagcagtcagagtgcatgatctaccagtacggcaactactcctgggacctggcagacgaacagaacgtgaacggattcaacacccttggggaaaacattgctgacaacggaggggtgcggcaagcctataaggcctacctcaagtggatggcagagggtggcaaggaccagcagctgcccggcctggatctcacccatgagcagctcttcttcatcaactatgcccaggtgtggtgcgggtcctaccggcccgagttcgccatccaatccatcaagacagacgtccacagtcccctgaagtacagggtactggggtcgctgcagaacctggccgccttcgcagacacgttccactgtgcccggggcacccccatgcaccccaaggagcgatgccgcgtgtggtagccaaggccctgccgcgctgtgcggcccacgcccacccgctgctcggaggcatctgtgcgaaggtgcagctagcggcgacccagtgtacgtcccgccccggccaaccatgccaagcctgcctgccaggcctctgcgcctggcctagggtgcagccacctgcctgacacccagggatgagcagtgtccagtgcagtacctggaccggagccccctccacagacacccgcggggctcagtgcccccgtcacagctctgtagagacaatcaactgtgtcctgcccaccctccaaggtgcattgtcttccagtatctacagcttcagacttgagctaagtaaatgcttcaaag

SEQ ID NO: 56080 - DNA, 2509 bp, Homo Sapiens; identical to SEQ ID NO: 23763

SEQ ID NO: 56081 - DNA, 1984 bp, Homo Sapiens
ggagttccgggtgggcgtgggcttggcgggccctgcactcggagcagccggctggccccgccgcggccgagcaatgaggagtacaccctccgggccagcgactgtggagggtgtactgggtaccccagcagtgacagcccaccggcgctgcgttcgatttctcgctgggccttagctgccttccctcagggcagggctcgggacctgcagcccgccatgcctgagcctcccaccccctccgttggctcctgtgctgcccgagcctcccggatgagcgccgccccctgctccagggcgcccagtcccatcgaccacccaagggctgaggagtgcgggcgcgcggcgcgggactggcaggcagctccacctgcagccccggtgagggatccactgggtgaagccagctgggctcctgagtctggtgaggacatggagaacctttatgtccagctcaagttgcagtccataggcacttgctttaaccgtgaagaattaccttcagtacttcagtggcctcagggtgaggaattgggagccaccagtgtgacaaataaacctggactctcagcaatgaggaaagaaacagaccaacaagttggggaaagaaagctcacatactgcggtgaccaggtaactctgttcacagaccaagccctcagtcaaatactatcttctgaggagggaagaatcaaggttatgtagacccatacagaattgccactgctaacacactttcatactgcatgacttggatacactccctattgctaacaagaccacagtggaattaaaattgaaaatgaactcccaaaggaagcctcaaaactatgcaaatacatgaaaattaaataatctgcttttgaatgattcttgggttaacaatgaaatcaagatggaaattttaaaaacttttgaaatgaatgaaaatagtgacaaaacatattaaacctctgggatacagcaaaagtggtggtaagaggaaagttcatagagttaaatgcctacatcaaaacatctaaaagagtgcaaacagacagcctaaattcacacctcaaggaactgaagaaataagaacacactaaagccaaagcaggcagaagaatagaaataacaaaaatcagaacagaattaaattaaattgaaacaaaaaagtgtaaaagataaatgaaacaaaaagctggttctttgaaaagataagcaaaatttatagactattaatgagatttaccaagaaaaagagaaaaatcaaataagctctattagaaatgaaattgggacccccacattgaccagaatccgtggacgtggtgaaccaggttatcaagtacaagcctgcagttgcctggcagactggaaagcctctctccatagaggagatagaggtggcacccccaaaggctaatgaagttcgaatcacaatcattgccactgtggtttgccacaccgacacctataccctgagtggagctgatcctaagggttgttttccagtgatcttgggacatgaagttgcttggaattgtggaaagcgttggcgaggaagttactaagctgaagctgagcttcttccatgctccactaaaccatttcttgcatcacagtggagagtcgaagaattccatctcttggaatcactttcaagcagatgtctagcttggattcagccaatgggattcaataaagagagatttaaaagtcagaagaaaacaagaattccagtacagctgtagcaagatgcgcaggcatttggcagacatgacgttggcagcagcatccaagtgagttcctgtgaatcacccgctttgagaattcaagcaactagtgccattgcaggtggctttctcacattcttgaatttttagatctctgaggctagttaacaatctctttgacatatacaaatgcaactttacaagggagaaaaaagcatccaattctctgcattgattttttttcctactcaaaataaattcttagaatgctt

SEQ ID NO: 56082 - DNA, 1066 bp, Homo Sapiens
taaacaggttgttgggggtagaaaagtttggatatcagatcagaaaagtttggatatctcagctcagagccacgatgagagtggggagggagcccgcgcttctcaagctcaaatgcctaggagtcctttggagatggcgttcagatgcagattcttgttccatagatctggctggagcccaaagttctgcagctggcgggctgattcagaaaacatgagttggtgcttttcctctttttgccgccgtactccattgagagtcttagtcatggagggaaacccgaaaaccaccggtgtccgggacagatactctgacgcattctcccggaacaccctggggactgcgagaaagcccctgctggctcactcgtttgctgggatcagttcccatcaggcatgcggctgtgcttcttggtatcgatttgcttcttggtcccatggcttctgcagcccacgtcgggagggcaaggtgtggtgcagcctgagagaagcatgctcctttgcaggaaggagagggaggcgcacaggcgggccttttggagcagaggaggcagaggagtccaagctgggtgcagttcctctgctgcagccctgagctgggcagacaggacacttcgctggcctttcctggcctcatacttgtcactcggtgacactgcgaccagtgtgagcaaacgttcagaaagcacatttaaacactgttacttaaaattgcaacttcacagggccagtattctttttaccatgttccaaatgaggaaaccggggtgctgaatgattaagtgacttatccaagaccacagggcttgcaaatggcaagtgggaggattgtttgagcccaggaatctgagaccagcctgagcaacatgatgagaccccatctctacaaaaaattaaaacattagctgggtgtggtggcgcatacctgtggttccagctacttgggaggctcaggcaggaggattgcttgagcccagtaggtcgaggctgcagtgagctgtgattgtgccactgcactccagcctgggccacagaacaagacttcatctcagaaaaaaaaaaaaaa

SEQ ID NO: 56083 - DNA, 2193 bp, Homo Sapiens; identical to SEQ ID NO: 22605

SEQ ID NO: 56084 - DNA, 2519 bp, Homo Sapiens
gctgggccacagcctggtcctgccgctgcgcccgcccgccatggtgtcccgggaccaggctcacctgggccccaagtatgtgggcctctgggacttcaagtcccggacggacgaggagctgagcttccgcgcgggggacgtcttccacgtggccaggaaggaggagcagtggtggtgggccacgctgctggacgaggcgggtggggccgtggcccagggctatgtgccccacaactacctggccgagagggagacggtggagtcggaaccgtggttctttggctgcatctcccgctcggaagctgtgcgtcggctgcaggccgagggcaacgccacgggcgccttcctgatcagggtcagcgagaagccgagtgccgactacgtcctgtcggtgcgggacacgcaggctgtgcggcactacaagatctggcggcgtgccgggggccggctgcacctgaacgaggcggtgtccttcctcagcctgcccgagcttgtgaactaccacagggcccagagcctgtcccacggcctgcggctggccgcgccctgccggaagcacgagcctgagcccctgccccattgggatgactgggagaggccgagggaggagttcacgctctgcaggaagctggggtccggctactttggggaggtcttcgaggggctctggaaagaccgggtccaggtggccattaaggtgatttctcgagacaacctcctgcaccagcagatgctgcagtcggagatccaggccatgaagaagctgcggcacaaacacatcctggcgctgtacgccgtggtgtccgtgggggaccccgtgtacatcatcacggagctcatggccaagggcagcctgctggagctgctccgcgactctgatgagaaagtcctgcccgtttcggagctgctggacatcgcctggcaggtggctgagggcatgtgttacctggagtcgcagaattacatccaccgggacctggccgccaggaacatcctcgtcggggaaaacaccctctgcaaagttggggacttcgggttagccaggcttatcaaggaggacgtctacctctcccatgaccacaatatcccctacaagtggacggcccctgaagcgctctcccgaggccattactccaccaaatccgacgtctggtcctttgggattctcctgcatgagatgttcagcaggggtcaggtgccctacccaggcatgtccaaccatgaggccttcctgagggtggacgccggctaccgcatgccctgccctctggagtgcccgcccagcgtgcacaagctgatgctgacatgctggtgcagggaccccgagcagagaccctgcttcaaggccctgcgggagaggctctccagcttcaccagctacgagaacccgacctgagctgctgtggagcgggcatggccgggccctgctgaggaggggcctgggcagagggcctggacctgggatcaaggcccacgcgcttccctggggtttactgaggtgatgggtgcaggaaaggttcacaaatgtggagtgtctgcgtccaatacacgcgtgtgctcctctccttactccatcgtgtgtgccttgggtctcagctgctgacacgcagcctgctctggagcctgcagatgagatccgggagactgacacgaagccagcagaggtcagaggggactctgaccacagcccgctctctggctgtctgtctgcagtgcccggctgagggtgggaggcaaacacgccttgttcctgctcttcccagttcagcttggtgggagaaagtcattcgcgtggctcgggacgctcatgtaaatttggttttggtgctcaagggttctttcctcccaggggcaggtgtttctttcctgtttgtcttgtgtcttgagagcttggccttatgaccagtgagaactctctccctggtctctgccagcccaagcatcactgcccgaggcgccagctcagtttcaccgtccacgtccacaaggggcttttcccaccttcacctttgtcgctgggtcagtgctggaaagcgcccctcactcctgcgctgacaagggcccttctctactgtctgtggggtggttccgggctgggggggctgcctcctttgcacctgattttgaaggtgtctctttcatccatggttaagtcataaaaagcttattggttttggttttgactcacctgaaagtttttttggtttaaaagaagaataggcggggcacggtggctcatgcctgtaatcccagcactttgggaggctgaggcaggtggatcacgaggtcaggagatcgacaccatcctggctaacacggtgaaaccccgtctctactaaaaaatacaaaaaattagctgggtgtggtggtgggggtgggcgcctgtagtcccagctacgtgggaggctgaggcagcagactggtgtgaacccgggaggtggagcttgcagtgagccgagatcgcgccactgcactccagcctgggcgacagagcgagactccatctcaaaaaaaaaaaa

SEQ ID NO: 56085 - DNA, 2000 bp, Homo Sapiens
atcttcttcctgccctcgccgtggcgggcgacggtttctcgcgccgtggctggctcggccggccggggcaccgcgccgggctccatgcagccgggctgcgcggtcccgcagagcgggcgcctccggggctcgagtcggggacccggcaggagcgggccggggatggcggcggcgggcggcgggtcggccgtggagccccggagaggcggccgccaccaccgctgcccgcagtctgcgaggtgtccggcggtccgctcagggcctcttttgcagactcggtgcccggagtgcgccggcgccgcccgccaggtcttggcactgctggcgcggccgcggcggcgggggcccggctccagatcaccgacccccacgagcgccggccctgcctgcccgctattttggttccatctcttctgcatatttatgcttgcctgttacattccctggcctctgagtgtcctttggcagtttccaaagcatttgggcaagaaggagcttgggcagcttcacaacaggtggggacgcgcaggggaggggccgcggccggaccggcagagtttcaagggctggcgcgccggcggactttccacactgtctttcgggactggggttaggagacagcccttggccaccactgtgtccttactttgtcgctttacttggggctggacctcccctttccagctctggcgtgtgaccccgcaacgagcgtggtgtcgagaccaccaccagctggggcggtgggagcgaaggtgccccaggctcggggaaggtggaaaccttttccccgctccccaagtgattgttgcgcgctccggtgaggggacagtggtacctcgatttcccgtgtgccagcttcgggactcagctgtgcttttgtgtctctttgattagcaaaagcaaaacgaattcctccccgaacactaagcttcctggaaacttccctagacctaaacttgagaaccgcatataaatgggccttgagggttctgtcgtcagtagcgggttacgtgattgcaaacgagcaagtttaaaacggagtgggctttgggctgcagagccgcctggcattctgacagctgagcaggaggcagaggtgagagtccaagatggactaaaaatgtcccagcagctgggagcccaacctcggcccaacctcgttgaaaggaggaacattcggtgcagccgtcggaaccttattatttatgaaaggggacagctcacaggattacatttttctaagccaatcctgtgaccatcctccatgaaattctctattttggttgcatgtggtcaaaactgagcctcactgaaacaattgaaaacaaatactcccgacaaatcttaagaatcgttttgaaaatcaaaaggtggggaaaatgttgtggcttctgagctttcttcagcccatattctattattctctgatgttttatggtgtaaaatcatacccattccattatgtattgattgtcaagaaggaagtaggcttttattgctatttttatgtcagtttccatttactgtctcaccacatttattgggttattgcctttgcctttgactcaacaggagctggaagggtaggaatcccaaattctgttgcctaaggcagccagttgtcagaatggactttcctcattttctattatgaggcctgaggaaagacattcagttccaaaggctgtgcctatccttttaaatagaagagagagggcccggcacggtggctcacgcctgtaatcccagcactttgggaggccgaagggggcgaatcacgaggtcaggagttccagaccagcctggccaacatagtgaaaccccgtgtctactaaagatacaaatattagccgggcgtaatggcgggcgcctgtattcccagctactcgggaggctgaggcaggagaatggcttgaatccgggaggcggaggttgcagtgaaccgaaccgagatcgcgtcgctggactccagcccgggcgacagagtgagactccgtccc

SEQ ID NO: 56086 - DNA, 2370 bp, Homo Sapiens
gcaaatcttcaggggccgtccaggactacagagctgtttcaccctaccttggcttcaatctcttcccccatgctcgaaggtgcggagctgtacttcaacgtggaccatggctacctggagggcctggttcgaggatgcaaggccagcctcctgacccagcaagactatatcaacctggtccagtgtgagaccctagaagacctgaaaattcatctccagactactgattatggtaactttttggctaatcacacaaatcctcttactgtttccaaaattgacactgagatgaggaaaagactatgtggagaatttgagtatttccggaatcattccctggagcccctcagcacatttctcacctatatgacgtgcagttatatgatagacaatgtgattctgctgatgaatggtgcattgcagaaaaaatctgtgaaagaaattctggggaagtgccaccccttgggccgtttcacagaaatggaagctgtcaacattgcagagacaccttcagatctctttaatgccattctgatcgaaacgccattagctccattcttccaagactgcatgtctgaaaatgctctagatgaactgaatattgaattgctacgcaataaactatacaagtcttaccttgaggcattctataaattctgtaagaatcatggtgatgtcacagcagaagttatgtgtcccattcttgagtttgaggccgacagacgtgcttttatcatcactcttaactcctttggcactgaattgagcaaagaagaccgagagaccctctatccaaccttcggcaaactctatcctgaggggttgcggctgttggctcaagcagaagactttgaccagatgaagaacgtagcggatcattacggagtatacaaacctttatttgaagctgtaggtggcagtgggggaaagacattggaggacgtgttttacgagcgtgaggtacaaatgaatgtgctggcattcaacagacagttccactacggtgtgttttatgcatatgtaaagctgaaggaacaggaaattagaaatattgtgtggatagcagaatgtatttcacagaggcatcgaactaaaatcaacagttacattccaattttataacccaagtaaggttctcaaatgtagaaaattataaatgttaaaaggaagttattgaagaaaataaaagaaattatgttatattatctagactacacaaaagtaagccacactatatcttcatgagttgcaaatccatggaaacacagtaaaccagccctgaaacaaagcatttccttgttttcagtggtattagatcttgtttccacatgtctgtctcattcttcactgggccttacaggttagttttaattaactctatggtatttttcttattcttgtttgatcatgttaaaaattggacctaataaaagtattttattcttgcttttccatgcttctctacaggtccaaatactgaatgtctcctttactttttctcttttaaatttttttctagacagggtctcactctgtcacctaggctacagtgcagtggtgtgatcacagctcactgcagcctcgacttcccaggctcaagtgatcctcccagctctcagcctccaaagtagctggcactacaagtgtacacccccacacaaggctaagttttgtattttttgtagagacagggtttcaacatattatccaggctggtgtcgaattcctgggctccagggatccacagtcccccttggcctcccaaagtgttgggattacatgcatgagccactgtgctgggcttcatttacattttaactgtctgttccttgcctagattcacagaaatccaaagctgtatgtagtcaacatggttcacaagtgttggaaaatgtgttttttgttttgttttgttttgtttcgttttgttttgagacagagtttccctctgtcgcccaggctagagtgcaatggcgtgatctcggctcactgcaacctccacctcccagattcaagcaactctctgcctcagcctcccgagtagctgggattacaagcacccaccactacactcagctaattttttgtatttttagtagagccggggtttcaccatcttggccaggctgatcttgaactcctgagctcatgatccacccgcctcagcctcccaaagtgctgggattacaggccccttgttcagccactgcacctggccccttattttgtttttgttttctaatatactttgatgtaatcagcttgagaaagcaacacaatttcaaatcctatcttctagatgcaagcagtgttaaatttgttaataaatttgcttttcacacctttctttaaataaaaggtatatctctc

SEQ ID NO: 56087 - DNA, 3716 bp, Homo Sapiens; identical to SEQ ID NO: 31198

SEQ ID NO: 56088 - DNA, 1655 bp, Homo Sapiens
gtatgggctgctgcagaggcggctggagaacatggagaacctgctgaaaaacagaaatttctggatcctgcggctgccccccggcagcaatggagaagttcccaaggtccctgtcacatttgatgatgttgctgtgcacttctcggagcaggagtggggaaacctgtctgagtggcagaaggagctctacaagaacgtgatgaggggcaactacgagtccctggtttccatggactatgcaatttccaaaccagacctcatgtcacagatggagcgcggggagcggcccaccatgcaggagcaggaagactctgaggagggcgaaacgccgacagatcccagtgctgcgcacgatgggatcgtgattaagatcgaggtacagaccaacgacgagggctcagaaagtttggagacacctgagcccctgatgggacaggtggaagagcacggcttccaggactcagagctgggtgacccctgtggggaacagccagacctggacatgcaggagccagagaacacgctggaggagtccacggaaggctccagcgagttcagcgaactgaagcagatgctggtgcagcagaggaactgcacggaggggatcgtgatcaagacagaggaacaagacgaggaggaagaagaggaggaggaggatgagctgccgcagcacttgcaatcccttgggcagctgtccgggagatatgaggccagtatgtaccagaccccgctgcccggggagatgtcccccgagggcgaggagagccccccgcccctgcagctaggaaaccccgcagtgaaaaggctggcgccctccgtgcacggtgagcggcacctgagcgagaaccgcggggcctcgagccagcagcagcggaaccggcgcggcgagcggcccttcacatgcatggagtgcggcaagagcttccgcctgaagatcaacctcatcatccaccagcgcaaccacatcaaggaggggccctacgagtgcgccgaatgcgagatcagcttccggcacaagcaacagctcacgctgcaccagcgcatccaccgcgtgcgcggaggctgcgtctcacccgaacgcgggcccacgttcaaccccaagcacgcgctcaagccgcgtcccaagtcacccagctctggtagcggcggcggtggccctaagccctacaagtgccccgagtgcgacagcagcttcagccacaagtccagcctgaccaaacaccagatcacgcacacgggtgagcggccctacacgtgccccgccgccgccgcccggccaggtgcgcgggccgtgccccccctcggacaccgccaggcccgagcccagcgggcggggcggggcgccccccagcccctttgccgtgagctccccctctcctctcgtccctcctcccaaggacatgggggcagtgagaccaggtcccttgctgccgcgtttccccgggggccccaggggggagggcgcggacctggggaaccctttcgggctgttaatttccttgacaataaaatggatgaaaccaatcagcacggggggcgtgatttggccgccggccactcagaggggcggtgtagggcccatctagttggggatagaactttataattaccttttggatactgtggttctatttgataataatagagtaattttt

SEQ ID NO: 56089 - DNA, 2383 bp, Homo Sapiens
agcagggatggacatgatgctgttggtgcagggtgcttgttgctcgaaccagtggctggcggcggtgctcctcagcctgtgctgcctgctaccctcctgcctcccggctggacagagtgtggacttcccctgggcggccgtggacaacatgatggtcagaaaaggggacacggcggtgcttaggtgttatttggaagatggagcttcaaagggtgcctggctgaaccggtcaagtattatttttgcgggaggtgataagtggtcagtggatcctcgagtttcaatttcaacattgaataaaagggactacagcctccagatacagaatgtagatgtgacagatgatggcccatacacgtgttctgttcagactcaacatacacccagaacaatgcaggtgcatctaactgtgcaagttcctcctaagatatatgacatctcaaatgatatgaccgtcaatgaaggaaccaacgtcactcttacttgtttggccactgggaaaccagagcctttcatttcttggcgacacatctccccatcagcaaaaccatttgaaaatggacaatatttggacatttatggaattacaagggaccaggctggggaatatgaatgcagtgcggaaaatgatgtgtcattcccagatgtgaggaaagtaaaagttgttgtcaactttgctcctactattcaggaaattaaatctggcaccgtgacccccggacgcagtggcctgataagatgtgaaggtgcaggtgtgccgcctccagcctttgaatggtacaaaggagagaagaagctcttcaatggccaacaaggaattattattcaaaattttagcacaagatccattctcactgttaccaacgtgacacaggagcacttcggcaattatacttgtgtggctgccaacaagctaggcacaaccaatgcgagcctgcctcttaaccctccaagtacagcccagtatggaattaccgggagcgctgatgttcttttctcctgctggtaccttgtgttgacactgtcctctttcaccagcatattctacctgaagaatgccattctacaataaattcaaagacccataaaaggcttttaaggattttctgaaagtgctgatggctggatccaatctggtacagtttgttaaaagcagcgtgggatataatcagcagtgcttacatggggatgatcgccttctgtagaattgctcattatgtaaatactttaattctactcttttttgattagctacattaccttgtgaagcagtacacattgtcctttttttaagacgtgaaagctctgaaattacttttagaggatattaattgtgatttcatgtttgtaatctacaacttttcaaaagcattcagtcatggtctgctaggttgcaggctgtagtttacaaaaacgaatattgcagtgaatatgtgattctttaaggctgcaatacaagcattcagttccctgtttcaataagagtcaatccacatttacaaagatgcatttttttcttttttgataaaaaagcaaataatattgccttcagattatttcttcaaaatataacacatatctagatttttctgctcgcatgatattcaggtttcaggaatgagccttgtaatataactggctgtgcagctctgcttctctttcctgtaagttcagcatgggtgtgccttcatacaataatatttttctctttgtctccaactaatataaaatgttttgctaaatcttacaatttgaaagtaaaaataaaccagagtgatcaagttaaaccatacactatctctaagtaacgaaggagctattggactgtaaaaatctcttcctgcactgacaatggggtttgagaattttgccccacactaactcagttcttgtgatgagagacaatttaataacagtatagtaaatataccatatgatttctttagttgtagctaaatgttagatccaccgtgggaaatcattccctttaaaatgacagcacagtccactcaaaggattgcctagcaatacagcatcttttcctttcactagtccaagccgaaaattttaagatgatttgtcagaaagggcacaaagtcctatcacctaatattacaagagttggtaagcgctcatcattaattttattttgtggcagctaagttagtatgacagaggcagtgctcctgtggacaggagcattttgcatattttccatctgaaagtatcactcagttgatagtctggaatgcatgttatatattttaaaacttccaaaatatattataacaaacattctatatcggtatgtagcagaccaatctctaaaatagctaattcttcaataaaatctttctatatagccatttcagtgcaaacaagt

SEQ ID NO: 56090 - DNA, 2585 bp, Homo Sapiens
agaagtgccgagtcccggccgggggcagcctcgccgccgctcagctcgggaatccctgccccccaccagcacctcagtgggggatactgcaagttcaaggtggtttaaggcgtgaatgaatgaaggagcaagcagtaagccccgacagcaaggccaccacagccctcgccccacagggacgcctgagcaaggacccaagcaggggacaagcaggctcaccccgcccttgcggggctgaccacgaggccccgtccggtggaacacgccatgacgatctgaacctgccccagccccaggactctgagtgcagcaagaggggagccgggctggagagtggggagcacggagactgtggcctggatggtgccagagcaaacaggagagaggctgcccaacgcagaggctgcagcacagaccagagggtcccggggctgactgggtgggggcagctcccagcgagaggcccctgggatttgggtaagtagaggcacatgcagactctggccacagggcacctcgcgcacgaggggagttcaccacacaagctgagcggagggcggacgcaggagagcagcggtttctcggaagccaagggcggtcatggagccccacgccacagcgcttcccacggggccacaccatccggtctgcggagggggctgcattgccgggaaggaccatctgattctggattccagcctcaccctgggccaccgctgagtgtcccaagtggccccttagcccccagggccaggcggcatcccaatcccctagggatgtctgtgctcagaatgtggcacacacgccccggcagggccatcctcctcctcctgcacccgccacagccgtggattcggggtctctatcgtgggcagaaattcacacagtcaaggtgagggtcccaggagcagctgtgaccaggccccggctgccagggagagggggtcttcagccgacggggcagacaccctgagatggacccttgtccaggggagggccctgccacccacaattccttggcattcctgcaccagcaggacgggctgagggaggcgcctcaccagtgccagcgcccagcatcactgtgccccggtggagggggaggcccttccgagcctgggcctgggtgtggatgagggcaggtctctcacctctctgacctcagcttcctcaactgggaaggggggccacagcacccccttaggggtgatgaggaagtgggagctcagggaggaccccgggcagggctgcctcctcacctctcttcggcctttggacactggagctcagaggaccaagtgaatgaatgaatgactcgatcaatcaactgatccatgaatccatggacccctgaacagctggacagctgggctgtgggcaggacaggggactctggctgaagccgcgttcatatgtgttcagctttgtgagtggggcgaggttgagggcttattcagtgggggaggtgcacggcagggccagtacccttggagggtcaggccacaggggcggggacacctgccaggatgcccaaccccagaggcagtgggagctgttggggagccgtggtcccagtcagcggtggcttgatgagggctgctcccacttcatccgcaggattccagccgcagctaccccacacccgagctgtccctagtcgcccaccgcggccggacaaagccccagcagccaaggtgctccgtggggagggtttcttgggtttcttgaagccagtatttcccatagtatcttacgtcccagcagaggcctccactgtgcccggaccagcggcccactcagtgagtcgagtgtgcacctggcacccctctttctggaaatccacgaacaatgggctcccagcagaggactgaggctgagcaggccacttccctggagctgaccccacagctgtgtaggtacagggtggccgtgaacacttagggctctctcgggctgtgcgcttcttgttcactgcaaggagcagggtgttggctcctgaccaagccctgtcactgctgcccagccacacgtggggccccttcacccacccctgaccacctcatgcaggtgaagccactgtggaaacagcctggcagtcccttgaaaaatgaagtcataaaccccagcaattgcactcctgggcctctgacagagcttgcacgtcccctccaaagctcgtgttaagctgtgagccccagtgccggaggtggggcctggtgtgtttgggttctgggggtggatccctcatggctgggtgccatgaacccactcaccacagtgagttctcacgagatctggttgttgagaagtgtgtcatacctcccccacaactctctgtcttttgttccggctctggcaatgtaacaagcctgctcctccttcgccttctgccatgactgtaagctttctgagggctgaccagaagcccagcagatgccagcaccatgcttcctatacagcctgcagaaccgtgagccagctaaacctctcctcataaatcaccgagccccaggtttatctttacagcaatgcaagacctgactaatacagcaccagctccccaaaataaaaagaaatattcaaac

SEQ ID NO: 56091 - DNA, 8670 bp, Homo Sapiens; identical to SEQ ID NO: 30425

SEQ ID NO: 56092 - DNA, 3260 bp, Homo Sapiens
gggtttgagagtttgggaccctgggttggtggggtcagagggagagggggtaccttcctcccggaccgctgggggtgcagggcgccttgggtgtagcacccagaacaggtttctgatctctaacttggctgtgatcattgtgatggagcaagaaaaaaaactgttggtctcagattctaacagctttatggagagggagagtttgaaaagccctttcacaggagatacaagtatgaataatttggaaactgttcaccacaataattctaaggcagataaacttaaagagaaaccttcagaatggtctaaaagacatagaccacaacattataagcatgaggatgcaaaagaaatgccactgacatgggttcaagatgagatttggtgtcatgattcctatgagagtgatggcaagtcagagaattggggaaattttatagctaaagaggaggaaaaacccaatcaccaggaatgggactcaggagaacataccaatgcctgtgtccagcagaattcatcctttgtagacagaccctataaatgttccgaatgttggaaaagcttcagtaatagttctcatttgcgtactcaccagaggacccactcaggagaaaagccttataaatgctctgagtgtgcaaaatgtttttgtaacagttctcacctgattcagcatctaagaatgcacacaggagagaagccctaccagtgtggtgaatgtgggaaaagcttcagcaatacctcccatcttattatccatgagagaactcacacgggagagaaaccctacaaatgtcccgagtgtgggaagagattcagcagcagctctcaccttattcagcatcacagatcacatacaggtgaaaaaccatatgaatgttctgtctgcggaaaaggcttcagtcacagctatgtcctaatagaacatcagaggactcacactggagaaaaaccttataagtgccctgattgtgggaagagttttagtcagagttccagcctcattcgccaccagcggacacacacaggtgagaagccctacaaatgtcttgagtgtgaaaaaagctttggttgtaattctactctaataaaacatcagagaatacatacaggagaaaagccttatcaatgtccagaatgtgggaagaattttagtcgtagttcaaaccttattacacaccagaaaatgcacacaggagagaaatcctatgaaagttctgaatatgaggaaagtttgggtcagaactgcaatgtgatagaagaatgcagaatccagttaggagagaaaccatatagatgttgtgaatgtgggaagagttttggccttagctcccatctcattagacatcagagaacacatacaggagaaaaaccttacagatgttctgagtgctggaaaactttcagtcagagttccaccctggtgattcaccaaaggacacatacaggagagaaaccttataaatgtcctgattgtggtgaaagcttcagtcagagctttaaccttatcaggcaccggaggacccacataggggaaaaaccttacaaatgtaccagctgtgagaaatgcttcagcagaattgcctacctcagtcagcatcggaaaattcacgtagaaaagccttttgagtctcccgacgttggggattttcctcatgaatggacttggaaaaactgttcaggggaaatgcccttcatctcttcattttccgtctcaaattcatcttcctgagtcccaaagcctggttggtgatggttttttcttccttgttggaccatgacaatttaggtattctgtgattgttgtgctataaagtttctttgatgtgtttgtcaaaacatttggaaaaagtcaacctcccagtttaaaggatgggaagaccccaatcaccaggttattggatctgtccagtgagagattcatccaccaaggatgaagaaaggaggacttttaaaaatttaaggtaagatagtaatagcttcaaaagaacacatacagagtaatcctgagagtaagcaaaggaaccatgagaaccgaagctagaattgctattgaattactttattttctcttcccttattgggtagagatacatcattactggcctcaggggtttacccaaagaaagggtatttttgagcaaataatgtgatttcctggctattttgttgggggcttaagatttttttttttcaaatgcatttttagtcactaaaaattaactgtcgtaccatctagaactatactgtccagtaccatagcctctagccgtatgtagctatttgtattaagattaattgaaattttaaatccagttcctcagtcacactagccactttctaagtgctcagtagctctgtgtgaccagcggctactgtattggatattatagaaggttctttcattcaagatcatcattcttgacagacccataaatatttcctataaagactgtagaagtgtgttctggagggtttgctctccaaaaagaattgtaatatagagtagaattgggatagagtattgaagacactgggtttagacattggatattttaatgattgtgtgttctaattcatgtgctgccaactgagttatctagtgatatgacctcactgtcttgaccaaagccagaatagaaggcaggattcctgaattctatcttaaaatttgcaatgaagagccttttccctaaattatcccattatgtaattcttggtcagctcaagaactgggttctttttctaataattaactcactaaatctgagccagtgtccaaggacagtttgtcattaaggagtactgagacttcttagctttggtactgacagttttcttttgcctcttgacataataggtatatggatctgataactgaggtcccatcttccctactcattcctatgggaatgatgctttggaaattattagatatatcctattcccttcctcccatttttttcctgctagtgcaaaaggtagatgagtaggaagattaggactcctgagttgcccatgatttcatctaatttttggattcagaatgtattttatgaataatatgcagagatgcatattaggaatgtgaagccagaatgggtcagttgtagctgctgcaaagttctgtagctgatggtcatttaattgcatgggggttattttatctttcatgattgtggtgcacctgatgctggcggggtatttgtgtgtttttgtattgttatttgattacaaaaataaagcaaaaactaacaaat

SEQ ID NO: 56093 - DNA, 2690 bp, Homo Sapiens
acgtgacctttgctcatggcggcggcggcggcggcggcggtgctggtggtgctcggcggccggagccggatcctgtagccgggtgtgggcccgtgtctgtccgtccctccttcggccccctctcttgtcttccggagtgtggctggcggagctgggatggcggaacgaggcctggagccgtcgccggccgcggtggcggcgctgccgcctgaagtgcgggcgcagctggcggagctggagctggagctctcggagggggacatcacccagaagggctatgaaaagaaaaggtccaaactcctatctccttacagcccgcagacacaagaaactgattcagcagtacagaaagaacttagaaaccagacacctgctccatctgcagctcaaacttctgctccctctaagtaccaccgaactcgatctgggggagccagggatgaacgatatcgatcagatatccacacagaagcagttcaggctgcactggcaaagcataaagaacagaagatggctttgcccatgccaaccaaaaggcgatccacatttgttcagtctcctgcagatgcctgcacacctcctgacacatcttcggcctctgaggatgagggctctctgagacgccaagctgcgctctctgctgccttgcaacagagcttacagaatgctgagtcctggatcaaccgttcaattcagggatcgtccacttcttcatccgcatcttctacgctgtcccacggagaggtcaaaggaaccagtgggtctctagctgatgtatttgccaatactcgaatagagaatttctctgctcctcctgatgtcactacaactacctcttcctcctcatcatcttcctcaattcgcccagcaaacattgacctgcccccctcggggatagttaaaggcatgcacaaaggatccaacaggtccagccttatggatacagctgatggtgttcctgtcagtagcagagtatctacaaaaatccagcagcttctgaacactctgaaacgacccaaaaggcctcccttaaaggaattttttgtggatgactctgaagaaattgtggaagtacctcagccagaccccaaccagcccaagccggagggacggcagatgacccctgtgaaaggagagcctttaggagtcatctgtaactggcctcctgctcttgaatctgccctgcagcgctggggtaccactcaagcaaaatgctcctgtctgactgcactggacatgacagggaaaccagtttacactcttacatatggtgagtctgcaagattccagatccttctctcctgagagttcttcagaatatcatgggtagtgtttttatctagatacttagcagttgctggccattatgtttcagtagattttttcaataatttaaaaggatcctaagctctaagtaaagctattgccaaatattttcatttgctaaagcaacatttgcaagccagctaatatttaaaagacagcaaaaagaagagagactttgtacatccatagatgttttaacattacaagaggattttagaaaaacatttggtattgatgtatggtgaaaatcagatggttttatctaacagttgaaactgattacttgttaaatctttattccatcctgcttcttgattataataggcacaaaattctgtaatgaacaaagaatgagtacttttccgtttaattttgcatactagctaaaatttttctttttaaaataacttcaaggaaaaatggggtcaaccctgggctatgagattttgtactagtttattcaaacagattccttttctcctttgcaagtggagcacagtgtccatagacctagatggaaaataatctttgaggaaaaacaaggttttatttaaagaattacgcaggttgacatagtttaaactttggatgcccctctgaataaattgtatgtaaaataacgtagctatttaaaataacatgatttcccttatctcataatctaaaataagaatttctaagagtggttgagggaagggagtaggaaaagaaaagcattttttgtttgtttttgtcaaaattgttttaacattcacctcagaagctgtatatacatttcattcatataacccttaaagaaagcatttaactggccaaatctttgcatgtttatttaacatctatgaatacatccatatgttcatacagataatttccattttaatgtttgtttttactaaattacagcagtatggaatgtttaatcatttgagtcatgtttttgctttgcagtttcctcaagtgtctgataccacctatgtaagtggtttttcagaaaaagcttacaacatttctgaagatatttgtaaattttttaaaaaactggccgggcacagttggctcatgcctgtaatcccaacactttgggaggctgagacaggtggatcacctgaggccaggaatttgagaccagcccagacaacatggcgaaacctcatctctattaaaaatacaaaaattagccggatgtggtgacacacacctgtagtcccagctacttgagaggctgaggcaagaattactcaaacagggagacagacagaggttgcagtgagccgagattgcaccactgcactccagcctgggcgacagagtgagactctgtcttaaaaaaaaaaaaaaaaaaaaaaaacttagaacagaag

SEQ ID NO: 56094 - DNA, 2097 bp, Homo Sapiens; identical to SEQ ID NO: 31201

SEQ ID NO: 56095 - DNA, 2583 bp, Homo Sapiens
tcggggagagaagctggactgcagctggtttcaggaacttctcttgacgagaagagagaccaaggaggccaagcaggggctgggccagaggtgccaacatggggaaactgaggctcggctcggaaaggtgaagtaacttgtccaagatcacaaagctggtgaacatcaagttggtgctatggcaaggctgggaaactgcagcctgacttgggctgccctgatcatcctgctgctccccggaagtctggaggagtgcgggcacatcagtgtctcagcccccatcgtccacctgggggatcccatcacagcctcctgcatcatcaagcagaactgcagccatctggacccggagccacagattctgtggagactgggagcagagcttcagcccgggggcaggcagcagcgtctgtctgatgggacccaggaatctatcatcaccctgccccacctcaaccacactcaggcctttctctcctgctgcctgaactggggcaacagcctgcagatcctggaccaggttgagctgcgcgcaggctaccctccagccataccccacaacctctcctgcctcatgaacctcacaaccagcagcctcatctgccagtgggagccaggacctgagacccacctacccaccagcttcactctgaagagtttcaagagccggggcaactgtcagacccaaggggactccatcctggactgcgtgcccaaggacgggcagagccactgctgcatcccacgcaaacacctgctgttgtaccagaatatgggcatctgggtgcaggcagagaatgcgctggggaccagcatgtccccacaactgtgtcttgatcccatggatgttgtgaaactggagccccccatgctgcggaccatggaccccagccctgaagcggcccctccccaggcaggctgcctacagctgtgctgggagccatggcagccaggcctgcacataaatcagaagtgtgagctgcgccacaagccgcagcgtggagaagccagctgggcactggtgggccccctccccttggaggcccttcagtatgagctctgcgggctcctcccagccacggcctacaccctgcagatacgctgcatccgctggcccctgcctggccactggagcgactggagccccagcctggagctgagaactaccgaacgggcccccactgtcagactggacacatggtggcggcagaggcagctggaccccaggacagtgcagctgttctggaagccagtgcccctggaggaagacagcggacggatccaaggttatgtggtttcttggagaccctcaggccaggctggggccatcctgcccctctgcaacaccacagagctcagctgcaccttccacctgccttcagaagcccaggaggtggcccttgtggcctataactcagccgggacctctcgtcccactccggtggtcttctcagaaagcagaggcccagctctgaccagactccatgccatggcccgagaccctcacagcctctgggtaggctgggagccccccaatccatggcctcagggctatgtgattgagtggggcctgggcccccccagcgcgagcaatagcaacaagacctggaggatggaacagaatgggagagccacggggtttctgctgaaggagaacatcaggccctttcagctctatgagatcatcgtgactcccttgtaccaggacaccatgggaccctcccagcatgtctatgcctactctcaagaaatggctccctcccatgccccagagctgcatctaaagcacattggcaagacctgggcacagctggagtgggtgcctgagccccctgagctggggaagagcccccttacccactacaccatcttctggaccaacgctcagaaccagtccttctccgccatcctgaatgcctcctcccgtggctttgtcctccatggcctggagcccgccagtctgtatcacatccacctcatggctgccagccaggctggggccaccaacagtacagtcctcaccctgatgaccttgaccccagaggggtcggagctacacatcatcctgggcctgttcggcctcctgctgttgctcacctgcctctgtggaactgcctggctctgttgcagccccaacaggaagaatcccctctggccaagtgtcccagacccagctcacagcagcctgggctcctgggtgcccacaatcatggaggaggatgccttccagctgcccggccttggcacgccacccatcaccaagctcacagtgctggaggaggatgaaaagaagccggtgccctgggagtcccataacagctcagagacctgtggcctccccactctggtccagacctatgtgctccagggggacccaagagcagtttccacccagccccaatcccagtctggcaccagcgatcaggctgggcctcccaggcgatctgcatactttaaggaccagatcatgctccatccagccccacccaatggccttttgtgcttgtttcctataacttcagtattgtaaactagtttttggtttgcagtttttgttgttgtttatagacactcttgggtgta

SEQ ID NO: 56096 - DNA, 3197 bp, Homo Sapiens
tgtgtattgagggaaggggagatgtgtgcaacaccttccagaaaaatggggaggtagtttagaaagtttttctctgtaacagcacagcttctgagaaggcagagagaagaaagcagacaggaaacgaatcccttcctcctctcccctttacccccttccttcactccctagaccaagctggtcacccggctgggaatcaagattgcgtggctgggaagacaccagtctctgtgctcgggttcagcccagtcgggcaagaaagtctgggcagctggagaaggtcgtcacagtctcccgtggaatcttgttgcctgagagccccataacggaaagggctaagacgactcttccacacacaggtcgcagcccctgccgcggaggatccccaggaagatgctggggacgctctgagcatcggcctttctttacccccgactccctggagcttggtctcgggatgccaacttggggcacggaggcgacgggctgctccgaagctggagggtttctgcttgggtcagagggatcacgacctcagcagagccaggagaggttgggtgacacccactgcgtattgcacttgactcaaaactgccctcggcctgcggaagaggcgagggcaagaagcctggtggcgggtcaaaccttcaccctattattttctatcattttttatgcccatatatttgttaaatgtatggctgctatacaccaacagcttattctacaagaagtgcccccgaggaggattgggttaagctttgcaaatttggcttcccaggtaatgcgcttcattattctgctcccgacttacccaccacaccagtgggtacccggagcagcacccacttggcagaactgatgactgcttgggcccagcggagtgcgcattgcgctaacacgcgcacgggaattgcacccttgccggagcctccgcaccgtgcgcccttcaaagagctggcgaccccgctcacgtgtaagcaacctcccactttgaaactaattcgcacccgggtctttcaccccaaaggactttgctgcggacgctgctctgacccaagacgcgggagagaagtcccaaaggctacagccaggggctgggggactcctctgctcaccttagtccttgatttcgaaggccccaattaactatctgttgtgtcagaatcggcgagtgcaaagtagctgcgccccgctgacgcgctctctcctgggtccgggtatcccagggcatccggagctggggagggttgtgcggactacccaaggcacgcgcagataccgggcagggaagaagggctccgtgttccaaggatggtcgtttacctctcctgagatcagccctaatcccttggtaacttaagcgcctctgaactcggggagcgcttggtggggcgcccccctgcatccacccctacccctggctccttcccaggcccagcatctttcccaccattctcacccccaccacccccacggccccgcccgtttagaggcgtgcggtgggcacttggtttacagaaccggcgtttcagatgtttatttgcaactaatttcttgtgctggaaaatgcttgttacccgggcggagcgcttccgctctgcgcggtccggcccggcgggcggtagctcgctgatccctccggcgaagcctccaaggagtgggcggctgggagaggttgtgccacccgggaccaagccatcggcgctgctccggactcccggtagggggagccgccgcgggcgccaggccggattgtgttctggcctcggggcggccctgctgccagcggccgggactctcagcacagagctcgggaggactccacctgctctccagataaggcgccatgagcagagaagggaacagacggccaagctccctcctaattccccgttgttgcagagcaaagaagatgggggagaactaattatattctctaggtctaaatattgttgaaaaatttgtaggtgagatcacctcctttgcccatatccatatataatatatccattacatgtgtttgcccatatatatacgtatgccatatgtaaatatgtacgagtgtgtatgtatgtgtatagcagtggtttagaattagtctcagttccacaaattttgagcccttttaatattttaggtgacctaataccttctcactgtattttccaagtcacttatttccaagagttttaggtgatcccagcataggagctgagcataggagctcagatgagacttgccagttttgctgcagtaatgtcagcaaaagagtctctctctttctgactctatagacttaagtaagggtttacaggctttcattttaaggtatgactgatatttagagaacaagactaaaccaaggtcaaggggaaaacagttagactgtgaacctgcagaccactccactgcacccagtgtggccgtacacctgtgctgaacggccagagacttcctggtcaatactcccacagataaaagactgcaggatctgcttatacacaaatccatctttcgctgggaacccacaactcataacaactctcctaatgccaagtcatcaaggcctcttgaaagagaatcataaaaaacaaagaatttcaaacttggaaggaaacctaaagtttactggtgaggagcttgaactgagtagaagcaaagaatcatactccagatgagaaacgccccatgcactgagctgagactggaactctcctcttcttactctcagtccaacaacatcactcaaacaaccctattacttcagtagcaatgaactgtctctggattttattaagcatctcactagttccttttcttcagctgtatggcaccctgtcttcctgtacaccagaggctcctcagctgggtaaggtgagccaacgttaccaggagtatatgctgagaggccatttcaaagtctttcatagaaggctgtgcttgggcaagtagaacttttcatcatacagtcccagagatgtgaagttatcaaggtcagagaagaggaaaagagactcagagaaactgtgttctctagtctttcattcgggaacaaatggtgtcgtaccaaatggctaaaaagatcccaggcttactctgagaaacatctctctcttctgaattaaacttgcacagtggttaacagtgttttgtttggtgttgacaaagtaataaaacgttaccgtttctctttc

SEQ ID NO: 56097 - DNA, 2202 bp, Homo Sapiens
ctatggtcaaatggacagaaaaggccagtgttatcattatgatcagacaaacagacaaggccagggttcccactacagtcaaccaaacagacaaggtcagagttcccactatggtcagccagacacacaagatcagagttctcactatggtcagacagacagacaagaccaaagttctcactatggtcagacagagagacaaggccagagttcccactacagtcagatggaccgacaaggccagggttctcactacggtcagacagacagacaaggccagagttcccactatggtcagccagacagacaaggccagaattcccactatggtcagacagacagacaaggccagagttcccactatggtcagacagacagacaaggccagagttcccactacagtcagccagacaaacaaggccagagttcccactatggtaagatagacagacaagaccagagttatcattatggtcagccagacggacaaggccaaagttcccactatggtcagacagacagacaaggccagagtttccactatggtcagccagacagacaaggccagagttcccactacagtcagatggacagacaaggccagagttcccactatggtcagacagacagacaaggccagagttcccactacggtcagacagacagacaaggccagagctatcattatggtcagacagacagacaaggccagagttcccactatattcaatcacagactggggaaatacaagggcaaaataagtacttccaagggactgaaggaacaagaaaagcctcttatgttgaacaatcaggaagatcagggaggctaagtcaacagactccaggacaggaagggtaccaaaaccagggacagggattccagtctagggactcacagcagaacggccaccaggtatgggagcctgaagaggatagccaacatcaccaacacaaactcttagcacaaatccaacaagaaagaccactttgtcacaaagggagagactggcaatcatgcagtagtgagcagggccacagacaggcccagaccaggcagagtcatggtgaggggctgagccactgggcagaggaagagcagggccatcaaacttgggatagacacagccatgagagtcaggaaggtccatgtgggacacaggacaggcgaacccataaagatgagcagaaccatcagagacgagacagacaaacccatgaacatgagcagagccatcagagacgagacaggcaaacccatgaagacaagcagaaccgtcagagacgagacaggcaaacccatgaagacgagcagaaccatcagagatgagacaggcaaactcatgaagaggatcaaaaccatcagcaacaacataatagacaaaactatgaggagaaagagaggtatcaaggatctcagaatcaaaaatcccaagtgacccacagaagctgtcctaacagagaaaaattccacatgaaagaggatgaccagagccaaggctcacagaaaagacacactgaaccatccttctatccaacccagagcagtgggaggccccaaaccagagaacagcgtggtcaccctgccaagggagctactgttcccaaccccccctatgactatgtgcaagagcagaaatcctacccatactaggctatgtgagcaccagaggtaaagcaacacaaagccaaaaaagaaacctatatgtcgagttcacctttaattcgatttaagagattgagaatgtatttcttccctctatcctctgctgtatctccctgcaaggatgtttttgagtactagcattcacgtaagggcttttggctcctgtggataaaacatcaggaatttcaagcctcatagtctagactagaatgaaactcagttcaaggctgctacaagagccgagaacatagagtgcatctctgatgtttactacatctcccatgccaggctcttattccacaccagagggactgtccattagtgcctatcactagagctgaatggacccattccaattcaatacctttctagtttctgattatataaaataaagagaaagtatatgtcatatgtttgcaaattccaggggatcaagactattgattcatagctcctaagacctgaaaactcttctcaagaaaatctatgtgcagattatgaattgtattaaaatatctaataaataattgatgagc

SEQ ID NO: 56098 - DNA, 1895 bp, Homo Sapiens
gtgacagatgagcagtggtctgtctgcaatgagcatgtgctcaagctaacatggataccatcttggtcttcagcctaatcattgcatcctatgatgccaacaagaaagacctcagagatagcagttgccgactggaacagctgcctgggatcttcccaaaagacgtgagaagcatcagagaattgcaaatgcaagaaactcacacagaaaccaaaaggacaacattcattcaaaaccggactatagctaccctgcagtgccttggctctgacagcaaagtaaaagtcaaccttgtatatttggagagaaggccaaaggtcaagcatattttgaagaacctgagaatcattgctgctccccgcagaaacagctctgcctcctcaagctgtcacctaatccccacatccaagtttcagactggatctcttctaaaaggcaaagcttttttaccagggatctcacaatgtaaagtcctgggggcttcatcagagacttttcccaccactgccccttctataactcctgggaataaagaaggagagaaaactacaagtaccgacacagatgagaacctagagaagagacagaaatggagtattgtggtcaaaattctgattgctgtcaccctgttgctcagtggagttgccattatagtatttgtaatttttgaagtcccatgtccttatcaatgcctaggagccaggaagctgtgccaatgccagtggttgtggagatggcaaaagaagggaggccagccacctgggacagctgaatccaagcctgactctcagccccagaaggttggacaagatgctgccaattcatcaaacccaaagaaagctgcagagatcactgttatccaccagacatacttctgaaaagttctgctctatctcaaagactgaatgatactacacagtcctctccctattaatatgggcacattcttgccaatttcacacttgtatcttcagcagggacattacaatcaaacaccaattcctggttaatgaagggagagtgtgggcttagcagagttaccctcatgcccctatctgagccacaaccttctgtaattcacttcatacatccatctaaatggatacctttccatcccctcaaacgagaacaaaaagtattccctgcaagcactatgaatggaccttactactctctttgacagaagactcaaacacagcctctaagaaacaaggcagctgttagtgtgacatagcttccagctcctctgttatcttcacagctgacttcacactcactggccctcaatagcttagagtgggactcctgatctccctggttgacgtttataaggttttgtaatttagcttctggtactacatgtatctatccacacactgctgaagggaacttgaccctacgcattccaaaagccttcctcataagttatccccaaggggttcagggactacagaccattagtacccaagtgaagtcttctgacgatccagaattcctaaggtggctctgatattatatcatactttaatagagagttgcataccttttggacaaagattccagagcaaaataattatgataatgctgtttctcacaggagaatagctatgagtcaaatctaacctgcttaaataagagtttggtgagaaagtgaaaccacctgatcttgaatcaatgttgaggtgaaaaaggaaatgtcaggagggataagacagggtgaggccctgcttcttttcctaagagtctgaaaccattccatttcattttggtgaaatgtgtctgtttctaagaaattctgttttcttagttctctggttaaaaaaaaaaatacataaactgtatccttctttctttcacttcaaaaaaaaaaaaaaaaaaaaaaaaaaaaaaaaaaa

SEQ ID NO: 56099 - DNA, 1346 bp, Homo Sapiens
atcatttgcatgtctagctggagaataaaaataatatatcatttgcatgtcttagtaatgaagtcatgggtgtcgtggcatgagatcagctggagggagaggagagattaaagtgaggagagagctacaaccaagtaagcaagtgtcagggctcaccaaccatgcaaggacagggcaggagaagaggaacctgcaaagacatattttgttccaaaatggcatcttacctttatggagtactctttgctgttggcctctgtgctccaatctactgtgtgtccccggccaatgcccccagtgcatacccccgcccttcctccacaaagagcacccctgcctcacaggtgtattccctcaacaccgactttgccttccgcctataccgcaggctggttttggagaccccgagtcagaacatcttcttctcccctgtgagtgtctccacttccctggccatgctctcccttggggcccactcagtcaccaagacccagattctccagggcctgggcttcaacctcacacacacaccagagtctgccatccaccagggcttccagcacctggttcactcactgactgttcccagcaaagacctgaccttgaagatgggaagtgccctcttcgtcaagaaggagctgcagctgcaggcaaatttcttgggcaatgtcaagaggctgtatgaagcagaagtcttttctacagatttctccaacccctccattgcccaggcgaggatcaacagccatgtgaaaaagaagacccaagggaaggttgtagacataatccaaggccttgaccttctgacggccatggttctggtgaaccacattttctttaaagccaagtgggagaagccctttcaccctgaatatacaagaaagaacttcccattcctggtgggcgagcaggtcactgtgcatgtccccatgatgcaccagaaagagcagttcgcttttggggtggatacagagctgaactgctttgtgctgcagatggattacaagggagatgccgtggccttctttgtcctccctagcaagggcaagatgaggcaactggaacaggccttgtcagccagaacactgagaaagtggagccactcactccagaaaaggtggatagaggtgttcatccccagattttccatttctgcctcctacaatctggaaaccatcctcccgaagatgggcatccaaaatgtctttgacaaaaatgctgatttttctggaattgcaaagagagactccctgcaggtttctaaagtgagttgaatgaaaatatttgcaaaaaagtccaagctggaagcacctgcagaattaatcacatgctcttatttcgttgat

SEQ ID NO: 56100 - DNA, 2739 bp, Homo Sapiens
tgagctggagtccgggctccggtcccctccacggaccttgagagggtacccggggtcagacctggcagacagcccattttttcttatgataaagacggcatttggctcatgagcaaggtggcaagatcatcaagtgagtcagacatgcagctctgggaaacagaagaggatgacatgacagaaggtgatttagggtatggcctcggaaggaaacctggtgggatttatgaaatagaattttcacataggtctagaaaaagatcagatggaaagaactttagccctcctccatttccgagaaagggagaagaaagaaatgaagcgagttttcagtattccaagcataagagccagcaagatacattccctcaagtgtccagaatttccaattacagacgacaaagtagcactgtagattcgaattcagaattgtcaaatgaagaattaaggcaatgtcttaatgaaactttagaggaggtagaaatgttaaaaactgaacttgaggcatctcaaagacaactcagaggtaaagaggaagcattgaaaattcttcaaagcatggcaatactgggcaaagccacaagtcatacgcaggcagtgcttcaaaaaactatggaacaaaacagatccttggagaaggaaataaatgccttgcagtgggaaatagaatttgatcataatagatttaaaaatatagaggaatcttggatccaaaaatatgacaggctaaactgtgaaaatgcagtcctcaaagagaatttgaaagtgaaaacagaagaaattaaaatgctgaagtctgacaatgcagttttgaatcaacggtatttggaggccctcgccatgcttgatatcaaacagcagaagatggctcaggaaaacatgtgctgtgataaaagtggctttgcagaggcttcaggtcttgagcttgcggtcctcggagcctgcctttgtcatgggcccggagggaacccctgttcttgtgccagaatggcagcatccactcggaaactgcttcttcagctcaaacaagagttggaaattttgcagaagagtaaagaagaagcttacgtgatggcagatgctttcagaattgcatttgagcaacaattaatgagaaaaaatgaccaggcactacaattgacacaaatggataaaatgcataaaaaagcaacaaaatggatgaattggaagcaccttaaagaggatggatttccatcaccaaggagtaagaagaccttcgggcagagactgttgggtatgctcccttcagaaaacagttctaagaggatggaagaccaggacagtcctcaagaggtccttaagatgctcatagatttgcttaatgataaagaagaagctttggctcatcaaagaaaagttagctacatgcttgctcgggcattggaagacaaagacactgcttcaaacgagaataaagaaaaaaatcctataaaagagaatttccctttcaacaacccctggcgtaagacttcagaattctctgttttgggtgatcctatacattcaagtgtctgcattttaaattctgtgggctgcatttgttcaatccagcactctcaaatagatccaaactatagaactcttaaaagatcccattctttgccatcaagtatcatattttaaagacaagccagttgaaattggaactgagagttgtttatatcgagatactttgaaaaatgattttgtaaattttgctgcatcttgagaagttgtatgtttcctaggtatttctaaattttaggaggtcacttaaatcaaatattttctacattttctttttcttcttttgagatggagtcttgctctgtcacccaggttggagtgcagtggtgtgatctcggttcactgcaacctccgcctcccggttcaggcaattctcctgcctcagcctcccgagtgactcggattacaggcatgtgccatctctactaaaaatacaaaaaattggctgggcctagtggcgcatgcctgtaatcccagctgcttgggaggctgaggtaggagagtcgcttgagcctgggaggcgggggttgtggtgagccgagactgtgtcattgcactccagcctgggcgacaagagcgaaactctgtctcaaaaaaaaaaaaaaaacacattacagtgtttgccaacatcctaaaactaaaaaataatgatttttgggaaaaacaaaaaattatttaactattttgattgagtatagggatcttagcttggctaaatcaccaatatagcaatgtatcttaatgctctaaaaagtaacaatacctaggactgactgaatgttaatttctggaattcatttatcttgttttatttgccttgttcagtatttttcatttaccatatgaagtttagaaataacaatttccttaagttaacttcaataagacagttttgatggtgggaccttggcagaagtatattgagtcagtgccggctgcgttcatggcttcttgtcagggtagtaacattttgcaaccaaatctgcacagatttgtagccaagtctacaaagtgcttaacagctcttttcattgcatcctgtgagatggttgtgatgatccaggaaatggggtctcaggaatctgaagaagctgcctgagccaaggtgatttctaggagtttttttgtttgtggtatgtgaattggggtgtgtgggggtggggtgtgtgtgtagacagggtcccactgtgttgctcaggctggtgccaaact

SEQ ID NO: 56101 - DNA, 2279 bp, Homo Sapiens
aaatcggtacaagatggcggagggggacgaggcagcgcgagggcagcaaccgcaccaggggctgtggcgccggcgacggaccagcgacccaagcgccgcggttaaccacgtctcgtccacgacctccctaggtgagaattatgaagatgatgacctagtaaattctgatgaggttatgaagaaaccatgtccagtacagattgttcttgctcatgaagatgaccataactttgaacttgatgaagaagctttggagcagatattgctacaggagcacatacgagatcttaacatagtagtggtatctgtggcaggagcttttcgtaaagggaagtcatttctactggacttcatgcttagatacatgtataacaaggattctcaaagttggattggtggaaacaatgaaccattgacaggctttacatggcgaggtggctgtgaaagagaaacaacaggcatacaagtttggaatgaagtatttgtgattgacagacctaatggaactaaagttgctgtgctgcttatggatacccagggtgcctttgatagccagtcaactatcaaagactgtgcaacggtgtttgctctgagcactatgactagctctgtccaggtatataatctgtctcagaatattcaagaagatgatcttcaacatttgcaattatttacagagtatggaagacttgcgatggaagaaatctaccagaaaccatttcagacattaatgtttttgattcgagattggagctatccttatgaacattcatatggtttggaaggtggaaagcaatttcttgaaaagagattacaggtaaaacaaaatcaacatgaagagcttcagaatgtaaggaagcacatacacaattgtttctcaaatcttggttgcttccttttgccacatcctggtcttaaagttgcaactaatcctagttttgatgggagattgaaagatattgatgaagactttaaacgagagcttcgaaatctggttccattgctgcttgcccctgaaaatttggtagaaaaagagataagtggatctaaagtcacttgtagagatcttgtagaatattttaaggcttacatcaaaatctatcaaggagaagaacttccacatccaaagtccatgcttcaggcaacagctgaagctaataatcttgctgcagtagcaggagcaagagatacctattgtaaaagtatggaacaggtatgtggaggggacaagccttacattgcaccttcagatctggagcgaaaacacttggatctcaaggaagtggcgataaaacaatttcgttcagtaaaaaagatgggtggagatgagttctgccgtcgttatcaggaccagcttgaagctgaaattgaagaaacctatgcaaattttataaagcacaatgatggcaaaaatatcttctatgctgctcgtacccctgccacactgtttgcggtcatgtttgctatgtatataatctcaggactgactggcttcattggcctaaactctatagctgtcttgtgtaaccttgtcatggagttagcactgatatttctttgtacttgggcatatgttaaatactctggggagttcagagaaattggaacagtgattgatcagattgctgaaacactatgggaacaggtgttttccaaactgtttgaagttactagacgtcgaatggttcaccgtgctctttcatcagcacagcgacagagactgtcatccaacaataacaagaagaaaaattagacagtatttttaacctttttctctatctgaagtgttcacacttacacatgtaggacaataagcaggaccgtctgggccggtctgcataaatgctgtatacataccagatttgatgctgcatatagggtatggaattgcacatccatctcataggaattgtaaatggtttgaataagaggaaagtaatttttgttgcattataaaatgtctagtagcatcataagtttttttgagagaagcatctttttatttcccgtattcctggttattttcatcattgctttgaattgaatttttatatctatttttatatgtaactctttttttacctcatgtttttgtttgttttgcacatttctcataccacaggtattgaagcccctgggtgataatttgatggaggaaaacataaggcagtctgtaacaaactctatcaaagcaggcctgactgaccaggtgtctcatcatgccagattaaagacagactgacagttcatctccaaaaaaaaaaaaaaaaaaaaaaaaa

SEQ ID NO: 56102 - DNA, 1188 bp, Homo Sapiens
tgacgatgaccaccttttcatatgcctgtttgccatttatgtcctctgtagcaagaggcaggacaaacagtgaggactgcaccaacactcaccgggtgacccctttgctttggaaacttactcagggtgaaaggaattccgattttaaacagcatctctttgtgtggcctgtttgaggcaccacacagagcttgctggagcagctctgttgaccgctgacccttggcctgctaactgaaacaagattcacaagtgaggctgctgccccagtttcatggatgctggcagaagacttaagatttctgaatcagagacagaagacttcatttatttgtcacagctaaagcaatggccagtgtcagtgtatttgcactggtgcctcaagccctgatgcccacggggtgatgcagagaccctatgactcccgcacatgcattgggtcaagtcacagtagaggaccactgagctgggcaccatgtggacctatagcaggcagcaggcaagccctctcctttgaggttcctccctgcaactacgaccccgaaaaatggatccagtaaagaagagtcaaggctttatagtcttggtgcacccagtaagacctgtaggagaacaggaagcctgtggaggactgtttcttccaaaagtttccaagtgttagctcttacacatgtataaacaacactgcaatttgtctccttgcaccgtacatccacgaagcagatttgcttcttgccaaattatttccctcagtgatttcaggaactgacaattcccagtcgcatataggaattttcttgcgtcttcttttcctgactaactcttgcgttgtcagacactttcatttgtgctaagctgataagtatcaaacgatgatgcaggctattcattatgtgtgtccttgattactgatgagtttgagcaattgtcatttgttggactgatcgttcaatttcctcttcggtccttggccttttcatatattttgccttttcttgtaggtgtgtccttttcaaattgatttttttggtgtttttggtatatcctgtgtactaattctttgtcatttatatgcattaataatatctcctttcactgtgtggcttgtcttctcaatttgtttttgggtttttgtttcagagaacattttataagctttaaataataaagtttatttatttttaatta

SEQ ID NO: 56103 - DNA, 3868 bp, Homo Sapiens; identical to SEQ ID NO: 31196

SEQ ID NO: 56104 - DNA, 2083 bp, Homo Sapiens; identical to SEQ ID NO: 31236

SEQ ID NO: 56105 - DNA, 1953 bp, Homo Sapiens; identical to SEQ ID NO: 31288

SEQ ID NO: 56106 - DNA, 1088 bp, Homo Sapiens
gcaaggcgtggggcgctatgggactgcgcagtgacgacccagtgaagtagatgccttgacgattcccatttcacggatgagacgactccggcacagagaagtcagagggcctgtcctgggtcacacagccacaggcggcccccagaacgggacttcagggtgcaccactgcaccccagcagagacctccgcctggcacacagggaatgctggagcaatacttaaataggggaggtcagaaatctcacgggctctgctggcttctgtgcttcgtctctcaaggccaaaatcaagatgtcatcagtgctgagctctggtggaggatccacgtccaggctcactggggctgctggcagaattcagctgtgtggggttgtaggaatgaagtccttgtttccttgctggctgttggccaggggctgccctcagcttctggaggccgcctgccctccctggttcatggcccatctcatcctgacagccagcacccgcgggaagtccctcttgcactgtgactctctcccgtctcttccattctctatggcttgtctgcctccctctttcatctttaagagtgcatgtgagtatattggacctacctgaatcagccaggctaacctccccattttaaggtctgcagccttaattctacctgcaaagtcccttttgccatgtaatgtgccatattcacaggtgtcaggaatcagagggcaggtatattgggggaccattattctgccaactacacagggccttatatggtctggctctgtgtccccattcaaatctcatcttgaattgtaatccgaattgtaacccccacgtgttggggggagggaccttgtgggaggtaattaaatcatgggggcggttaccctcatgctgttcttgtgatagtgagtgagttctcacgagatctgaaggttttgcaaggagcttttcccccttttgctcaggactctccttcctgcagccaagtgaaggacaagtttgcttccccttccacaatgattgtaagtttcttgaggcctccccagaactatgagtcaattaaacctctttcctttataaaaaaaaaaaaaaaaaaaa

SEQ ID NO: 56107 - DNA, 1679 bp, Homo Sapiens
tttgtgcaaataaggtttctgtggtgagacaccagataaactcaacttcctctttcaacaacaaatgtgtcagttatcagcaggatccatgccgccagagtaaagctttctaccctttactccctgcaaagaaacaagagtgcttatcccagctaagctccagggaaccataaatccatggctaaccttgacaaatacactgaaacattcaagatgggtagcaacagtaccagcactgctgagatttactgtaatgtcactaatgtgaaatttcaatactccctctatgcaaccacctatatcctcatattcattcctggtcttctggctaacagtgcagccttgtgggttctgtgccgcttcatcagcaagaaaaataaagccatcattttcatgatcaacctctctgtggctgaccttgctcatgtattatctttacccctccggatttactattacatcagccaccactggcctttccagagagccctttgcctgctctgcttctacctgaagtatctcaacatgtatgccagcatttgtttcctgacgtgcatcagtcttcaaaggtgcttttttctcctcaagcccttcagggccagagactggaagcgtaggtacgatgtgggcatcagtgctgccatctggatcgttgtggggactgcctgtttgccatttcccatcctgagaagcacagacttaaacaacaacaagtcctgctttgctgatcttggatacaagcaaatgaatgcagttgcgttggtcgggatgattacagttgctgagcttgcaggatttgtgatcccagtgatcatcatcgcatggtgtacctggaaaactactatatccttgagacagccaccaatggctttccaagggatcagtgagaggcagaaagcactgcggatggtgttcatgtgtgctgcagtcttcttcatctgcttcactccctatcatattaactttattttttacaccatggtaaaggaaaccatcattagcagttgtcccgttgtccgaatcgcactgtatttccaccctttttgcctgtgccttgcaagtctctgctgccttttggatccaattctttattactttatggcttcagagtttcgtgaccaactatcccgccatggcagttctgtgacccgctcccgcctcatgagcaaggagagtggttcatcaatgattggctaaaattaagatatctctttaattacgcctttgtttacctacgttccttgtctttttccaaaggccagaattgtcaaccaatttctttaattgaacattgtaaaaaacaggaataagtacttttgtgtaatattcacagtcaacaggggtgtgatggtgaaggcagagtgtgaaaaacgtgagagaggaagagaaaatagatttacctgattcctctttaaaattcaagccactttcttatttaagaaacctagatcaagtttttacagatgtaaataaaagttgaatagtttaccttaaatttttttcaataagtaagttattgttaataatgcacagtaaatatgtgaatttttcctagatgtaaaaaaaaaaatctttcatataaagaccttaaattctgaaaaaaaaaaaaaaaaaaaaaaaaaaaaaaaaaaaaaaaaaaaaaaaaaaaaaaaaaaaaaaaaaaaaaaaaaaaaaaaaaa

SEQ ID NO: 56108 - DNA, 2948 bp, Homo Sapiens
gctcggtggtgggtgaggtatcagctttctccgctagttcccaccctggtagtccttagcccctggaatgcgtgagggagatgcttagggagttctcgaagtggggcgtagaggcatcgcctggcaaggcctgggagcgaaaaagatctctacttcgtggagccgttggacgctaccggggagccactggtggggaccttttttgggccccctttccttcgtggggtactatggagttcccagaacacagtcagcagctgctgcagagcctccgggagcagcggtcccagggtttcctttgtgactgcaccgtgatggtgggtagtacccagttcttggcccatcgggctgtgctggcctcctgcagcccattcttccagcttttctacaaggagcgggaattggacaagagggatctggtgtgtattcacaatgaaattgtcacagccccagcctttgggctgcttctggactttatgtatgctggccagctgaccctgagaggggatacccctgtggaggatgtgctggcagctgccagctacttgcacatgaatgacatcgtcaaggtgtgtaagcggcggcttcaagcccgggccctggcagaggcagacagtaccaagaaggaggaggaaaccaactcacagcttcctagtttggagtttttgtctagtacttcccgtggcacccaaccttcgttggcatctgctgagacatcaggccactggggcaaaggggaatggaaaggctctgctgctccctcacctactgtccgtcctccagatgagccaccaatgtctagtggggctgacactacacagcctggcatggaggttgacgcaccacatctgcgggcacctcatccaccagtggctgatgtctctcttgccagccctagtagctccactgagaccattcctacaaactacttctcttctggcatctcagcagtttcattggagccactgccatctcttgatgtgggtcctgagagtctgagggtggtggaaccaaaggatcctggaggaccactgcaaggcttctatcccccagcctcagccccaacgtcagccccagcccctgtctcagctccagttccatcccaggctccagccccagctgaagctgagctggtccaggtgaaagttgaagctattgtgatctctgatgaagagactgatgtgtcagatgaacagcctcagggtcctgagagagctttcccatctggaggagcagtgtatggggcacagccctcccagccagaggcttttgaagacccaggggcagcaggactggaggaggtggggccaagtgaccacttcctgccaacagaccctcatctaccctaccatctgctgccaggtgcagggcagtatcatcgaggactggtgacctcacctctgcctgcacccgcatccctgcatgagccactttacctgtcttctgagtacgaagcagctccaggaagctttggggtttttactgaggatgttcccacctgcaagacatgtgggaagaccttctcatgctcttacacactacggcgacatgccacggtgcacacacgtgagcgaccctatgagtgccgctactgcctgcggagctacacgcagtcaggggacctctaccgccacatccgcaaggctcacaatgaggacctggccaaacgcagcaaaccagatccagaagtgggaccccttctaggggtgcagcctctccctggctccccaacagcagacagacagagcagcagtggtggagggccacctaaagattttgtattggccccaaaaactaacatctaagggagcatgagctgatgctaggctgctcttaccatccttagatggcagctcagaaggttggtggcaccttatcacccctgctgggtgacaagaataaaggctctgcccaggctgaaagttcctaccctttttttttttaatcttttatttttttgagacagagtctcactctgtcacccagactggagtgcagtggcgcgatctcggctcactgcaagctcagcctccccgattcacgccattctcctgcctcagcctcccgagtagctgggactacaggcgcctatcaccatgcctggctaattttttttgatttttagtagagacagggtttcaccgtgttagccaggatggtctcgatcttctgacagatctgacctcgtgatccgcccatctccacctcccgcagtgctgggattacaggcatgagccaccgcgcccagctgccttttttttttttgagtcttgctctgtcactgaggctggagtgcagtggcgcaatttcagctcactgcaacctctgcctcccaggttcaagcgattcctttttttttttttttttttgagacagagtctcactctgtcccccaggctggagtgcagtggcgcgatcttggcccaccacgcccgcctaattttttgtattttttagtagagacggggtttcaccgtgttagtcaggatggtctcgatctcctgacctcgtgatccacccgcctcagcctcccaaagtgctgggattacaggcttgagccaccgtgcctggcctcaagcgattctcttaactcagcctcttgagtagctgggattacaggaacgcgccaccacgcccagctaattcctgtatttttagtagagacagggtttcaccatgttggccaggctggtctcaaattcctgaccccaggtgatctgcccaccttggccttaaaaagtgctgggattaaaggcgtgagccaccatgcccagcctcctacccttttctttgcccagccagataagcaggactttatggggcaaagcctatgtcagctctctccaagggcactgggaattttcctgaggtgtaatcgcttctcactgtatgttctggaacataaagctagcaatgaaggtatttctttgaaaaaaaaaaaaaaaaaa

SEQ ID NO: 56109 - DNA, 3931 bp, Homo Sapiens; identical to SEQ ID NO: 31210

SEQ ID NO: 56110 - DNA, 3134 bp, Homo Sapiens
ctttcttcactctgaagccaagagccgaccttctgagccctcaagaaagatcagaacagattcatgggtgatttagcctatctgtcccaggccagcgtggctgagtgtgctggctggaggcctctctctctgcttcgagggtagctgagatccaccccggaaaccggcaggatgaagggggcaagtgaggagaagctggcatctgtgtccaacctggtcactgtgtttgagaatagcaggaccccagaagcagcacccagaggccacaggctagaggacgtgcatcaccgccctgagtgcaggcctcccgagtccccaggaccacgggagaagacgaatgtcggggaggccgtggggtctgagcccaggacagtcagcaggaggtacctgaactccctgaagaacaagctgtccagcgaagcctggaggaaatcttgccagcctgtgaccctctcaggatcggggacgcaggagccagagaagaagatcgtccaggagctgctggagacagagcaggcctatgtggcgcgcctccacctgctagaccaggtgtttttccaggagctgctgaagacagcccgcagcagcaaggccttcccagaggatgtggtcagggtcatcttctccaacatctcctccatctatcagttccattctcagttcttcctcccagagctgcagcggcgcctggacgactggacagctaacccccgcatcggtgacgtgatccagaagctggcccccttcctgaagatgtacagtgagtatgtcaagaactttgagcgagcggctgagctgctggccacctggaccgacaagtctccactcttccaggaggttctcactcgcatccagagcagcgaggcttcgggcagcctgaccctgcagcaccacatgctggaaccagtgcagagaattccacgttacgagctgctgctcaaggagtacatccagaagctgccagcccaggccccagaccaggccgatgcccagaaagccctggacatgatcttctcagctgcccagcactccaatgcagccatcactgagatggagcggctgcaggacctgtgggaggtgtaccagcgcctgggcctcgaggacgacatagtagacccctctaacaccctgctccgtgagggcccggtcctcaagatctccttccgccgcaacgaccccatggagcgctaccttttcttgttcaacaacatgctgctctactgtgtgcccagggtgatccaggtgggcgcccagttccaggtgaggacccgcatcgatgtggccgggatgaaggtgcgggagctgatggatgctgagtttccccactccttcctggtgtccgggaagcagcgcaccctggagctgcaagcccggtcccaggaggaaatgatttcctggatgcaggccttccaagcagccattgaccaaatcgagaagcggaatgaaaccttcaaggctgcggcccaggggcctgagggagacatccaggagcaggagctgcagtctgaggagctgggcctccgggcaccgcagtgggtccgggacaagatggtgaccatgtgcatgcgctgccaggagcccttcaacgctctgacgcgccgtcgccaccactgccgggcctgcggctatgtggtgtgtgccaggtgctccgactaccgggccgaactgaaatacgacgacaacaggcccaaccgagtctgcctccactgctacgcattcctcactggaaatgtgctgcctgaggccaaggaggacaagaggcggggcatcctggagaaagggtcctcagccacgcctgaccagagcctgatgtgcagcttcctgcagctcatcggggacaagtggggcaagagcggcccccggggctggtgtgtgatccctcgggatgaccccctcgtgctctatgtctatgctgcccctcaggacatgagggctcacacctccatccccctgctgggctaccaggtgactgttgggccccagggggaccctcgggtcttccagctacagcagtcaggccagctctacaccttcaaggccgagacggaggagctgaagggccgctgggtgaaggccatggagcgggcggccagtggctggagccccagctggcccaacgatggggacctgtccgactgagccactgccagccgctctcctgcccacctctccccaccctgaacccagctcctgccacagactgaccctgtggcctcagtgacccactgccccaagtggtgctttcagagaattgattcagccatctgcgcccaggccacgtgtcccgatctgggattagaaaatatgggtccattcctttctagaaaggggacaaccaagtgtctcagtttgccttgcggggagggggctcctgggccatgggacttccagtgctaaaactgggaaagccccaggtaaccccggactggtggtcaccatagtatggtttttcatttgtatctcctggggagcttttaaagagtactggtgaaaaacacatagtaaattaattttaaaaatgtaaaaaacaatgcctgtactgaagtaccaccaccgatttaaatgggctgagttgggggaggcatggggtcttttttttttttttttttttttttttttttttttttttttttttttttttttttttgagacagagtcttactctgtttcccaggctggagtgcacaaacatggctcactacagcctcgctctcccgggctccagtgatcctcccgcctcagcctcccaagtagctgggattataggtgtgtgccactgtgccaagctaatttttttattttttgtagagatgggatttcaccatgttactcaggctggtctcaaactcccagcctcaagcgatgctcccacctccacctcccaaagtgctgggattacaggcgtgagccaccatacctggcgcatgcatattttttaagagtacccactggagtctaatatatagcctgggttacctgggatgaagaataaagagagcaaactaccacaaccaatggttgagcccctgtcaagtgccagtcatgatagtagtaataataataataaacatctattgggccagaaaaaaaaaaaaaaaaaaaaaaaaaaaaaaaaaaaaaaaaaaaaaaaaaaa

SEQ ID NO: 56111 - DNA, 2818 bp, Homo Sapiens
gttacctggtacgctggctgctacctccctcactcttgtcagagtcggagctacaggcagtgccttcagctctgagctcaggcatcccggtccctgtttttgcggttaaggactctaaagtgttgtgtcgtgttcatcaactttttctcaacttccctggctctacctcttctgccacaaacgtcagcatggtggtatctgccgaccctttgtccagcgagagggcagagatgaacatcctagaaatcaaccaggaattgcgctcgcagctggcagagagcaatcagcagttccgagacctcaaagagaaattccttataactcaagctactgcctactccctggccaaccagctgaagaaatacaagtgtgaagagtacaggaatcacctgcccccagagaggtgcagaagactgaagaaaaggaagtccctcaggactcactggaggaatgtgctgtcacttgttcaaatagtcacaacccttctaactccaaccagcctcacaggagcaccaaaatcacatttaaggaacacgaagtcgactctgctctggttgtagagagtgaacaccctcatgatgaagaggaggaagctctaaacattcccccagaaaatcaaaatgaccatgaggaggaggaggggaaagcgccagtgccccccagacaccatgacaagtccaactcttaccggcatcgtgaagtctctttcttggcattggatgaacagaaagtttgctccgctcaggatgttgccagggattactccaatcccaaatgggatgaaacctcacttggcttcctcgaaaagcaaagtgatcttgaagaggtgaaaggacaagaaacagttgctcccaggctcagcaggggaccgctgagagtggacaagcatgaaatcccccaggagtcactggatggatgttgcttgactccttccatccttcctgacctgactccctcctaccacccttattggagcactttgtactcttttgaagacaagcaagtcagcttggctcttgtagacaaaattaaaaaggatcaagaggagatagaagaccaaagcccaccatgccccaggctcagccaggagctgccagaggtgaaggagcaggaagtcccagaggactctgtgaatgaagtttacttgactccctcagttcaccatgacgtgtctgactgccaccagccttatagcagcaccttgtcctcattggaggatcagcttgcctgctctgctctggatgtagcctcccccaccgaggcggcctgtccccaagggacttggagtggagacttgagccaccaccagtcagaggtgcaagtttcacaggcacagctggaaccaagcaccctggtgcccagttgtctgcgactacagctggatcaagggttccactgtgggaacggcttggcccagcggggcctttcctccaccacctgcagcttctcagccaatgctgattctgggaaccaatggcccttccaagagctggttttagagccctctctggggatgaagaaccctccccagctggaagatgatgcacttgaaggctcagcaagcaacacacaagggcgtcaagtcactggccggattcgtgcctcccttgtcctgatactgaagaccatcagaagaagactcccgttcagcaagtggagactggcattcagattcgctggcccgcatgctgagagcgcagagataccaaatactgctggaaggacgcaaaggatggcaggatgaaagaatgtcacaaaaagcagcttttccacttgataaaaacaactaaaacagcaaagcaagtttaagtccaaacacaatactgcaggggtccttcactgaggattgaatttcagacacagaatactcttgatgacttcaagccactatgctcctttgatttgagaagccacattccatccccctccaattgtgatcaatacctagggagaccaatgcccagatggacaaatagcattgaccggcgttagccctgtttctcaattcccatcgtgtagagaacaggagtccgcagctgctggcaggagacagcatgtcagccgggactctgccagggcagagtatgagcaataccatgttcttgctgaaaacgcttagcctgagtttcataggcggtaaccctcagataactgcagaatgtagaacattgaacaggacaactgacatggacttgtttgtggaggacaggtcagctgtctggctcaatggtctacattctgaagttatctgaaaatgtcgtcatgattaaattcagcctaaacattttgccaggaactctgcagagtccatgctgtgagcttcctacctcagcccatctgcaggcagagaaggcccagtgtgtccatccccagtgcggtgatactaggatggtcacttggttaaggaggggtctaggagctctgtcccttgtaaagacatcttatttgtaagtaatttggaaagtggtttgaaatagtataaatatcctgtattctagtgatcttcttcagaacattttatcaccaattaatcaccccgtctgtgtcagttattatatttaagtttgtacattgaaaattgtctatctcaaaatcttaccttatacttgcttttgctggcattctttgtaaaaaagatcattccctgcccaaattttaactttcatccaaaattaattttaatttctttttgctggcattctgttgtgaaaaagaatattctctgccccaattataactttcatccaaaattaattttagtccatcagttaaaattttaaattttaaatctgtttaattaaaacatttcttgcctctc

SEQ ID NO: 56112 - DNA, 5019 bp, Homo Sapiens
gcgacctccggcgccattttgtagagaaacaagcggagttaaccgaagagggggtcgaggagagccggagtcggggacccaggagtttcctgtgtccagcgctgccggagccgcctgaggtgccatgtttcagaacagagtaagacccctggtaaagaagaactgaagatattatacagataccagatatagcctaattacaaagaaagcattaacctgcctctgaggtgactaaaggggaataatggtgattttgcgccgggctcggccgcctgcttccgccccaaccagcaatgaatcttgactcgctctcgctggccttgtctcaaatcagctacctggtggacaatttaaccaagaaaaattaccgagccagccagcaggaaatacagcatattgtgaatcggcacggtcctgaggcagacaggcatttattacgctgcctattttcgcatgtggatttcagtggcgatggtaaaagcagtggcaaagatttccatcagactcagtttctgattcaggagtgtgcgttgctgattacaaagccaaattttatctcgacgctgtcctatgccattgataatccattgcactatcagaagagtttaaagcctgcaccccacttatttgcccagctgagtaaagtgctcaaattaagcaaagtacaagaggtaatttttggccttgccctgttgaattcttccagctcagatcttagaggtttcgctgcccagtttatcaaacagaagcttccagatcttctgcgttcttacattgacgcagacgtcagtggaaatcaagaaggtggcttccaagatatagcaatagaggtcctacacctcctcctctcccatctcctctttgggcagaagggagcctttggagttggacaagaacagatagacgcttttcttaagacgctgcgcagagattttccccaagaacgctgtcccgtggtgctcgcaccacttttataccctgaaaaacgggacattctaatggacaggatcctgcctgattccggaggggtagctaaaaccatgatggagagctctttggctgatttcatgcaagaagtaggctatggcttttgtgcaagtattgaagaatgtcgcaatataatcgtgcagtttggtgttcgggaggtcacagctgcccaggttgcaagggttttgggaatgatggctcgaactcattcaggattaacagatggcattccattacagagtatttctgctccgggcagtgggatctggagtgatgggaaagataaaagtgatggagcacaggcacacacatggaatgtagaagtcttgattgacgttcttaaagaactgaatccaagtttgaatttcaaggaagtaacttatgaactggaccatcctggatttcaaattcgtgacagtaaaggacttcataatgtggtttatggcattcagaggggtttgggtatggaagtgttcccagtagacctcatatatagaccttggaaacatgctgaaggccagctctccttcattcaacattcccttataaatccagagatcttctgttttgctgactatccctgtcatactgttgccactgatattctgaaagcaccaccagaggatgacaatcgagaaattgccacatggaagagcttggatttgattgaatctctgctgaggcttgcagaggttgggcagtatgagcaagtcaaacagctcttcagcttccctatcaaacactgtccagacatgctggtattggccttactacaaattaacacctcttggcataccttgcgccatgaacttatctccactctgatgccaattttccttggaaaccatcctaactcagctattattttgcactatgcatggcatgggcagggacagtctccctcaattcgccaacttatcatgcatgcaatggcagaatggtacatgagaggggagcagtatgatcaggccaaattgtctcgaatacttgatgtggcccaggacttgaaggccttgtcaatgctgctaaatggtactccatttgcctttgttattgaccttgctgcacttgcttcacgtcgtgaatacctcaaacttgataagtggctcacagataaaattcgagagcatggggagccttttatccaggcgtgtatgacttttttaaagagacggtgtccttctattttgggcggacttgccccagaaaaagaccagcccaaaagtgctcaacttcctccagaaactttggcgacaatgttggcctgtctgcaagcttgtgcagggagtgtttctcaggagctatcagaaactatcctcaccatggtagccaattgcagtaatgttatgaataaggccagacaaccaccacctggagttatgccaaaaggacgtcctcctagtgctagcagcttagatgccatttctcctgttcagattgaccctcttgctggaatgacatctcttagtataggtggttcagctgcccctcacacccagagtatgcagggttttcctccaaatttgggttctgcattcagtacccctcagtcaccagcaaaagcatttccacccctttcaacccccaatcagaccactgcattcagtggtattggaggactttcatcacagcttccagtaggtggtcttggcacaggcagcctgactggtataggaactggtgctcttggactccctgcagtgaataacgacccttttgtacagaggaaactgggcacctctggactgaatcagcctacattccagcagagtaagatgaaaccttcggacttgtctcaggtgtggccagaggcaaaccagcactttagtaaagagatagatgatgaagcaaacagctatttccagcgaatatataatcatccaccacatccaaccatgtctgttgatgaggtattagaaatgctgcagagatttaaagactctactataaagagggaacgagaagtatttaactgtatgctaaggaacttgtttgaagaatatcgtttttttccccagtatcctgataaagagttacatataacagcctgcctatttggtggtataattgagaaaggactggtcacttacatggcactaggtctggctctacgatatgttcttgaagccttacgcaagccttttggatccaaaatgtattatttcgggattgctgcactagatagatttaaaaacagattgaaggactatccccagtattgtcagcatttggcttctatcagtcactttatgcaatttccacatcatttacaggagtatattgagtatggacagcagtctagagatcctcctgtgaaaatgcaaggctctatcacaacccctggaagtattgcactggctcaggcccaggctcaggcccaggttccagcaaaagctcctcttgctggtcaagttagcactatggtaaccacctcaacaactaccactgttgctaaaacggttacggtcaccaggccaactggagtcagctttaagaaagatgtgccaccttctattaatactacaaatatagatacgttgcttgtggccacagatcaaactgagagaattgtggagcccccagaaaatatccaggagaaaattgcttttattttcaataatctctcacagtcaaatatgacacaaaaggttgaagagctaaaggaaacggtgaaagaagaatttatgccttgggtttcacagtatctggttatgaagagagtcagtattgagccaaactttcatagcctgtattcaaacttccttgacacgctgaagaatcctgaatttaacaagatggttctgaatgagacctacagaaacattaaagtgctcctgacctctgataaagctgcagccaatttctcagatcgttctttgctgaagaacttgggacattggctaggaatgatcacattagctaaaaacaaacccatcttacacactgacttggatgtgaaatcattgctgctagaggcttatgttaaaggacaacaagaattgctctatgtagtgccctttgttgccaaagtcttagaatctagcattcgtagtgtggtttttaggccaccaaacccttggacaatggcaattatgaatgtattagctgagctacatcaggagcatgacttaaagttaaacttgaagtttgaaatcgaggttctctgcaagaaccttgcattagacatcaatgagctaaaacctggaaacctcctaaaggataaagatcgcctgaagaatttagatgagcaactctctgctccaaagaaagatgtcaagcagccagaagaactccctcccatcacaaccacaacaacttctactacaccagctaccaacaccacttgtacagccacggttccaccacagccacagtacagctaccacgacatcaatgtctattcccttgcgggcttggcaccacacattactctgaatccaacaattcccttgtttcaggcccatccacagttgaagcagtgtgtgcgtcaggcaattgaacgggctgtccaggagctggtccatcctgtggtggatcgatcaattaagattgccatgactacttgtgagcaaatagtcaggaaggattttgccctggattcggaggaatctcgaatgcgaatagcagctcatcacatgatgcgtaacttgacagctggaatggctatgattacatgcagggaacctttgctcatgagcatatctaccaacttaaaaaacagttttgcctcagcccttcgtgtaagttggctatttccttggtataggtacaaaacgtattactgcttgtctgtaataatttttttctttgtctatatatggcactgggcgttaccacttattcttaataatcaccatatttgtttgatgtcttccatcattttagattgtaattctgtgaggcaaagcatcatgtctgtgtgtttttttttttttctgttatattctcaacacgatgtttgacagatagtagatacccaaatatttgttggtttaaataaattaagatttaaaaaggaaaaaaaaaaaaaaa

SEQ ID NO: 56113 - DNA, 2519 bp, Homo Sapiens; identical to SEQ ID NO: 31678

SEQ ID NO: 56114 - DNA, 2837 bp, Homo Sapiens
taggccctgaggacccagcatggcggactcgggactgctgctaaagcggggttcctgccgttccacttggctgcgggtccgcaaggcccggccccagctcatcctcagccgccggccccgccgccggctcgggagcctgcgctggtgcggtcggcggcgcctacggcggcggttactgcaagcccaggcggccggcgtggactggagggagggagcccgccaggtgtcgcgcgcggcggcggcccggagacccaacaccgcgacccccagcccgatccctagcccgaccccggcctccgaacccgagtccgaacccgaactcgaatccgcctcgagttgccaccggcctctcctcatcccaccggtgcggcccgtgggccccggccgcgcgttgctgctgctgccggtcgagcagggttttacttttagtgggatctgtcgtgtgacttgcctctatggccaggtgcaggtatttggttttaccatcagccaaggccagcctgcccaagacatcttctctgtgtatacccactcttgcttgagtatccatgcacttcactactcacagcctgagaaaagcaagaaggaactgaaaagggaagcccggaatttgctcaaatctcatcttaaccttgatgacaggcgttggtcgatgcagaatttttctcctcagtgttccattgtgttgctagaacatctgaaaactgccactgtaaacttcataaccagctatccgggttcatcctacatttttgtgcaagagagtccaactccccagattaaacctgaatatttagccttgaggtctgttggcatcagaagagagaaaaaaaggaaaggccttcagttaactgagagtaccctttcagccctggaagagttagtcaatgtttcctgtgaagaagtagatggctgccctgtcattctagtttgtggatcccaggatgttggaaagtcaacatttaatagatacctgattaaccatttgttaaatagtcttccctgcgttgactatttggaatgtgatctgggacagacagaatttacccctcctggttgcatttctttgcttaatattacagaaccagttctgggaccacctttcactcacctgaggactccacagaagatggtatattatgggaaaccttcttgtaaaaacaactatgagaattatattgacatagtgaaatatgtgttcagcgcttacaagagagagtcccctctcatcgtcaacactatgggatgggtttcagaccaggggctcctgcttctcattgatctgatccgattgctgtctcccagccacgtggttcagttccgctctgaccacagtaaatatatgccagaccttaccccgcagtatgtagatgacatggatggcttgtacacaaaaagcaagaccaagatgagaaatcgacgtttcagactcgcagcatttgcagatgctttggaatttgctgatgaagaaaaagagagtccagttgagttcactggacataaactgataggtgtttatacagactttgcattcagaataactccaagaaatagagagtcacataacaaaattcttcgagatctgtccatcttgagttaccttagccagctgcagcccccgatgcccaaaccactttctcctttacatagcctgacaccctatcaggtccctttcaatgcagtcgcactccggattacccactctgatgtcgcccctacccatatactatatgctgtaaacgccagctgggttggtctttgcaagatccaggatgacgtcagaggatacacgaatgggcccatcctgcttgcccagactccaatctgtgactgcttgggctttggcatctgtagaggcattgacatggagaagcggctgtaccacatcctcacccctgtgcccccggaagagctaaggaccgtgaattgtctgctcgttggagctattgccattccacattgtgtccttaagtgccagcgtgggatcgaagggacagtaccttatgtcacaacggattacaattttaaacttcctggagcatcagagaaaattggagcaagagaacctgaggaggcacataaagagaaaccataccgaagacctaagttctgtcgaaaaatgaagtgatgctcgcgtttttaataagggaagaaactttcctaccagaaagctttgtctcaagcctgaccacaagagacatgatggagtttcatggccatgaatggtgcccttattagcaacagtgttttttgtgtaattcgtgaatgtcatatagtagtcttaagtttctcttttaaagctgcatgagctagaatttgttctagtcttctgtgtgatactcatacttgctgtccagagggagtaaaacagcagagaacagtttgtgtgccattaaaacagagattcctcagaaagttcttcagggacctggttattagaatcaggataaaaataaggaaactggggccattacaatgtaccgagaaggaaggaagaaggccgacctgcaggatctcaagcataatggatacaagggctcgccacgggccttgcctgagccatgtgcagagctggggtccagcggtctgcttccttggagccagtgtggatggttacagcccatccatttggtgcagttgtacttggtctgttatattcaatcaaggtttaatagatagggctgggcatggtggctcatgcacacctgtaatcctagcactttgggaggctgaggcgggaggattgcttgagcctcggagttccaggctggagtacaccaactactccagcctgagcgacagagtaagaccttatcttttaaaaaagaaaagaaaaa

SEQ ID NO: 56115 - DNA, 1410 bp, Homo Sapiens; identical to SEQ ID NO: 26343

SEQ ID NO: 56116 - DNA, 2129 bp, Homo Sapiens
ccggggctgagctgcggcggcgcctgacaatgccccctcgcgccccggcctcggcgcccgctcccggctccagcgcgcctgcacgtacgtagccttcacgtgtgtgtggatacggagtgcatgtgtggagacagaggaatatgctccaacaaatttcggatagaggcgccgaagacaggacgtggggaagctaaagaagtaaacaggtcatggcacgtttaacaaaaagacgacaggcggatacaaaagctatccagcatctttgggcagccattgagattatacggaaccagaagcagattgccaacattgaccgtattacaaagtatatgtctcgagtccacggtatgcaccctaaagagaccacccgtcagctgagcttagctgtgaaagatggtcttattgtcgaaactctaacagtgggctgcaaaggttcaaaagctggtattgaacaagaaggatattggttgccaggagatgagattgactgggaaacagaaaatcatgactggtattgttttgaatgccatttgcctggagaggtgttgatatgtgacctgtgttttcgtgtgtatcattccaagtgtttgtctgatgagttcaggcttagagacagcagtagtccctggcagtgcccagtttgcaggagcattaagaagaagaatacaaacaaacaggagatgggcacatacctcagattcattgtctcccgcatgaaggagagggctatagatcttaataaaaaggggaaggacaataaacacccgatgtacaggaggctggtgcactcagctgtggacgttcccaccattcaagagaaagtgaatgaagggaaataccgaagttatgaagagttcaaagctgatgcccaattgcttctccacaataccgtgattttctatggagcagacagtgagcaagctgacattgcgaggatgctatataaagacacatgtcatgagctggatgaactgcagctttgcaagaattgcttttacttgtcaaatgctcgtcctgacaactggttctgttatccttgtatacctaatcatgagctggtttgggctaaaatgaaaggttttgggttttggccagccaaagtcatgcagaaagaagacaatcaagtcgacgttcgcttctttggccaccaccaccagagggcctggattccttctgaaaacattcaagatatcacagtcaacattcatcggctgcacgtgaagcgcagtatgggttggaaaaaggcctgtgatgagctggagctgcatcagcgtttcctacgagaagggagattttggaaatctaagaatgaggaccgaggtgaggaagaggcagaatccagtatctcctccaccagtaatgagcagctaaaggtcactcaagaaccaagagcaaagaaaggacgacgtaatcaaagtgtggagcccaaaaaggaagaaccagagcctgaaacagaagcagtaagttctagccaggaaatacccacgatgcctcagcccatcgaaaaagtctccgtgtcaactcagacaaagaagttaagtgcctcttcaccaagaatgctgcatcggagcacccagaccacaaacgacggcgtgtgtcagagcatgtgccatgacaaatacaccaagatcttcaatgacttcaaagaccggatgaagtcggaccacaagcgggagacagagcgtgttgtccgagaagctctggagaagctgcgttctgaaatggaagaagaaaagagacaagctgtaaataaagctgtagccaacatgcagggtgagatggacagaaaatgtaagcaagtaaaggaaaagtgtaaggaagaatttgtagaagaaatcaagaagctggcaacacagcacaagcaactgatttctcagaccaagaagaagcagtgggtaaataccagtcttttttagacccttatttctgaaaatgtaccacaggtatgatgcccgttaattcagaaggtagctgtggcacatgcagaagatgtttctgaaataagatcaaatgtgaaatggtcagctttagttttaaaaattttattaaaagtcctatgatctctcaaaaaaaaaaaaaaaaaaaaaaaaaaaaaaaaaaaaaaaaaaaaaaaaaaaaaaaaaaaaaaa

SEQ ID NO: 56117 - DNA, 4002 bp, Homo Sapiens
agttggcaggctgctgcgggaggcggcggcggtaggaagccggagacagcagggtgacagaattggaaaatatttaactcttaacaaatgaattccccacttgaactctgccgaattcctgtgccacctcctcctttagaaaactgatcttaatacagagataaaagaggagtagaaggtaaaagaaaatgctgggaactgaccgttgtgttgtggaagaatggttatcagaattcaaggcattacctgacactcagatcaccagttatgcagcaactttacaccgaaaaaaaacacttgtaccagccctctataaagttattcaagattcaaataatgagctcctggagcctgtctgccatcagctgtttgagctctatcgtagctcagaggttcgacttaagaggttcacactgcagttcttgccagaattgatgtgggtttatttacggcttacagttagccgagacagacagagtaatggttgcattgaagcacttctgttaggaatttacaatttggaaatcgctgataaagatgggaacaataaagttctgtctttcactatcccctccttatccaagccttcaatataccatgaaccttcaacaattggatccatggctttgacagaaggggcattgtgtcagcatgatctcatcagagttgtttatagtgatcttcatcctcagagggaaacattcactgcacagaaccggtttgaagtcctgagttttctcatgctgtgttataattctgctattgtatatatgcctgcctcatcttaccaatctctttgtcggatgggttccagggtttgtgtgagtggctttccacggcaacatgaaaaacactggaaagaactctgtggtcgaatagtattggatcctgaatttatggtgcaacttctcacaggggtttattatgccatgtataatggacagtgggaccttggccaggaagttcttgatgatatcatttatagagcccagctagagcttttttctcaaccactattggttgccaatgccatgaaaaactcattaccatttgatgctcctgattctacacaagaaggccagaaagtccttaaagttgaagtcactccaacagtgccgaggatttctcggactgcaattacaacagcttcaatccgtcgtcatagatggagaagagaaggtgctgagggtgtaaatggaggagaggagtctgtaaacctgaatgatgcagatgaaggattttcatcaggggcttccctcagcagtcagccaattgggaccaaaccatcctcctcttctcagaggggaagcttaaggaaagtagcaactgggcgttcagccaaggataaagaaacagcctctgccatcaaatccagtgagagccctcgagattcagtagttcgcaagcagtatgtacagcaaccaactgatcttagtgtagattcagttgagctgacaccaatgaagaaacacctgagcctgcctgctggccaggtggtgccaaaaatcaatagcttaagtctaatccggacagccagtgcttcctcaagtaaatcatttgactatgtaaatggcagtcaagcaagtaccagcattggggttggcactgagggaggtactaatttagcagccaacaatgctaatcgatactcaactgtcagtctgcaggaagaccggctaggtcaagctggcgaaggtaaagagctcctcagcccaggagcccccttgaccaagcagtctcgatccccaagtttcaatatgcagctaatatcccaggtgtagttttgacatcctccctcatctttctgcttaccttttaaactgaacatttcattgtgcaagaagacacttcatcccacattgtgaaaatattggtcactgttatcagatttcatttagtttaggtatcttcatactgtattttgtatcaaaacagcaataaggttttctttatccctctttcctacatcttctcttcacctatcccttgtaaatgtgtttgtgaagcagtataaaatggttgccttttccatgccttcctttctccttgggtgatgtgcaatccatcgtaggctgatcggtcccatttcaacactgtgagactgagggtacattagaggaaatggtgtatatgatccctatgaaacgattctttggcttttgtttaaaaacaaaacgggtttgttctcataatctatagaactatgaagattactggatcatatttttttctcttaaccaggagtgcctcagagattctgctatgactttggacttctctgagtctgtgcaatcattttctggagaagcatggggaaaggtggtagactgctgcactttttcattaaaatgagggtagctctttctccacccccccatctcctttatcccgaagacataaatgttcaattacggaggcatttaaatcaagttgtgaccacctccattggagggcaggactcttgattgtgtaattgataatgcactttctcaatggctgtatagtcattattaacgtgtcttccctcttccccacaaggacatataaggtcatttctgtccttcaagtttggccaactaacaaatcagaatctgaggggcatgttctatttcccaggaatgattgacactttggtgctggggttttgtgggggcggggggtagtttttgtttagcttttgtggagattgtgtgtgtgagaggagatttgatttttttttcttcttttcctttgtgagctgatggctgaagtgtaacagtacatcttcaggtaaagagagggatttctcaatctactttctgttatgtcagactataagagaaaccctttcagctgctttctagatgtacctaaattcagtcagacattttggattaagaaacctaaagtcctgatacattacatactccaaggaaatatatcagggacagacaattggctgaaacactgatacttcaatgtgacacatttttatagaacatttctaccagggggtactgaccttgatttctcctacaaggaccacactgcctttgtgtttaatgtaatgcaatttgtgtaccttctaatcatatatctgcagttcctcatttttataaaactttgatatcatgccagtaagctagatgttgaatgtatgtaagtagcatttggtaactgctaagaggttacaaaaacattattggtaaaaaaaatttccttagttctgatctggttggataagattttatcataacttttctgggtctcaggctctgatgtttgaaaaagaagggaatatattgggttttaaaaaagtgtattgtgacttaaactgttataagttatccttccacagaacacatcagagctatcagtgctttgtacatttagatgtttttacttgattattgtttaagaaaaatatactgaatttatagaaagcaagtattctcctaattagcaaaagttaaaattttatctctaccattaaaattacaatagattttgataaataaccagaaaaaacgcctttttttttttcacacctagcaatcctcccgtttttattgtaaggactttcttttttccctaagagactttctgttagactctttatatatgagatgcttgtttaaatatggtggtctgtaacatttttccagctcatgtgaaaatggaaaattagaacctgaactagtatctacaacattgccaaagtccagggtaaagctaaaagttgataagtagacaatttattgttttgtgtgtgtctgtgtgtgtgtgtgtgtgtgtgtgtgtgtgtatggtgtgtatatgtatatatcacaaagttgtattttaaatattttaaataccctttcttttaatttaagggatgtcaaataaatgaaaggagtttaaaaatagccaaaataaatgagctataaaggcccataacatactaaaacaggcagtttcaggtatgtaaggaaaggaacattatacttacctagaaagtgagatccaaaaaaaaaaaaaaaa

SEQ ID NO: 56118 - DNA, 3249 bp, Homo Sapiens
attattaatgtgtttgctttcatttttggtgctaggcagctgggacaccaaggagagttctgtggcaagccacaagtatgaaggcccagaacttcccctgagggcatagcttccatttcagtttggggcaagaataaaatctgctcaaggatattagtttgggaacttcctggtggttcagatttcaagcagagtttgtgcttaatcctcacccaggcaccaaggctcagagtcagcaggagtgagttcaggaatcctcgggacaaggcactttcctgagcactggaccagcgacctcttggcttccagggaggacacacagccatcatggaacccaaacctcagaagagtccaggcaaacaatttacattttcttatgaaaatgaagtctgcaaacaagattactttattaaatcaccaccttctcagctgttctcctctgtgacctcttggaaaaagcggtttttcatcctgtcaaaggctggggaaaagagctttagtctttcctattataaagaccatcatcaccgaggttccattgaaattgatcaaaattccagtgtagaagttggcataagtagccaggaaaagatgcaatctgtgcagaagatgtttaaatgccaccctgatgaggtcatgtccatcagaaccactaacagggaatacttcctcattggccacgacagggagaagattaaagactgggtctccttcatgtcatcatttcgccaggatataaaagcaacacagcagaacacagaggaggaactctcattgggtaataaaagaaccctcttctactccagccctctccttggcccttccagcacatcagaggctgttggctccagctcaccaagaaatggtctccaagacaagcatttaatggaacaaagttctccaggatttaggcaaactcacctacaagatttatcagaagccactcaagatgtgaaggaagagaatcattatcttactcctcgaagtgttcttttagagttggataatatcattgcttccagtgattctggtgaatccattgaaactgatggtccagaccaggtctctggaagaattgagtgtcattatgagccaatggaatcctattttttcaaagagacatcccatgagtctgtggatagcagcaaagaggaaccccagacccttccagagacccaggatggggacctccacctgcaagaacaaggctcaggaattgattggtgtctttcccctgccgatgtggaagcacagaccacaaatgaccaaaaggggtcggcctcactaactgttgtgcaattgtctatattaatcaataatatccccgatgaaagccaagtggagaaactgaacgttttcctttctcctcctgatgtcatcaactatcttgctctcacagaagccacaggacggatatgaaattaaagcttaccatcggcaggatcccaaattcagagacattccatgctgcatcctatatgtgtccctcaaaatgccaaagtgctgcaccttctcagctggataagcctagactgaacagagctcccaagaggagtccggccattaaaaagagccagcagaaaggagccagggagtaacgcaccccagacccatggcagcagaaccaggatggagctgggactgtccagctctgccccctgctgctgccatgtgataggagacagtcggcacccccctctgaatttctgcatctgcatcttaacaatggggatgactatcccctctctggttattgtatcagagatgctaagagggtcatgtggcatgattggagaacctgggggaattggaaggccttattatctcagctattgtcccaaacaccacagacacagattgggtcagtccttcatgtaatacatgctgtgttctgtgaggatgtggtccacacaattccttctttgttaagggacatacagttgcaaatactcactgcatgaaggcaagattcccaagggagatgtgatagctgatcaggcttcccagacacctccttcccaaacacctccttcccaacacctccttccccaacatccttcccaacacctccttcccaacacctccttcccaaacacctccttcccaaacacctccttcccaacacctccttccccaacacctccttcccaaacacctctttcccaaacacctccttcccagacacctccttcccaacacctccttcccaacacctccttcccaaacccctctttcccaaacacctccttccccaacacctccttcccaacacctccttcccccttccccaacacctccttccccaacacctccttcccaacacctccttcccaaacccctccttccccaacatccttcccaacacctccttcccaacacctccttcccaaacacctccttcccaaacacctccttcccaacacctccttccccaacacctccttcccaaacacctctttcccaaacacctccttcccagacacctccttcccaacaccgccttcccaacacctccttcccaaacccctctttcccaaacacctccttccccaacacctccttccccaacacctccttcccaacacctccttcccccttccccaacaactccttccccaacacctccttcccaaacatccccttcccaaacacctgcctctcttcaaccccacaggccagagtgctgagacagagtggccttttggattcaataagtatcttgttctcttaaagactcagcaacgattttagaagtcgcagcagttttacatcacatgcagccaagatcagcttgctctacaagcaataacagaactacttagcacttcaaggttgaaagttcttcactaatggatccattgactaattgatcctggaaggccaaaggaataaaattcttttatataaataggaaaacaaaggcagagagctaaagcactaatcaaatcggggggtgttagagcaaaaacaggcttcagaaagagtattttaccatgcttcacatggaaaaaatcgagccccggagcgatgaaaggcatattttctttgtttctccaagtttcataaccgttcagttgcagaaccaagaatctaaaaccagctctgggaaacaaatgtccagatgccagcctcatagttgaacttggatttgaaaataccttcagcacttagaagagacattcaaatacatttcatttcctgttacccagattgttcggaaagtattaaaaatttttcatttacatgctg

SEQ ID NO: 56119 - DNA, 2257 bp, Homo Sapiens
ggaggaatggtcacatttatgagttaactggaagaaagagacagagaaggagtgtcaagagaggtgaaagccaagagcaggtgccaaagaaagcgagtacacttctaaggaaggaggaaatggtcagtgagtcaaaatattcccaagaggggtccagctagcgaggaggaaagctgtgatggggtgcaggagtggaggagaaacgtggcaactgccgaataaacacaccaaccagggaagacggccaaggctgggcccagaatatctggaatggaacccatcttccttttgcagcaggaagtggagttggaagctgagttgactgtggaatttccgagcttggaggatattactacaagaccttaacggttgttggaggcacaagatggaatgagcctagatccctgaatcactatgtggaggaaggccattatgaaacaggaatattcctttattgtgtccgtaagatctaaacttctattacgttggagtcatttattcttgggtctctgttccactagccagcattactgtaactaacatatttcttaaagcccttctttgttactcacctttcatcatacatggtaacccagcgccttgtgatggtgggtgtgaagtgctccgcacatgtgaaatctgactgtgatcaatgctttactaatgttccaacacaaaatggaatctaagtcagctgcactaatgtgacagagactggtgctaataattactgacatttggagaggacctgatggcttggacatcacttttcacaccctttattctttttaatccttactacatccccgagaggcagacttttatcattacctccattttacagaagacaaaatggagttctccaaacttgccgaaggcttcacagctggccattagatacccgcacccgacctccttcccctcgttgtcctgtgaggaaacgatgaggagacttctcagctccactccattttacaccaatcaggctccaaaggcctccttggtgaggtagaaaaacagattctacccaaggctgctggtgctgctggtgtgacttataaggagaatttgcagttcccaggctttagttgaacctgcctgccctaggaatctgttcttgaagacaacagcaaggtattcctgggggcttctgcttggtggtagattacttgcaaagatggctgccaaggagtccttcaattcctgatgcacagtggttatgggttgaattgtgtccccctaaatatgctggggtcgtaaccctgagtaccacaagatatgaccttagttgaagataaggcatgatatattgtttgtgtgtatgtgtgtatgtatatatatacaccgtatattgtgtgtgtgtgtgtatattacacacacaatatactgtgtatatatatacgcacacacacacgatattgtgtatgtacatatacacccacacatacacacacgattatattgtgtatgtgtatacacacacacacacatgtttttgtccatggttcttagttcataactcccatagcccttattatttcctaaatgaccaaaacatatcttttgttaaaattatttgtccttttgtctttggttcctgaagtagcttcagaacagcttcagagccatgaaggtgaaaggcagtctttcgttataatgttgggggactttaggcctcagaagacagaactgctctctctgaccttcttcatctacctttcacctgcttctttttctccccaaggcaggctgtagaaatgaaagatatattctaatttccccccatctttctgtcttggagctagccataaagaaattctctgacttatctaattgcaggtcataaaatcctcatttcagaggggtcttgccccattccctggaggaaggactgctgcacggagaggctaagaagaatctgaacagacaggccttgctgggtttccccactcagtctattagtattagattataccctttttgtctaatcacatttctacacagttgtccttataccaatcatgtctatccgatgaagtctccataaaaggcctaagaggaggggtttggggagtttctggacagctgaactcataggaacatgaacaagaactcatccacgtgcccagagggtgttgtaccccaactcataagaatggaagctcctgttctcaggatacttccagacctcgcctgtataatcccttcatctggctatttatttgtattatttaaataaagatattacattaattaa

SEQ ID NO: 56120 - DNA, 5446 bp, Homo Sapiens; identical to SEQ ID NO: 31406

SEQ ID NO: 56121 - DNA, 1485 bp, Homo Sapiens
tgcacagttcttgaaggtgggaacagaagagaaggcccgggggggccggggagggggtacccaggctctgcacagtacccaaggggcttctggcagcaggaaggaagctacacatcagagttggggacttgtgccctggggctgcctggcatctgggggcctcctcagagccagggctctttctggttgaggctgagactcactggtgtcatcaggcccctccatgaatgagacaaacaaaacacttgttgggccttcggagctccccacagcgtctgctgtggcccctggcccaggcactggggctcgggcatggcctgtgctggtaggatttgtgctgggggctgtggtcctctcgctcctcattgcacttgctgccaaatgccacctctgccgccgataccatgccagctaccggcaccgcccactgcctgagacaggaaggggaggccgcccacaggtggctgaagatgaggatgatgatggcttcatcgaggacaattacattcagcctgggactggcgagctggggacagagggtagcagggaccacttctccctctgagctcccatctttagaccctccccactccctccatgcctgacagcttaaggacagtggttatgacatgggggccttgaacctcagggacagaggtggctggggcttaaaggttggccagggatggagtaaaccccacttccctgacactagccagcaaagtgacaatgaccctctcttgctcaataactctcaactgttccctgctgttctcaggataaagccaaacaaaggcttgagtgtggacataaggccctctgtgatcatgcctctcggcctcttggtttcttttcttgccttcccctactttactgtcgaaatcaatgctattctccctcccaccacttcccatgcagtttccccaggcacctttgctcacattggtccccctgcctacgctactcttcccctaaatcctctatgactgtgatggcctgcctacctgccagcatttcaaatatgcccagatggtaacatttgtgcaggtgaaaaccagtgccaagcttccttttttttttttttcctgagacggagtctcactctgttgcccaggctggagtgcaatggcacatcttggctcactgcaacctccgcctcctgggttcaagcgattctcctgcttcagcctcctgagtagctgggattacaggcatccgccaccacgcccagctaatttttatatttttagtagagacgaggtttcgccatattggccaggatggtctcgaactcttgacctcaggtagtccgccttcctcggcctcccaaagtgctgggattacaggcgtgagccaccatgcccggccagcttcttaatgaaatattttcctataaataaagtgggtaatccggttataatatgtttttcacaggaattaataaatctattttcattttgaataaaaaaaaaaaaaaaaaaaaaa

SEQ ID NO: 56122 - DNA, 2218 bp, Homo Sapiens
acgagactctctcctcctcctcacctcattgtctccccgacttatcctaatgcgaaattggattctgagcatttgtagcaaaatcgctgggatctggagaggaagactcagtccagaatcctcccagggccttgaaagtccatctctgacccaaaacaatccaaggaggtagaagacatcgtagaaggagtgaaagaagaaaagaagacttagaaacatagctcaaagtgaacactgcttctcttagtttcctggatttcttctggacatttcctcaagatgaaacttcagacactttggagttttttttgaagaccaccataaagaaagtgcatttcaattgaaaaatttggatgggatcaaaaatgaatctcattgaacattcccatttacctaccacagatgaattttctttttctgaaaatttatttggtgttttaacagaacaagtggcaggtcctctgggacagaacctggaagtggaaccatactcgcaatacagcaatgttcagtttccccaagttcaaccacagatttcctcgtcatcctattattccaacctgggtttctacccccagcagcctgaagagtggtactctcctggaatatatgaactcaggcgtatgccagctgagactctctaccagggagaaactgaggtagcagagatgcctgtaacaaagaagccccgcatgggcgcgtcagcagggaggatcaaaggggatgagctgtgtgttgtttgtggagacagagcctctggataccactataatgcactgacctgtgaggggtgtaaaggtttcttcaggagaagcattaccaaaaacgctgtgtacaagtgtaaaaacgggggcaactgtgtgatggatatgtacatgcgaagaaagtgtcaagagtgtcgactaaggaaatgcaaagagatgggaatgttggctgaatgcttgttaactgaaattcagtgtaaatctaagcgactgagaaaaaatgtgaagcagcatgcagatcagaccgtgaatgaagacagtgaaggtcgtgacttgcgacaagtgacctcgacaacaaagtcatgcagggagaaaactgaactcaccccagatcaacagactcttctacattttattatggattcatataacaaacagaggatgcctcaggaaataacaaataaaattttaaaagaagaattcagtgcagaagaaaattttctcattttgacggaaatggcaaccaatcatgtacaggttcttgtagaattcacaaaaaagctaccaggatttcagactttggaccatgaagaccagattgctttgctgaaagggtctgcggttgaagctatgttccttcgttcagctgagattttcaataagaaacttccgtctgggcattctgacctattggaagaaagaattcgaaatagtggtatctctgatgaatatataacacctatgtttagtttttataaaagtattggggaactgaaaatgactcaagaggagtatgctctgcttacagcaattgttatcctgtctccagatagacaatacataaaggatagagaggcagtagagaagcttcaggagccacttcttgatgtgctacaaaagttgtgtaagattcaccagcctgaaaatcctcaacactttgcctgtctcctgggtcgcctgactgaattacggacattcaatcatcaccacgctgagatgctgatgtcatggagagtaaacgaccacaagtttaccccacttctctgtgaaatctgggacgtgcagtgatggggattacaggggaggggtctagctcctttttctctctcatattaatctgatgtataactttcctttatttcacttgtacccagtttcactcaagaaatcttgatgaatatttatgttgtaattacatgtgtaacttccacaactgtaaatattgggctagatagaacaactttctctacattgtgttttaaaaggctccagggaatcctgcattctaattggcaagccctgtttgcctaattaaattgattgttacttcaattctatctgttgaactagggaaaatctcattttgctcatcttaccatattgcatatattttattaaagagttgtattcaatcttggcaataaagcaaacataatggcaacagaaaaaaaaaaaaaaaaaaaaaaaaaaaaaaaaaaaaaaaaaaaaaaaaaaaaaaaaaaaaaaaaaaaaaa

SEQ ID NO: 56123 - DNA, 4642 bp, Homo Sapiens; identical to SEQ ID NO: 30517

SEQ ID NO: 56124 - DNA, 4192 bp, Homo Sapiens
ggtcgttcgccctaaaggtaccaatatggcggaggcttcttttggaagttcgagcccagttgggtctttgtcttctgaggatcatgattttgaccccactgctgagatgttggtccatgactatgatgatgaaagaactcttgaagaagaggaaatgatggatgagggtaaaaacttcagttcagaaattgaagacttagaaaaggaaggaaccatgcctctagaagatttactggcattctatggctatgaacctacaattccagcagttgcaaattccagtgcaaatagttccccaagtgaactggcagatgaactaccagacatgacactagacaaagaggaaatagcaaaagacctgttgtcaggtgatgacgaggaaactcagtcttctgcggatggtctgacgccatctgtgacttcccatgaaacttctgatttcttccctaggcctttacgatcaaatactgcatgtgatggtgataaggaatcagaggttgaagatgttgaaacagacagtggtaattcacctgaagatttgaggaaggaaataatgattggtttacaatatcaggcagagattcccccttatcttggagagtacgatggtaatgagaaagtatatgaaaacgaagaccagttactttggtgtcctgatgtggttttggagagcaaagttaaggaataccttgttgagacttcattaaggactggcagtgaaaaaataatggataggatttctgcaggaacacacacaagggacaatgaacaggcattatatgaacttctcaagtgtaaccacaatataaaggaagcaatcgaaagatactgctgcaatggaaaggcctctcaaggaatgactgcatggacggaagaagaatgccgaagctttgaacatgcactcatgctttttggaaaagattttcatcttatacagaagaataaggtgagaactaggacagttgctgagtgtgtagcattctactatatgtggaagaaatctgaacgttatgattactttgctcaacagacaagatttgggaaaaaaagatataaccatcaccctggagttacggactatatggatcgtttagtagatgaaacagaagctttgggtgggacggtaaatgcttcagccttaacttctaaccggcctgagcctattcctgatcaacagctaaacattctcaactccttcactgccagtgacttgacagctttgaccaacagtgtagcaaccgtctgcgaccccacagatgtgaattgtttggatgatagctttcctccactgggcaacacaccccgtggacaagttaatcatgtgcctgttgtaacagaagagttactcaccctgcccagcaatggggaaagtgattgttttaatttatttgagactggattttatcactcggagctaaaccctatgaacatgtgcagtgaagagtcagagagaccagcaaaaagattgaaaatgggcattgccgtccctgaatcctttatgaatgaagtttctgtaaataacctgggtgtggactttgaaaatcacacacatcacatcaccagtgccaaaatggctgtttctgtggctgactttggcagtctctctgccaacgagaccaatggtttcatcagtgcccatgctctgcatcagcacgcggccctacactctgagtgacctgagtgaggatcccggaactgcgtgtgcagcaccagtaaacttgaggggagctatcaggtttgcatagtctttcactggaagtttgaacctttctcactatgacatcagtgatgtcagtatgtatagaactatatcttgatttatcaagagtattttcatttttcaatccataaatgtggaaatgaactatgatcagcagagttgggaactaagattgaactctgtggtgcagctttaagctctgcttctctcttcctcatctcccaatacctcttccccactcccttctttttctattcttttgtgttccccactgccctcactcccaattttaaaacctgtagacagaggccaccagctcaaaaccagcacagatgttctgaactgaatggtgtggcctctttttgtgtaaattccttttgccgtaatggatgcagtggaataacaatgtttacaggtaccgatcccgatccctgctcaatgtagcatttttttggttttattttcttaataaaagcaggggtaggtttctttaaactgcacaaacatgcaaggattttttaaaaatggaaacttctctcatgttattcaactagagcacttcagtttacaaaacagcaagtccatctttatggaagccagcacaaggaactgtgtgcaaataatgaagacgcttgcttggatcctgtttcaaaattctagaccagggctaccttacacagaattggtcatgttactgccaggagatttctgtgtaacttcatttattggctacagttttggcatttgaagatgtggtactcagatggggttttgtccaccattgtcaagattgtaatcttaaaaatcataccagtcattgataatttagtttatcctgaggcagtcgacttgcagaggcacagtctacaaagcctaggatattgccactcaatggtttacattttgggacatcttttaagttgtttgtagcactgcagttcaaagtgttaatatttagagggacttctagattttatacctaatgcagtagaaccttgaagtatatttaagcttttttgttaagcttgaacagttggcaagaataatgtgagttcctatctgaaatagaatggtacattaccacttttaagttttaaaaattgatagatgttcagatgtatctcaaactcagttttatttttattccaaatattgtgaatgagaagccattgtcctaaactttggccatttttgtgctataaacatgcatttttaagttataaggtgaatcaaacaatatgtaatacagtattaggatgtaatctttgcttttgtagtactgttaaaatagagaattatgttgtttgcaccgtcttaattaaaattcttgatttttactagttgctttgcaaaaaacaaatgtttggctgcattgctaatatttgtaagtataagttgcttcaaggttgtgctgatgagtagataggatgtagtgatcttagtagtgattgaaagggagggtatttattatacaaactgtgaactgcaatgacatccttagttttggatgatgtgtattcttgtttttctttgcagcattttaatgaagattgctttgaagtgtttacgcagtagcacattagtataaaatttagtttagcacagtgggcaaaaagtagttaaattaataacttaaaatcagtctctaatttatacatctgaagtatagcattcctgtatgcacacagtaaataatgggtagcctgggctctgtgttactttcttgtatttttatccaagttgtcagcttcttattgctgtgttgttgtgctaaactttgaaccttatttcttttattaaaaatcagtacactttctataatttagtaagatactggccataatcttccattgttataaccttaattttcactctgggtttacagtggctggtctgtataaataatttacacaaagatgactgaatgctaataccagttgcacttaaatgaacatgcccattctcagtagctgatgcagtaatatattcagtttatctatgcattgctggggtcttgatataagatggaaacagtgtttcttatctaaagttttgattatcagcaagttgaatggacactttagttatttaaataaagatttttgaccaaaatccagaaaatggtatgagagaaaaataaattccagctagtttaatagatttttaaatgtcaatctgattttagcctcttagagagtgctaactagctggtaatgtttacttttaattccttgttaaaatgaggcaataatttgcaagatttttgtatataagtgtaaattcttcatatctttttagatctaattcaatattttctgactacttctgccatgtataataccatttttgtgcatgcttgatgtgacattcataaattgtaccactatgactttatccatgtaaaatagctatttattgaattttcttttaaaagctaaaaaaaaaaaaaaaaaaaagaaaaaaaaaaaaaaa

SEQ ID NO: 56125 - DNA, 5059 bp, Homo Sapiens
ctggttctcaacttcttttgaaataatgttcatagagaaggagggctgtctgagattcgagggaaacaagctctcaggacttccggtcgccatgatggctgtgggcggtaaacgcggttagtgcaagcatctgggccatcttcaatggtaaaaaagatacagtaaagacataaataccacatttgacaaatggaaaaaaaggagtgtccagaaaagagtagcagcagtgaggaagagctgccgagacgggtatacagggagctaccctgtgtttctgagaccctttgtgacatctcacattttttccaagaagatgatgagacagaggcagagccattattgttccgtgctgttcctgagtgtcaactatctgggggggacattcccaggagacatttgctcagaagagaatcaaatagtttcctcttatgcttctaaagtctgttttgagatcgaagaagattataaaaatcgtcagtttctggggcctgaaggaaatgtggatgttgagttgattgataagagcacaaacagatacagcgtttggttccccactgctggctggtatctgtggtcagccacaggcctcggcttcctggtaagggatgaggtcacagtgacgattgcgtttggttcctggagtcagcacctggccctggacctgcagcaccatgaacagtggctggtgggcggccccttgtttgatgtcactgcagagccagaggaggctgtcgccgaaatccacctcccccacttcatctccctccaaggtgaggtggacgtctcctggtttctcgttgcccattttaagaatgaagggatggtcctggagcatccagcccgggtggagcctttctatgctgtcctggaaagccccagcttctctctgatgggcatcctgctgcggatcgccagtgggactcgcctctccatccccatcacttccaacacattgatctattatcacccccaccccgaagatattaagttccacttgtaccttgtccccagcgacgccttgctaacaaaggcgatagatgatgaggaagatcgcttccatggtgtgcgcctgcagacttcgcccccaatggaacccctgaactttggttccagttatattgtgtctaattctgctaacctgaaagtaatgcccaaggagttgaaattgtcctacaggagccctggagaaattcagcacttctcaaaattctatgctgggcagatgaaggaacccattcaacttgagattactgaaaaaagacatgggactttggtgtgggatactgaggtgaagccagtggatctccagcttgtagctgcatcagcccctcctcctttctcaggtgcagcctttgtgaaggagaaccaccggcaactccaagccaggatgggggacctgaaaggggtgctcgatgatctccaggacaatgaggttcttactgagaatgagaaggagctggtggagcaggaaaagacacggcagagcaagaatgaggccttgctgagcatggtggagaagaaaggggacctggccctggacgtgctcttcagaagcattagtgaaagggacccttacctcgtgtcctatcttagacagcagaatttgtaaaatgagtcagttaggtagtctggaagagagaatccagcgttctcattggaaatggataaacagaaatgtgatcattgatttcagtgttcaagacagaagaagactgggtaacatctatcacacaggctttcaggacagacttgtaacctggcatgtacctattgactgtatcctcatgcattttcctcaagaatgtctgaagaaggtagtaatattccttttaaattttttccaaccattgcttgatatatcactattttatccattgacatgattcttgaagacccaggataaaggacatccggataggtgtgtttatgaaggatggggcctggaaaggcaacttttcctgattaatgtgaaaaataattcctatggacactccgtttgaagtatcaccttctcataactaaaagcagaaaagctaacaaaagcttctcagctgaggacactcaaggcatacatgatgacagtcttttttttttttgtatgttaggactttaacactttatctatggctactgttattagaacaatgtaaatgtatttgctgaaagagagcacaaaaatgggagaaaatgcaaacatgagcagaaaatattttcccactggtgtgtagcctgctacaaggagttgttgggttaaatgttcatggtcaactccaaggaatactgagatgaaatgtggtaaatcaactccacagaaccaccaaaaagaaaatgagggtaattcagcttattctgagacagacattcctggcaatgtaccatacaaaaaataagccaactctgacatttggattctaccatagactctgtcattttgtagccatttcagctgtcttttgattaatgttttcgtggcacacatatttccatccttttatgtttaatctgtttaaaacaagttcctagtagacaccatctggttgagtcagttttttttatggtgtattttgaacccattctgatagtctcttttaactggaagatttcaattacttacgttaatgtaattattaatatgttaggatttatcctcagtcagccagtttgttatgtcttttctattctactgttatcacatttgtaccacttaaagtggaatctaggcactttatcaccatttagatcctattaccttttctcatctaggatatagttatcttctacataatctttctgtatcttaaaacccatcaataaattattatatattttctacttttaatcactcagaagatttaaaaaactcatgagaagagtaatctgttatgtttttccagatatttaccatttctgttgctcttccttcattattttccaaatttcgttctgcaaatttccacttcttctgatagacgttttttagttcttttagagtggttctgataggtacagattctcttattttttgcttcctctgaggacatctttttctcaccttcattctcagtgatgttttttgcttgtagtatttttagttgacattgttttctgttcagcagtttccttttagcttccgtatttcctgatgagaaatctgcagtcattcaaattgttgtttccctgtatgtagtgtgtcatttttctgtcagatttcaaggtatttatctttagtttttagccatttcattatgttggggatgagtttccttgttttattccctttggaatttgctccaattcataaatttgcagttttatgtcttttaccaaacttagaggttttcagcctaatttctaaaaatactttttattagcctgattttcatctttataggaaatagtttaagtgatgacaagttccaatagcttatatgcccagaaggccttcaaaataagaattttgaaagaatacagaaaacaaacttttatatccttctcatgtcttctactgtaaaattcatatgctttgctactctaaacctagtttgaaatcaacagtcttgagaatagatgaaaattttgatgaatagtggaattcttttaaatggaaacctcttacatgtgattttccttgccatctagaaataaaccatagtatttatgttgaatcaatcaatattatattttgtttttttcctcctcttctgagactcttattgtggaaatgttagacttttatgttttcctaaatgtccctgatattctacttatttagaacatcttttcattttttccattattctgattgggtaattttaatttgtctattttcaaatttgctggagtgttcacctgttgttgtctgtgtcgtcccactgagtgcattcaccaccttttaaattttggtcactgtatgtatcagttctaaaatttccattttgttctctatattttaaatttcttggcttatattctattttcctgcaaatgtgtcagcatttgcttgtttgagctttttttttttcaagacagggtctcaactctgttacccaggctggagtgcagtggtgcgatctcagctcactgcaacctctgcctcctggttcaagcgattattgtgcctcagcctcctgagtagctgggattacaggcatgcaccaccacagcccagctaattttttgtatttttagtagagacagagttttgctatgttggccaggctggttttgaactcctggcctcaagtgatccacccacctcagcctcccaaagtgctgggattacaggccactacacctggcacatttgagtattttttttttttttttttttttgagatggagtctcgctctgtcatctaggctggagtgcagtggtgtgatctcagctcactgcagcctctgtctcccgggctcaagcgattctcttgcctcagcctcctgagtagctaggactacaggtgcatgccaacacgcccggctaatttttttaaaaaatatttttagtagagacagggtttcaccattttggccaggatggtctcgatctcctgacctcatgatccacccgcctcggccttccaaagtgctgggattacaggcatgagccaccgtgcctggcctcatttgagtatttttataatgtctcttttaaagtctttgtcagataattccactgtacatgttattcagtgtttggtgtccactgagttgtcatttgccagacaagtggagatttttgcagctcatccttgtattctcagtagttccgatatgtaccctcgacatgtgaatgttatcttatgagactctgttttatttgtatccaacagaagatgtttattatttatttggctttctgtgaactgaggtcttaatatcagctcattttaaaagtctttgcagtggtattcggatctatcctgtgtgtgcctatgagattgggtgcagtgtatcctgttagctccattctcagggcgtttgaatgtgaattaggaccagcgcaatgaatgctcaagttggggttgggcgttagaattcataaaagtctttatatgctcag

SEQ ID NO: 56126 - DNA, 2629 bp, Homo Sapiens
accgccccgcgctccgctgccaggggcgggagggaggaatggttgcttcacgccccgggggaagagacgggaagctcggctctgggttgcgggccccggcgtctccgcgtggggcgcaccgtccgacccccccctcccggtgtgcagcgccccgcaccgccccgcctcgcctgggagaagccgccgggacgcgccgggctggagtgggcggttataggctttgagctaggccgtttccgggaggcggagctcagaccccatttcctttctccacatccaggtcaggtggcgtttgctgtggcggctaggcccgcgtgcgctggagacctccgcgctggcccccgcgagcctcctgccctggcccggcgctgcggctctgccgcggcggcagcatgggtggcccccggggcgcgggctgggtggcggcgggcctgctgctcggcgcgggcgcctgctactgcatttacaggctgacccggggtcggcggcggggcgaccgcgagctcgggatacgctcttcgaagtccgcaggtgccctggaagaagggacgtcagagggtcagttgtgcgggcgctcggcccggcctcagacgggaggtacctgggagtcacagtggtccaagacctcgcagcctgaagacttaactgatggttcatatgatgatgttctaaatgctgaacaacttcagaaactcctttacctgctggagtcaacggaggatcctgtaattattgaaagagctttgattactttgggtaacaatgcagccttttcagttaaccaagctattattcgtgaattgggtggtattccaattgttgcaaacaaaatcaaccattccaaccagagtattaaagagaaagctttaaatgcactaaataacctgagtgtgaatgttgaaaatcaaatcaagataaagatatacatcagtcaagtatgtgaggatgtcttctctggtcctctgaactctgctgtgcagctggctggactgacattgttgacaaacatgactgttaccaatgaccaccagcacatgcttcacagttacattacagacctgttccaggtgttacttactggaaatggaaacacgaaggtgcaagttttgaaactgcttttgaatttgtctgaaaatccagccatgacagaaggacttctccgtgcccaagtggattcatcattcctttccctttatgacagccacgtagcaaaggagattcttcttcgagtacttacgctatttcagaatataaagaactgcctcaaaatagaaggccatttagctgtgcagcctactttcactgaaggttcattgtttttcctgttacatggagaagaatgtgcccagaaaataagagctttagttgatcaccatgatgcagaggtgaaggaaaaggttgtaacaataatacccaaaatctgattggtcatatttttccaaagagtaatgcagtctggatataaatgtattttctgtcttccttataaggggattctcccagctgctaaatttaaacagtaaatatcacattttgtcattaacacagctataacttgccgtggttctcagatttattttggactattttgatgccaagtgaatataagagtttgtactgaaaccatttatttctttctattttgctatttgcaaatgcttgttatcttccctacatgaagtggcagtaacctttttcacatttaagctacccttctaccttttgaagtgatttgcagttactcatctgagacagcatcagtatttgactaaatcattgtttcacaactgaatagtcttgttcttttagtagcaatgaaatcctaagctcttgaggccattcacctgccaacctgaccatactgctttcaaaagtcttttctcatcagtagaatctattttggtcacttctagtcaatgaaaaatgtaaacttttaggagagaatgtttcctaggactcacccactccattcaatgttacatataaaatagtgtgatcaatcacaatgtccatctttagacagttggttaaataaattatctggtctttgaaaagaccgtgctgggcgcggtggctcttgcctgtaatcccagcactttgggaggctgaggcgggcagatcacctgagatcgggagtttgagaccaagcctgaccaatatggagaaaccctgtctctactaagaatacaaaattagctgggcatggtggtgcatgcctgtaatcccagctacttgggaggccgaggcaggagaattgcttgaacccgggaggcagaggttgcagtgaggtgagatagcgccattgcactccagcctgggcaacaagagcaaaactctgtctcaaaaaaaaaaaaaaatgatggagctccgaatgtgcttaagtggaaagatatctatgaaatatggtggttttttaaaacacaaaaattatagaatatgggatcccgtgtgtgtgtgtgtgtgtttgaatgaaaaatgcttatgtattgacagaacacttctagaatgatacccaaactcctggagtgggagtggggaatgccttctacgtacacactgttctactgtttgaattttttaatatgagcccaaattgtataatctttttttaataaaggggagaaaaatc

SEQ ID NO: 56127 - DNA, 1896 bp, Homo Sapiens; identical to SEQ ID NO: 30011

SEQ ID NO: 56128 - DNA, 2189 bp, Homo Sapiens
agccgtggtggttatggctggcctgagcggcgcgcagatccccgacggggagttcaccgcggtcgtgtaccgcctcatccgcaatgcacgctacgccgaggcggtgcagctgctgggcggagaactgcagcggagccctaggagccgcgccggcctgtcgctgctaggctactgctactaccgcctgcaggagttcgcgctggcggccgagtgctatgagcagctgggccagctgcacccggaactggagcagtaccgcctgtaccaggcccaggccctatacaaggcctgcttttatgcggaggccacccgggtcgccttccttctcctggataaccccgcctaccacagccgggtcctccacctgcaagctgctatcaagtacagcgagggcgatctgccagggtccaggagcctggtagagcagctgccgagtagggaagggggagaggaaagtgggggcgagaatgagaccgatggccagatcaacctgggttgtttgctctacaacctggctttggcctattacagcagccgacagtatgcttcagcactgaagcatatcgctgagattattgagcgtggcatccgccagcaccctgagctaggtgtgggcatgaccactgagggcattgatgttcgcagtgttggcaacaccttagtcctccatcagactgctctggtggaagccttcaaccttaaggcagctatagaataccaactgagaaactatgaggcagctcaagaagccctcactgacatgccacccagggcagaggaagagttggaccctgtgaccctacacaaccaggcactaatgaacatggatgccaggcctacagaagggtttgaaaagctacagtttttgctccaacagaatccctttcctccagagacttttggcaacctgttgctgctctactgtaaatatgagtattttgacctggcagcagatgtcctggcagaaaatgcccatttgatttataagttcctcacaccctatctctatgacttcttggacgctgtgaccacttgccagacagctcctgaagaggctttcattaagcttgatgggctagcagggatgctgactgaggtcctccggaaacttaccatacaagtacaggaagcaagacacaatagagatgatgaagctatcaaaaaggcagtgaatgaatatgatgaaaccatggagaaatacattcctgtgttgatggctcaggcaaaaatctactggaatcttgaaaattatccaatggtggaaaagatcttccgcaaatctgtggaattctgtaacgaccatgatgtgtggaagttgaatgtggctcatgttctgttcatgcaggaaaacaaatacaaagaagccattggtttctatgaacccatagtcaagaagcattatgataacatcctgaatgtcagtgctattgtactggctaatctctgtgtttcctatattatgacaagtcaaaatgaagaagcagaggagttgatgaggaagattgaaaaggaggaagagcagctctcttatgatgacccagataagaaaatgtaccatctctgcattgtgaatttggtgataggaactctttattgtgccaaaggaaattatgactttggtatttctcgagttatcaaaagcttggaaccttacaacaaaaagctgggaacagacacctggtattatgccaaaagatgcttcctgtccttgttagaaaacatgtcaaaacacacaatcatgcttcgtgatagtgttattcaagaatgtgtccagtttctagaacactgtgaacttcatggcagaaacatacctgctgttattgaacaacccctggaagaagaaagaatgcatgttggaaagaatacagtcacatatgagtctaggcagttaaaagctttgatttatgagattataggatggaatatatagtaatagctgatagtggcatttatcaaatggctttgttatgtaaatttgcatcgctttatttaccctttggcatctttatatttgttacatgttgaactttgtacacttatgcattataaaaaaaaaagtagctaaaacttttgctgttaaatttcccagaaagtgacatattctaagaacttttaccccaggagttatgaaaaattccaaacttatgaggaatgtttatatcagaagttgtaatacgtttgtttccttt

SEQ ID NO: 56129 - DNA, 1723 bp, Homo Sapiens
agcaacatgcccgcagagaattcttccggaggcggtcacagacatctccgtgacgcagaacgagttagagcgtcccttggggtttccatggtgctgcccttagcctgcagtatctccacttcctctcccgcctgagcgccgggaacggaaaagcaggcggccggtcccagctgcgacgtagacgccgcgtgggggtggggttgggcgagtaggtgacgctctaggcgagctcgttggcctctctatggtgccgagcgcgcccgttcggacgttgcccctttaatcggcagagggcggtgcccaggaggtcccgcgagagctgcggggggcgggggggcggtgccgaggctgggggccggtggcggatggagcccgcgatggagccggagactctggaggcgcgaatcaatagagccacgaaccccctgaacaaggagctcgactgggccagcatcaacggcttctgcgagcagctcaacgaggactttgaggggcctccactcgccacccggctgctggcccacaagatccagtccccacaggagtgggaggcgatccaggccttgacggtgagaaggggagaggccaccatccgtcccccgccatgtgacgacaccaagggaggccaagactgaggttcttggggtccataaggctcttcagagcccaagagagttgtgctaagatggcccaggatggaggtccgggcctgccccaagggtcccaccacagccagcgggctggcctcccaccccagcatccatacacgtaggcctgttgctgagggaaggccctctagggtcatctggtccaggggttctttgcttcagctgcacatcggctgcctctccaggaagcgtgttcaacacatggaatcagggctccacccagacctgccgaggccacactcctggagtatctgcatccagagatctgcacgtttgtaaagctaaggggtggtgcttgggctcaggcctgaggttttgcatctgttcaatagcagaggagagaggggtgtactgtctgtggcccccagcatgggccacataccaacccaccatggagcaaagctgattttaagtggtggtagagatacagtttctcttttaatacttacgtgtttagttgggtgcagtggcttatacctgtaatttcagcacttggggaggccaaggcaggaggcttgcttgaggcaaggagttcaaggctacagtgagctatgattgtgccactgtactccagactggacaacagagtgagaccccatctctaaataataatcattattgttacatatttgttttaacatttttttctcaagtataactagtcctatgatttcatagatgtagcttaggataaggccaaggtagatgttgcctatataaggtttttttaaaaaaggaaaaataggccgggctggtggctcacgcctgtaatcccagcactttggcaggctgaggcgggcagatcacctgagatcaggagttcaagatcagcctgaccaacatggagaagccccatgtctactaaaaataaaaaattagcgaggcgtggtgggcgggcgcctgtaatcccagctacttgggaggctgaggcagaagaatcatttgaacccaggaggcagaggttacagtgagccgagatcgtgctactgcattccaacctgggcaacaagagtgaaactctgtcccaaaaaaaaaaaaaaaaaaaaaaaaaaaaa

SEQ ID NO: 56130 - DNA, 6492 bp, Homo Sapiens
tcatttgctgattgtgttggggatgagctgccgtggggatgggaagcagggtttgaccctcagattggtgtctactacatcgatcgcatcaacaaaaccacgcagatagaagatccaagaaaacaatggaggggggaacaggagaagatgctcaaggactacctctctgtggcacaggatgccctccggacacagaaggaactgtaccatgtgaaggagcagaggctggcgctggccctggatgaatacgtgcgattaaatgatgcctataaggaaaagtcaagttctcacacaagcttattctcaggatcttcatccagtactaaatatgatcccgatattttaaaagctgagatctccactacaagattaaggaattgataaaaaaatgtctggaggccagagcgggtatgaactcagtgaagccaaagccattctaacagaactaaaatctatcagaaaggcaattagctcaggagaaaaagaaaaacaagatctgatgcagagtcttgctaagctgcaggagcggtttcatttggatcagaacattggcagatctgagccagatttgagatgtagtcctgtgaactctcatttatgtctctccagacagacccttgatgctgggtcacaaacaagcatttccggagatattggagtaagaagtagatcaaatttagctgaaaaggtcaggctaagcctacagtatgaagaagccaaaagaagtatggccaacttaaaaattgaactgtcaaaattggacagtgaggcctggcctggggcactggatattgagaaggaaaaactgatgctgattaatgaaaaagaagaacttttgaaagagcttcagttcgtcaccccacagaaacgtacccaagatgaattagaacgcctagaagctgaaaggcagcggctggaagaagagttgctgtctgtgaggggaacaccaagcagagctctggccgagagattgagattggaagagagaagaaaagagctgctacagaaacttgaagaaactactaaattaactacttatttgcattcacaacttaaaagcctctctgccagcaccctgtccatgtcatctgggagcagcctgggttccctggcatcgagtcggggctctctgaacacctccagcagagggtcactcaactccctcagttccaccgaactctattacagcagtcaaagtgatcagatagatgtggattatcagtataaactggacttccttctgcaagagaaaagcggttacattccttctggacccatcaccaccatccatgaaaacgaggtggtcaagtcccctagccagcctggccagagtggactctgtggagtggcagctgcagcaacaggccacactcctccactggctgaggccccgaagtctgtggcctccctgtcctcgaggtcctccctttcctccttgtctcctccaggctctcccttggttttggaaggcacgtttcccatgtcttcttctcatgatgcctctctccatcagttcactgctgactttgaagactgtgagttgagtagccattttgcagatatcagcctcatcgaaaatcagattttgctggattctgattcaggaggagcctcccagtctctttcagaggataaagaccttaatgaatgtgctagggagccattatatgaaggaactgcagatgtggaaaaatcattaccaaaaagaagagtgatccacttgcttggggagaaaaccacttgtgtgtcggctgctgtgtctgatgagtctgtggctggagacagtggggtctatgaagctttcgtgaaacaacctagtgaaatggaagatgtcacatacagtgaagaggatgtagccattgtagagaccgcccaggttcagataggactcagatacaatgcaaaaagttcaagtttcatggtgattatagcacagctccgaaaccttcatgccttcttgatacctcatacttcaaaagtatattttagggttgccgttcttccttcctcaactgatgtcagctgtctgtttcgcacaaaagttcatccgcccacagaatccattttattcaatgatgtgttcagagtcgccatttcccaaacagccttacaacagaagacactgagggtagacctttgctctgtcagtaaacaccgaagggaagaatgcctggctggaactcagatcagcctggcagatttaccattttccagtgagtttttcactctatggtataacttgcttccttccaagcaaatgccttgcaaaaagaatgaagaaaatgaggactctgtatttcaaccaaaccagccgttagtagattctatagacttggatgcagtgtcagccttacttgcaagaacatcagctgagttgttagctgtggaacaagaattagcacaagaagaagaagaagaatcaggacaagaagagccaaggggcccagatggagactggctaacaatgctaagagaggcctctcatgaaattgtggctgaaaaagaggctgaagttaaattgccagaggacagtagctgtacagaagatttaagttcatgcactagtgtgcctgagatgaatgaagacgggaacaggaaagaaagcaactgtgccaaagacctcagaagtcagccacctactagaataccaacactggttgacaaagagacaaacacttatgaagccgctaatgacaatatggcagttcgccccaaagagcgcagcagcctgagctctagacagcatccgtttgtgaggagcagtgtgatagtgcgctcacagaccttttctccaggagagcggaaccagtacatctgcaggttaaatcggagtgacagtgacagttcaaccctggctaaaaaatcactgtttgtgagaaactccaccgaacgccgcagtttgagggtcaaaaggacggtttgccagtcagtccttagaagaacaacacaggaatgcccagtgcggacatctctagacttagaactggaccttcaggcatctctgacccggcagagccgcctcaatgatgagctgcaggcgctgagggacttgcggcagaagctggaggaactgaaagctcagggagagactgaccttccaccaggcgtgctggaggatgagaggttccagaggcttctgaagcaagctgagaagcaggctgaacagtccaaagaagagcagaagcaaggtctgaatgcagagaagttgatgaggcaagtctccaaggacgtgtgtcggctccgggagcagagccagaaggtgcctcggcaggtgcagtccttcagggagaagattgcctacttcaccagagcaaagataagcatcccatccctgccagctgatgatgtgtgattacatgacttaagaaattattttttcatctgttcactttcttagggagggtaaaagactgaagatttgtgtttttgttttggtgtttggttttttttggtaacgtaactgtcaactcttgaagaacttttatttcacatcagattttcaacacattaatttgtaaagtaccttgagtgtaatttttatatgcttaaaaaagaaaaaatcatataagaaagatgggataacctggtacacaaatgttgcccagtatgtgcgcattgccagtggacttcattttgtaaaaatggaatagaggcagtaccccaccatgtgtactgttgagccggctgttgagaaacaacttggttcagccggtggttttgcttctcctttgtgttcctgtgagtaggctgtgccgatggcagcagcgccacgtggtatctgtgcgctggcgaggagaggagcgctttccatttggaggcagtgtgagcacacgctggagtgcagcgttccaaagtccgcccgaaatggatgctgcgtccacggccatcacctgtgcgggaacacctggtttccttaagacaatttcctttttgtccttttatatttttctaaagaaaactaagatataaactaccaagtgctcttaagaataaaaataagaataagaatacaaaggagcactactcttggctacacgaaagatcttgggattcatgacactgagggcagggagaagaaagaacaccagccacgcagagatacaaataagctcatcaaatgagcagctggtttgtctcactcagcctgaatttgcattaagtgttcaaaagtgggtttctggcttgcactagtgttttgccctaaatctaaggatggtgcctagtggtggccctgtgttctgaggacagagagagctggaggggtggagggaaatgcatcggcactcatttggtgtaaccaagaagagggggaaagatgtcttgatagaatcaaagttgccaaaaacaaagaagagtttatcaagcagatttctaacatttagtggaaactacttcatagctctcatttttagggggttctatctataatttatggtaaatagttgggaggcaaagggaagaatgtgtgtgggaggattattaatttgaagtataagctaaattgtttattaaaaagcctattttggatgaacaagtttagagagataaactgactaatgtgtcctccagtttagaatttcaccttacccgacccaggcacttcttaaaaacacagatcctcagtgcagctctgccagcatcaaggcttttaaaatatgtagtatttaggccatttaaaccatacttattactcaataacccaagaaacaattttgggttagccatctaatatagcaaataaaatagattttttaaagaaatccaaaattgtcttaaaggaatggaccccttgaagaaaaaaaaaaaaagttttgttcctcagttagaatgctcactagctcactagcaagaatttttattttcttgaaagcaattatatatattttggaaagttcatgttattggaattgaagttcaaattaagcaacttctgagcctagaactttaattactttttcctaaatgtcccaacacttacatacaaatttctttgaagacataactggacatggcagacactgctttgaacaaaaaccagcctagtgaattgactgagtacagtcctttaaggctgcccagttcattctattagatgactaaggaaaactagaaaaagaatacagttcacccttgtcaaggtgaaatgtgaaagacagaagtttatttaatgtagaggtaaatgaaggtgagctgttttcagcatcttagtttgaccatgaaaatgtctatagaattatgtgtagttgttccgtacgattttattttcttcatttatttatttacagtcttatttatgttctgtttaatatatagtttgattctggccattttaaatatttgacacagaagagactatattggaatatttacagctttataagtctttcatcagattagctgttgactttttgtaatacaaaaagtttcagacaagtattaaagaataaaatctgtctcaggctggtagttagcagttgtgaccaagatgcttttggttgttgtatttcacaaaatttcctcatttctaacatgagagatgaacttattttaatataatcctttttctacactttaaaagtcagcaatagtgttatgtatttataggcagcttttaataatcttgtcatatttgtactaacccaaatgattcacagtgacaaaacattttaataacttgatcacaaaaccatatggacaaatatgaattttaatattataaatactatttttaaaaggtagaatttattcgcacagggtaaaaagaatgtaatatttagttctcaagtttgaattatcagtatattattacaattttgtatatcagaatcttaagtgttacaggtacaaaaagaatattgctagccaaatgaacaaagtttagctaaatctctgtagcatgcaaatcaaataaattaaaattttttgctattgctttatctatattgtcttaaatatcaaaagctcaggactgaacttaatatttaatcaggttaaattctgaacatgtttctgttttaatttgtcttgtttgtaaacgtatgcaaatacatcacatagattaactggtttctgcgctttccatgtgtttgtgggtggaaaaaaattcagtggtttttttttaaaaaaaaaagcaaaaacaaagctacatattgcctaatactctatttcagtgtcgtttattgttcagtttatttccctgattggcacaaacacaagagtttccttgaaccatgtaccaagcaaatacaaaatatttcatgaagaaatccccaggctggcagtttgtgatgaatagttcttgttggaactatatgtattgctgataaaaaaggacgaagtattttcattgagcaaataaaatgaagggctccagaaaaaaaaaaaaaaaaaaaaaaaaaaaaaaaaaaaaaaaaaaaaaaaaaaaaaaaaaaaaaaaaaaaaaaaaaaaaaaaaaaaaaaaaaaaaaaaaaaaaaaaaaaaaaaaaaaaaaaa

SEQ ID NO: 56131 - DNA, 3201 bp, Homo Sapiens
gtctgaggaaagacaggaaagcgccagcatctccaccttccccggaagcctccctttgccaggcagaaagggtttcccatggggccgcccctggcgccgcgcccggcccacgtacccggggaggccgggccccggaggacgagggaaagcaggccgggcgccgtgagcttcgcggacgtggccgtgtacttctctcccgaggagtgggaatgcctgcggccagcgcagagggccctgtaccgggacgtgatgcgggagaccttcggccacctgggcgcgctgggattttcagttcccaaacccgcttttatctcgtgggtggaaggagaagtggaggcgtggagcccggaggcccaggatcccgacggtgagagctctgcagctttcagcaggggccaaggacaggaagcaggatccagggatgggaatgaggagaaggaaaggctgaagaagtgtccaaaacaaaaagaggtggcgcatgaagtggctgtcaaggagtggtggcccagcgtcgcctgcccagagttctgcaaccctaggcagagccccatgaatccctggctcaaggacactctgacccgaagactgccccactcttgcccagactgtggccgcaacttcagctacccttccctcctggccagccaccagcgggtccactccggggagcggcccttctcctgcggccagtgtcaggcgcgtttctcccagcgcaggtacctgctccagcatcagttcatccacaccggcgagaagccctacccctgccccgactgcgggcgccgcttccgccagaggggttccctggctatccacaggcgggctcacaccggggagaagccttacgcgtgctcagactgcaagagtcgcttcacttacccctacctgctggccatccaccagcgcaagcacacgggcgagaagccctacagctgccccgattgcagcctccgtttcgcctacacctccctgctggccatccacaggcgcatacacaccggcgagaagccctacccctgtcctgactgcggccgccgcttcacctattcttccctcctcctcagtcaccggcgcattcactccgacagccggcccttcccctgcgtggagtgtgggaaaggcttcaagcgcaagaccgccctggaagcccatcggtggatccaccgctcctgcagcgagaggcgcgcgtggcagcaggccgtggtggggcgttcagagcccatccctgttttgggaggcaaggatcccccagttcacttccggcactttccagatatatttcaagagtgtgggtgatggcgttcacacaaactggtcagcgtttccctggagaggaagaggcaaggtttgtgtatttgggggataaggaaaggaagtgggcgtttgaggaaaacaaagttctgccttaggtaaaaagcagaggtaggggcacagagggctgtggggaggaggcaggaatctgaaaaggtgcctgggggttgaccccattttctgaagctccagcacacagggccccgtgttcacgtcccatccttcactgaaaaccattcacctaactggcttttccttcatgattgttctctcccttgtagctctctgctttttggcctgtatctctcctactcctctgagatggggtcccctacattccagtgcctattaaaggagcctgcacccactctggaccccccagaatagaggggatacctcaggcctgtccctcggctggtgggggggggcggagctcatcccaggattcttttcttttttttgagatggagtcatgctctgtcgcccaggctggagtgcagtggcgtgatctcggctcgctgcagcctctgcctcctgggttcaagccattctctgcctcagccttcccattagctgggattacaggcatgcgccaccaggcccggctaatttttgtgctgttagtagagacggggttccaccgtcttggccaggctggtcttgaattcctgacctcgtgatccacccgcctcggcgtctcaaagtgctgggattacaagcgtgagccaccgacccctgccgaggattctgccttttaccaatgcaggtgaaacatctggcaaggagacacctggagtgtaggtgttccttggtcttgaagacctagaggtggccatagagaggacagtggcctcaggtggggaactccccccccactctcattctgcaagtgcacaaactatcaaacatagcggactctggaactgggccaactcttcactgtatgcattagtgattgcagtgtttttttcttcttcagatatttgcatgttccctggattttgtattttttgataaagatatattcttgggccacagtagctggagatataatgccggaggattctttttttttttttttttttgagacagagtctgtctctgttgcctgggctggagtgcagtggcccaagctacgctcactgcaggctccgcctcctgggttcacgccattctcctgcttcagtctcccgagtggctggaattgcaggcacccgccaccacgcccaactaatattttgtatttttagtagagacgggggtttcgccgtgttggccaggatggtctcgatctcctgacttcgtgatcctcccgcctcggcctcccgaagtgctgggattgcaggcgtgagccactgcacccagcctcttttttttttttgagatggagtttcgctcttgttgcccaggctagagtgcaatggcatgatcttggctcactgcaacctccgcctcctgggttcgggcgattctcctgccccagcctcttgagtggctgggattgcaggcgcccgcgaccatgcctggctaattgcatttttactggagacgggtttcaccgtgttggccaggctggtctccgattcctgacctcgggtgatccacccgacttggcctcccaaagttctgggattacattttttttttaaagaaagaataaattaattgtgattaaagttgaaatcaaggcatagtctttccagtctaatttttactgtaatgcttgtatgtcaacagttatgaaggccaggcgcggcggctcacgcctgtaatcctagcggtttggggggctgaggagggtggatcacttaaggtcaggagttcaggaccagcctggccaatatggtgaaaccccatctctactaaaaataccgaaaaaaaaaaaaaaaa

SEQ ID NO: 56132 - DNA, 3567 bp, Homo Sapiens
gcggccgcgggcgcgggcgggcgcgcgggggagcccggccgagggatgggctgcgcccccagcatccatgtctcgcagagcggcgtgatctactgccgggactcggacgagtccagctcgccccgccagaccaccagcgtgtcgcagggcccggcggcacccctgcccggcctcttcgtccagaccgacgccgccgacgccatccccccgagccgcgcgtcgggaccccccagcgtagcccgcgtccgcagggcccgcaccgagctgggcagcggtagcagcgcgggttccgcagcccccgccgcgaccaccagcaggggccggaggcgccactgctgcagcagcgccgaggccgagactcagacctgctacaccagcgtgaagcaggtgtcttctgcggaggtgcgcatcgggcccatgagactgacgcaggaccctattcaggttttgctgatctttgcaaaggaagatagtcagagcgatggcttctggtgggcctgcgacagagctggttatagatgcaatattgctcggactccagagtcagcccttgaatgctttcttgataagcatcatgaaattattgtaattgatcatagacaaactcagaacttcgatgcagaagcagtgtgcaggtcgatccgggccacaaatccctccgagcacacggtgatcctcgcagtggtttcgcgagtatcggatgaccatgaagaggcgtcagtccttcctcttctccacgcaggcttcaacaggagatttatggagaatagcagcataattgcttgctataatgaactgattcaaatagaacatggggaagttcgctcccagttcaaattacgggcctgtaattcagtgtttacagcattagatcactgtcatgaagccatagaaataacaagcgatgaccacgtgattcagtatgtcaacccagccttcgaaaggatgatgggctaccacaaaggtgagctcctgggaaaagaactcgctgatctgcccaaaagcgataagaaccgggcagaccttctcgacaccatcaatacatgcatcaagaagggaaaggagtggcagggggtttactatgccagacggaaatccggggacagcatccaacagcacgtgaagatcaccccagtgattggccaaggagggaaaattaggcattttgtctcgctcaagaaactgtgttgtaccactgacaataataagcagattcacaagattcatcgtgattcaggagataattctcagacagagcctcattcattcagatataagaacaggaggaaagagtccattgacgtgaaatcgatatcatctcgaggcagtgatgcaccaagcctgcagaatcgtcgctatccgtccatggcgaggatccactccatgaccatcgaggctcccatcacaaaggttataaatataatcaatgcagcccaagaaaacagcccagtcacagtagcggaagccttggacagagttctagagattttacggaccacagaactgtactcccctcagctgggtaccaaagatgaagatccccacaccagtgatcttgttggaggcctgatgactgacggcttgagaagactgtcaggaaacgagtatgtgtttactaagaatgtgcaccagagtcacagtcaccttgcaatgccaataaccatcaatgatgttcccccttgtatctctcaattacttgataatgaggagagttgggacttcaacatctttgaattggaagccattacgcataaaaggccattggtttatctgggcttaaaggtcttctctcggtttggagtatgtgagtttttaaactgttctgaaaccactcttcgggcctggttccaagtgatcgaagccaactaccactcttccaatgcctaccacaactccacccatgctgccgacgtcctgcacgccaccgctttctttcttggaaaggaaagagtaaagggaagcctcgatcagttggatgaggtggcagccctcattgctgccacagtccatgacgtggatcacccgggaaggaccaactctttcctctgcaatgcaggcagtgagcttgctgtgctctacaatgacactgctgttctggagagtcaccacaccgccctggccttccagctcacggtcaaggacaccaaatgcaacattttcaagaatattgacaggaaccattatcgaacgctgcgccaggctattattgacatggttttggcaacagagatgacaaaacactttgaacatgtgaataagtttgtgaacagcatcaacaagccaatggcagctgagattgaaggcagcgactgtgaatgcaaccctgctgggaagaacttccctgaaaaccaaatcctgatcaaacgcatgatgattaagtgtgctgacgtggccaacccatgccgccccttggacctgtgcattgaatgggctgggaggatctctgaggagtattttgcacagactgatgaagagaagagacagggactacctgtggtgatgccagtgtttgaccggaatacctgtagcatccccaagtctcagatctctttcattgactacttcataacagacatgtttgatgcttgggatgcctttgcacatctaccagccctgatgcaacatttggctgacaactacaaacactggaagacactagatgacctaaagtgcaaaagtttgaggcttccatctgacagctaaagccaagccacagagggggcctcttgaccgacaaaggacactgtgaatcacagtagcgtaaacaagaggccttcctttctaatgacaatgacaggtattggtgaaggagctaatgtttaatatttgaccttgaatcattcaagtccccaaatttcattcttagaaagttatgttccatgaagaaaaatatatgttcttttgaatacttaatgacagaacaaatacttggcaaactcctttgctctgctgtcatcctgtgtacccttgtcaatccatggagctggttcactgtaactagcaggccacaggaagcaaagccttggtgcctgtgagctcatctcccaggatggtgactaagtagcttagctagtgatcagctcatcctttaccataaaagtcatcattgctgtttagcttgactgttttcctcaagaacatcgatctgaaggattcataaggagcttatctgaacagatttatctaagaaaaaaaaaaaagacataaaataagcgaaacaactaggaccaaattacagataaactagttagcttcacagcctctatggctacatggttcttctggccgatggtatgacacctaagttagaacacagccttggctggtgggtgccctctctagactggtatcagcagcctgtgtaacccctttcctgtaaaaggggttcatcttaacaaagtcatccatgatgagggaaaaagtggcatttcatttttggggaatccatgagcttcctttatttctggctcacagaggcagccacgaggcactacaccaagtattatataaaagccattaaatttgaatgcccttggacaagcttttcttaaaaaaaaaaaaaaaaaa

SEQ ID NO: 56133 - DNA, 1321 bp, Homo Sapiens
caaccgcgccccccgcgcacggacccccattacactcgcgtcccaggcggggtcgacccagacgagccacggggcggcgcagagccccactcgcagggcggccgggacccacgcgcgtgggtccacgcaacaacctataggtgacaaaacactcaggaagccgtcatgcggggccaagaaagagcccccatccagagtcacggaccccctcgtccgagggtccgcgcagtcccctcggtaagtcggacgaagcagtctcgctacgggggagggcggcggagcctcccactcttggtgacccggaccccgccccacgagtgggtcttcgcagggccccctctgacgcacacggggaccagccacgccgcgggggcaccgggcaggagccagcgcccgggtccacgcagtcccctccgggcagacgcggggagctggggagcagtggggaccggcccccacccgcaggacgaccgggacccccgcgcgggcccacgcggcgtcgcagcaggcgcggagcccccggtaccacccgaggccgagacaaagcccaggcgcacggaccccggaccctgcggagccccgctcggagcttccacgcccggggcagagacccccgccgggtccggagaccctgccgccagtcgcgccgtctcacctcaggccgccacctcgcagcgctcgctcctcgccgcggcccctgggccgactggagcgcagctgaacagccgacagagccgcagccgccttaacaatggagccccggggcggggccgccgccgccgcctcagcccgtgtaccccgctcgagatccggctcggctcgcggagctgcagccggcgtggggctgcggccgggacagacaccacgcaggcgcacacggccccgcccgccgcccgccgtcccgcccccagcggagccgggcgcccagggcccgccccccggccaatgggaagcgagctgcgcggagtgggcggggcctgagggaacaaagggaggttgggcggggcggtgctgggactgggcttgcggggtcccgcgggaggacccgcctcaaagagccggcccgatcatcgcctcctagaatacccagctcaacgtctacctggagtcggctctacaggacgcgctcatctcaaacccagagctcaggcttttagggcagagagcgagagacaggcttgctttacagaaagggaaactgaggtccaaggaataggattgcctgccgctcgaagaaacgtaatcccattcactcgttcatcttgtagtcattcagcaaacatttggaagcacgtaaaaaaaaaaaaaaaaaaaaaaaaaa

SEQ ID NO: 56134 - DNA, 3998 bp, Homo Sapiens
cacacacacacacacacacagacgtgctcacggagcctgtgcctgcctctacttgtctgctctgcgcagatggttcctggcttttgggtcacctcatcctgcagcccagtccagttagaacctttcttccacagagactggcaagctgtggggtaagagttttggtaaggctgcctgtcttcagagcatgaaggacactgcccggagagggaagagggcaatatttagtgtttgggcctacttgttgttgggctccccactgcctctcctttgcagagctatcactggcccctggttgcaaactctcggtggctttcaagcctacaaaacaaaaactgagagggtgtccaaaaagagaagaagaaaacgttgttgttggtcctggattccactgttggattttggtggggatgagaagaaggaattaccaggtgtgatcaacacctgcacggtacctgcacggctttaaagaatgcgttccagaggcagtgataccgagggctcagcccaaaagaaatttccaagacatactaaaggccacagtttccaagggcctaaaaacatgaagcatagacagcaagacaaagactcccccagtgagtcggatgtaatacttccgtgtcccaaggcagagaagccacacagtggtaatggccaccaagcagaagacctctcaagagatgacctgttatttctcctcagcattctggagggagaactgcaggctcgagatgaggtcataggcattttaaaggctgaaaaaatggacctggctttgctggaagctcagtatgggtttgtcactccaaaaaaggtgttagaggctctccagagagatgcttttcaagcgaaatctaccccttggcaggaggacatctatgagaaaccaatgaatgagttggacaaagttgtggaaaaacataaagaatcttacagacgaatcctgggacagcttttagtggcagaaaaatcccgtaggcaaaccatattggagttggaggaagaaaagagaaaacataaagaatacatggagaagagtgatgaattcatatgcctactagaacaggaatgtgaaagattaaagaagctaattgatcaagaaatcaagtctcaggaggagaaggagcaagaaaaggagaaaagggtcaccaccctgaaagaggagctgaccaagctgaagtcttttgctttgatggtggtggatgaacagcaaaggctgacggcacagctcacccttcaaagacagaaaatccaagagctgaccacaaatgcaaaggaaacacataccaaactagcccttgctgaagccagagttcaggaggaagagcagaaggcaaccagactagagaaggaactgcaaacgcagaccacaaagtttcaccaagaccaagacacaattatggcgaagctcaccaatgaggacagtcaaaatcgccagcttcaacaaaagctggcagcactcagccggcagattgatgagttagaagagacaaacaggtctttacgaaaagcagaagaggagctgcaagatataaaagaaaaaatcagtaagggagaatatggaaacgctggtatcatggctgaagtggaagagctcaggaaacgtgtgctagatatggaagggaaagatgaagagctcataaaaatggaggagcagtgcagagatctcaataagaggcttgaaagggagacgttacagagtaaagactttaaactagaggttgaaaaactcagtaaaagaattatggctctggaaaagttagaagacgctttcaacaaaagcaaacaagaatgctactctctgaaatgcaatttagaaaaagaaaggatgaccacaaagcagttgtctcaagaactggagagtttaaaagtaaggatcaaagagctagaagccattgaaagtcggctagaaaagacagaattcactctaaaagaggatttaactaaactgaaaacattaactgtgatgtttgtagatgaacggaaaacaatgagtgaaaaattaaagaaaactgaagataaattacaagctgcttcttctcagcttcaagtggagcaaaataaagtaacaacagttactgagaagttaattgaggaaactaaaagggcgctcaagtccaaaaccgatgtagaagaaaagatgtacagcgtaaccaaggagagagatgatttaaaaaacaaattgaaagcggaagaagagaaaggaaatgatctcctgtcaagagttaatatgttgaaaaataggcttcaatcattggaagcaattgagaaagatttcctaaaaaacaaattaaatcaagactctgggaaatccacaacagcattacaccaagaaaacaataagattaaggagctctctcaagaagtggaaagactgaaactgaagctaaaggacatgaaagccattgaggatgacctcatgaaaacagaagatgaatatgagactctagaacgaaggtatgctaatgaacgagacaaagctcaatttttatctaaagagctagaacatgttaaaatggaacttgctaagtacaagttagcagaaaagacagagaccagccatgaacaatggcttttcaaaaggcttcaagaagaagaagctaagtcagggcacctctcaagagaagtggatgcattaaaagagaaaattcatgaatacatggcaactgaagacctaatatgtcacctccagggagatcactcagtcctgcaaaaaaaaactaaatcaacaagaaaacaggaacagagatttaggaagagagattgaaaacctcactaaggagttagagaggtaccggcatttcagtaagagcctcaggcctagtctcaatggaagaagaatttccgatcctcaagtattttctaaagaagttcagacagaagcagtagacaatgaaccacctgattacaagagcctcattcctctggaacgtgcagtcatcaatggtcagttatatgaggagagtgagaatcaagacgaggaccctaatgatgagggatctgtgctgtccttcaaatgcagccagtctactccatgtcctgttaacagaaagctatggattccctggatgaaatccaaggagggccatcttcagaatggaaaaatgcaaactaaacccaatgccaactttgtgcaacctggagatctagtcctaagccacacacctgggcagccacttcatataaaggttactccagaccatgtacaaaacacagccactcttgaaatcacaagtccaaccacagagagtcctcactcttacacgagtactgcagtgataccgaactgtggcacgccaaagcaaaggataaccatcctccaaaacgcctccataacaccagtaaagtccaaaacctctaccgaagacctcatgaatttagaacaaggcatgtccccaattaccatggcaacctttgccagagcacagaccccagagtcttgtggttctctaactccagaaaggacaatgtcccctattcaggttttggctgtgactggttcagctagctctcctgagcagggacgctccccagaaccaacagaaatcagtgccaagcatgcgatattcagagtctccccagaccggcagtcatcatggcagtttcagcgttcaaacagcaatagctcaagtgtgataactactgaggataataaaatccacattcacttaggaagtccttacatgcaagctgtagccagccctgtgagacctgccagcccttcagcaccactgcaggataaccgaactcaaggcttaattaacggggcactaaacaaaacaaccaataaagtcaccagcagtattactatcacaccaacagccacacctcttcctcgacaatcacaaattacagtggaaccacttcttctgcctcattgaactcaacatccttcagacttttaaggcattccaaatcccagtcttcatgttgaactgggttaagcatttattaaaaaatcgttttcttctacaaaaaaaaaaaaaaaaaaaaaaaaa

SEQ ID NO: 56135 - DNA, 3371 bp, Homo Sapiens
gcaggtggttgtgggtagcgcgcctgggagggagaaagaagtcgggggccgtggcgcgcagcccgcggggcctgaagggatgttcgaggacaagccccacgctgagggggcggcggtggtcgccgcagccggggaggcgctacaggccctgtgccaggagctgaacctggacgaggggagcgcggccgaagccctggacgactttactgccatccgaggcaactacagcctagagggagaagttacacactggttggcatgttcattatatgttgcatgccgcaaaagcattattcccacggttggaaagggtatcatggaaggcaactgtgtttcacttaccagaatactacgttcagctaaattaagtttaatacaattttttagtaaaatgaagaaatggatggacatgtcaaatctaccacaagaatttcgtgaacgtatagaaaggctagagagaaattttgaggtgtctactgtaatattcaaaaaatatgagccaatttttttagatatatttcaaaatccatatgaagaaccaccaaagttaccacgaagccggaagcagaggaggattccttgcagtgttaaggatctgtttaatttctgttggacactttttgtttatactaagggtaattttcggatgattggggatgacttagtaaactcttatcatttacttctatgctgcttggatctgatttttgccaatgcgattatgtgcccaaatagacaagacttgctaaatccatcatttaaaggtttaccatctgattttcatactgctgactttacggcttctgaagagccaccctgcatcattgctgtactgtgtgaactgcatgatggacttctcgtagaagcaaaaggaataaaggagcactactttaagccatatatttcaaaactctttgacaggaagatattaaaaggagaatgcctcctggacctttcaagttttactgataatagcaaagcagtgaataaggagtatgaagagtatgttctaactgttggtgattttgatgagaggatctttttgggagcagacgcagaagaggaaattggaacacctcgaaagttcactcgtgacaccccattagggaaactgacagcacaggctaatgtggagtataaccttcaacagcactttgaaaaaaaaaggtcatttgcaccttctaccccactgaccggacggagatatttacgagaaaaagaagcagtcattactcctgttgcatcagccacccaaagtgtgagccggttacagagtattgtggctggtctgaaaaatgcaccaagtgaccaacttataaatatttttgaatcttgtgtgcgtaatcctgtggaaaacattatgaaaatactaaaaggaataggagagactttctgtcaacactatactcaatcaacagatgaacagccaggatctcacatagactttgctgtaaacagactaaagctggcagaaattttgtattataaaatactagagactgtaatggttcaggaaacacgaagacttcatggaatggacatgtcagttcttttagagcaagatatatttcatcgttccttgatggcttgttgtttggaaattgtgctctttgcctatagctcacctcgtacttttccttggattattgaagttctcaacttgcaaccattttacttttataaggttattgaggtggtgatccgctcagaagaggggctctcaagggacatggtgaaacacctaaacagcattgaagaacagattttggagagtttagcatggagtcacgattctgcactgtgggaggctctccaggtttctgcaaacaaagttcctacctgtgaagaagttatattcccaaataactttgaaacaggaaatggaggaaatgtgcagggacatcttcccctgatgccaatgtctcctctaatgcacccaagagtcaaggaagttcgaactgacagtgggagtcttcgaagagatatgcaaccattgtctccaatttctgtccatgaacgctacagttctcctaccgcagggagtgctaagagaagactctttggagaggaccccccaaaggaaatgcttatggacaagatcataacagaaggaacaaaattgaaaatcgctccttcttcaagcattactgctgaaaatgtatcaattttacctggtcaaactcttctaacaatggccacagccccagtaacaggaacaacaggacataaagttacaattccattacatggtgtcgcaaatgatgctggagagatcacactgatacctctttccatgaatacaaatcaggagtccaaagtcaagagtcctgtatcacttactgctcattcattaattggtgcttctccaaaacagaccaatctgactaaagcacaagaggtacattcaactggaataaacaggccaaagagaactgggtccttagcactattttacagaaaggtctatcatttggcaagtgtacgcttacgtgatctatgtctaaaactggatgtttcaaatgagttacgaaggaagatatggacgtgttttgaattcactttagttcactgtcctgatctaatgaaagacaggcatttggatcagctcctcctttgtgccttttatatcatggcaaaggtaacaaaagaagaaagaacttttcaagaaattatgaaaagttataggaatcagccccaagctaatagtcacgtatatagaagtgttctgctgaaaagtattccaagagaagttgtggcatataataaaaatataaatgatgactttgaaatgatagattgtgacttagaagatgctacaaaaacacctgactgttccagtggaccagtgaaagaggaaagaggtgatcttataaaattttacaatacaatatatgtaggaagagtgaagtcatttgcactgaaatacgacttggcgaatcaggaccatatgatggatgctccaccactctctccttttccacatattaaacaacagccaggctcaccacgccgcatttcccagcagcactccatttatatttccccgcacaagaatgggtcaggccttacaccaagaagcgctctgctgtacaagttcaatggcagcccttctaaggtaaggtgaataggctaaaagttggatttcagattaacagtcagtaactgttaatcctgcctctttttttttttttcttttttggccaagttactactatactaataaaatatgaaatgttaactatgaaaaaaaaaaaaaaaaaaaaaaaaaaaaaaaaaaaaaaaaaaaaaaaaaaaaaaaaaaaaaaaaaaaaaaaaaaaaaaaaaaaaaaaaaaaaaaaaaaaaaaaaaaaaaaaaaaaaaaaaaaaaaaaa

SEQ ID NO: 56136 - DNA, 1748 bp, Homo Sapiens
gcgggcagcagggaggacacgtggaaacgcaaccgccaggaggaaaggcgggacacagcgggaagggaggtttgcctcccctctcttcctgtggtgacccccacctcacttacaaaaatcaccaccgacgtttgggaaccgtgcacgccgacgtttgggaaccgtgcacgccgactgaaagcaaagctcagctgacctgcgaggagtccccggggagctgccgcggtggtcgccgttgagtccgtccgtgccgctggggccgaggcagctggagatgtggtcaacgggctgatgggcacggctgtgggaccccatcattcccctgccccgcatgactctgctctcccagctcgactgctcacttcagacttcccttatggaaggagttgccagatagagcaagtaaaatacagtgtgccagacacaggtttatttcaacactgggaaggctccattcctacttaaacccagcagggaacagggagcggtgtgcagaggaggtggcctgcccgggaagccggccttggtgctgggactgcagggagagggctgtgaggaagagcacaggcttcatgcacattgcacagaggaggagattcatggggacagcaggcactggttaggcacagcgggaaggttatcgaagacaaaacacatttctacccaagtttaaatgacctgctatgcccacagagcttgatccagaagtgcacagtagagacggggtttcaccatgttagccgggatggtctcgatctcctgacctcgtgatctgcccgcctcagcctcccaaagtgctgggattacaggagtgagccaccgctcccggcccagaacttttaataaatataaatacacaggtaattttaacacatattcctgatgaaatcattattatctgcaatgctttcattctgctttttctcttaacaatggcataaacatttttcaaggtcaataaatgtttttcaaaatcgcatttgtattagtggctgtatagttttctatcaaatgtggaataaactcaatttatttctcccttttgttcttgaacatttaagatcattggttcatagttactaatcatgttacaacaaatattcatgtattccaaattttgctcattcctgattatttccttagatttccaggtatggaataattaggttgaagtgtttgaaatctttttttgttggtttgtttgtttttgagatgtagcttccctctgttgccccggctggagtgcactggcatgatctcagctcactcactgcaacctctgctgcctggttcaagcgattctcctgcctcagcctcctgaatagctggggttacaggtgcgcaccaccacgcccggctaatttttgtatttttagtagagacagggtttcatcatgttggccaggtgggtctcaaactcctgacctcaggtggtccttctgccttggcctcccaaagtgctgggattacaggcgtgagccactgcgcccggccgaagtgtttgaaatctttaagcatcctggtaaatattgagttttgtcaatatttagaaaagttgcatgattgacatcgcttccacccatgtttcagagcatctgatttgtcagaccctcaccaaaaatgggcttttatcaaaatgtaataaaaaataaatacaacttttccaatgacaaaaaaaaaaaaaaaaaaaaaaaaaaaaaaaaaaaaaaaaaaaaaaaaaaaaaaaaaaaaaaaaaaaaaaaaaaaaa

SEQ ID NO: 56137 - DNA, 1198 bp, Homo Sapiens
gtgtgaagtaagcaatctattttcacttgctattaacagcaaacgtacaactttatctcttatttgacttcattatttggctttcaaattaacaacatgaaaactatacagaaattagtctgtgccctataagacagagatttagataatttgttcaaaacatgagatgatattcagatattctctcaaaggcaggactccaacaccgcaggtggaaaaccaacaaaaggaagaaaacagaaaggaggaaagggaagatgaaagaccgacttcaagaactaaagcagagaacaaaggaaattgaactctctagagacagtcatgtatcaactacagaaacagaggaacaaggggtgtttctacagcaagctgttatttatgaaagagagcctgtagctgagagacacctacatgaaatccaaaaactacaggaaagtattaacaatttggcagataatgttcaaaaatttgggcagcaacagaaaagtctggtggcttcaatgagaaggtttagtctacttaagagagagtctaccattacaaaggagataaaaattcaggcagaatacatcaacagaagtttgaatgatttagttaaagaagttaaaaagtcagaggttgaaaatggtccatcttcagtggtcacaaggatacttaaatctcagcatgctgcaatgttccgccattttcagcaaatcatgtttatatacaatgacacaatagcagcaaagcaagagaagtgcaagacatttattttacgtcagcttgaagttgctggaaaagagatgtctgaagaagatgtaaatgatatgcttcatcaaggaaaatgggaagtttttaatgaaagcttacttacagaaatcaatatcactaaagcacaactttcagagattgaacagagacacaaggaacttgttaatttggagaaccaaataaaggatttaagggatcttttcattcagatatctcttttagtagaggaacaaggagagagcatcaataatattgaaatgacagtgaatagtacaaaagagtatgttaacaatactaaagagaaatttggactagctgtaaaatacaaaaaaagaaatccttgcagagtactgtgttgttggtgctgtccatgctgtagctcaaaataaagaagctattttaaaaaaaaaaaaaaaaaaaaaaaaaaaaaaaaaaaaaaaaaaaa

SEQ ID NO: 56138 - DNA, 6390 bp, Homo Sapiens; identical to SEQ ID NO: 23798

SEQ ID NO: 56139 - DNA, 7030 bp, Homo Sapiens; identical to SEQ ID NO: 22613

SEQ ID NO: 56140 - DNA, 8091 bp, Homo Sapiens; identical to SEQ ID NO: 31029

SEQ ID NO: 56141 - DNA, 4005 bp, Homo Sapiens
cggcagggttggaaaatgatggaagaggcggaggtggaggcgaccgagtgctgagaggaacctgcggaatcggccgagatggggtctggcgcgcgctttccctcggggacccttcgtgtccggtggttgctgttgcttggcctggtgggcccagtcctcggtgcggcgcggccaggctttcaacagacctcacatctttcttcttatgaaattataactccttggagattaactagagaaagaagagaagcccctaggccctattcaaaacaagtatcttatgttattcaggctgaaggaaaagagcatattattcacttggaaaggaacaaagaccttttgcctgaagattttgtggtttatacttacaacaaggaagggactttaatcactgaccatcccaatatacagaatcattgtcattatcggggctatgtggagggagttcataattcatccattgctcttagcgactgttttggactcagaggattgctgcatttagagaatgcgagttatgggattgaacccctgcagaacagctctcattttgagcacatcatttatcgaatggatgatgtctacaaagagcctctgaaatgtggagtttccaacaaggatatagagaaagaaactgcaaaggatgaagaggaagagcctcccagcatgactcagctacttcgaagaagaagagctgtcttgccacagacccggtatgtggagctgttcattgtcgtagacaaggaaaggtatgacatgatgggaagaaatcagactgctgtgagagaagagatgattctcctggcaaactacttggatagtatgtatattatgttaaatattcgaattgtgctagttggactggagatttggaccaatggaaacctgatcaacatagttgggggtgctggtgatgtgctggggaacttcgtgcagtggcgggaaaagtttcttatcacacgtcggagacatgacagtgcacagctagttctaaagaaaggttttggtggaactgcaggaatggcatttgtgggaacagtgtgttcaaggagccacgcaggcgggattaatgtgtttggacaaatcactgtggagacatttgcttccattgttgctcatgaattgggtcataatcttggaatgaatcacgatgatgggagagattgttcctgtggagcaaagagctgcatcatgaattcaggagcatcgggttccagaaactttagcagttgcagtgcagaggactttgagaagttaactttaaataaaggaggaaactgccttcttaatattccaaagcctgatgaagcctatagtgctccctcctgtggtaataagttggtggacgctggggaagagtgtgactgtggtactccaaaggaatgtgaattggacccttgctgcgaaggaagtacctgtaagcttaaatcatttgctgagtgtgcatatggtgactgttgtaaagactgtcggttccttccaggaggtactttatgccgaggaaaaaccagtgagtgtgatgttccagagtactgcaatggttcttctcagttctgtcagccagatgtttttattcagaatggatatccttgccagaataacaaagcctattgctacaacggcatgtgccagtattatgatgctcaatgtcaagtcatctttggctcaaaagccaaggctgcccccaaagattgtttcattgaagtgaattctaaaggtgacagatttggcaattgtggtttctctggcaatgaatacaagaagtgtgccactgggaatgctttgtgtggaaagcttcagtgtgagaatgtacaagagatacctgtatttggaattgtgcctgctattattcaaacgcctagtcgaggcaccaaatgttggggtgtggatttccagctaggatcagatgttccagatcctgggatggttaacgaaggcacaaaatgtggtgctggaaagatctgtagaaacttccagtgtgtagatgcttctgttctgaattatgactgtgatgttcagaaaaagtgtcatggacatgggaaatgaatactgcattgagggacggacttctggtcttcttcttcctaattgttccccttattgtctgtgctatttttatcttcatcaagagggatcaactgtggagaagctacttcagaaagaagagatcacaaacatatgagtcagatggcaaaaatcaagcaaacccttctagacagccggggagtgttcctcgacatgtttctccagtgacacctcccagagaagttcctatatatgcaaacagatttgcagtaccaacctatgcagccaagcaacctcagcagttcccatcaaggccacctccaccacaaccgaaagtatcatctcagggaaacttaattcctgcccgtcctgctcctgcacctcctttatatagttccctcacttgatttttttaaccttctttttgcaaatgtcttcagggaactgagctaatactttttttttttcttgatgttttcttgaaaagcctttctgttgcaactatgaatgaaaacaaaacaccacaaaacagacttcactaacacagaaaaacagaaactgagtgtgagagttgtgaaatacaaggaaatgcagtaaagccagggaatttacaataacatttccgtttccatcattgaataagtcttattcagtcatcggtgaggttaatgcactaatcatggattttttgaacatgttattgcagtgattctcaaattaactgtattggtgtaagatttttgtcattaagtgtttaagtgttattctgaattttctaccttagttatcattaatgtagttcctcattgaacatgtgataatctaatacctgtgaaaactgactaatcagctgccaataatatctaatatttttcatcatgcacgaattaataatcatcatactctagaatcttgtctgtcactcactacatgaataagcaaatattgtcttcaaaagaatgcacaagaaccacaattaagatgtcatattattttgaaagtacaaaatatactaaaagagtgtgtgtgtattcacgcagttactcgcttccatttttatgacctttcaactataggtaataactcttagagaaattaatttaatattagaatttctattatgaatcatgtgaaagcatgacattcgttcacaatagcactattttaaataaattataagctttaaggtacgaagtatttaatagatctaatcaaatatgttgattcatggctataataaagcaggagcaattataaaatcttcaatcaattgaacttttacaaaaccacttgagaatttcatgagcactttaaaatctgaactttcaaagcttgctattaaatcatttagaatgtttacatttactaaggtgtgctgggtcatgtaaaatattagacactaatattttcatagaaattaggctggagaaagaaggaagaaatggttttcttaaatacctacaaaaaagttactgtggtatctatgagttatcatcttagctgtgttaaaaatgaatttttactatggcagatatggtatggatcgtaaaattttaagcactaaaaattttttcataacctttcataataaagtttaataataggtttattaactgaatttcattagttttttaaaagtgtttttggtttgtgtatatatacatatacaaatacaacatttacaataaataaaatacttgaaattctcttttgtgtctcctagtagcttcctactcaactatttataatctcattaattaaaaagttataattttagataaaaattctagtcaaatttttacagatattatctcactaattttcagacttttgccaaagtgtgcacaatggctttttgttaataaagaacagattagttttgaagaaggcaaaaatttcagttttctgaagacagcatgttattttaacaatcaagtatacatattaaaaattgtgagcaatctcaaaaaaaaaaaaaaa

SEQ ID NO: 56142 - DNA, 8457 bp, Homo Sapiens
gacgctcctcccggagagtagtgagacccctggtgcggggcgattggcggcgggagcgatgagtggcagccgcacggcccaacgggagctgtgcgtgggccgcggggcggggccagggcgggtgcgcggcggcggcggggtggctgggccggcggcggcggcggtacgaggcgcgcgctcggggtcccggtcgcgaggaggaggaggatgtggcgcgcggaggggaaatggctgccgaaaacaagccggaagagcgtttcccaaagtgtattctgcggaactagcacctactgtgttctcaacaccgtgccacctatagaagatgatcatgggaacagcaatagtagtcatgtaaaaatctttttaccgaaaaagctgcttgaatgtctgccgaaatgttcaagtttaccaaaagagaggcaccgctggaacactaatgaggaaattgcagcttatttaataacatttgagaaacacgaagaatggctaaccacctcccctaagacaagaccacagaatggctcaatgatactctacaacaggaagaaagtgaaatacaggaaagatgggtattgctggaaaaagaggaaagatgggaaaacgaccagagaggaccacatgaaactcaaggtccagggagtggagtgcttgtacggctgctatgtccattcctccatcatccccaccttccaccggaggtgctactggctccttcagaaccccgacatcgtcctggtgcactacctgaacgtgccggccatcgaggactgcggcaagccttgcggccccatcctctgctccatcaacaccgacaagaaggagtgggcgaaatggacgaaagaagagctcatcgggcagctgaaacccatgttccatggcatcaagtggacctgcagcaatgggaacagcagctcaggcttctcggtggaacagctggtgcagcagatcctcgacagccaccagaccaagccccagccgcggacccacaactgcctctgcaccggcagcctgggagctggcggcagcgtgcatcacaagtgtaacagcgccaaacaccgcatcatctcgcccaaggtggagccacggacaggggggtacgggagccactcggaggtgcagcacaatgacgtgtcggagggcaagcacgagcacagccacagcaagggctccagccgtgagaagaggaacggcaaggtggccaagcccgtgctcctgcaccagagcagcaccgaggtctcctccaccaaccaggtggaagtccccgacaccacccagagctcccctgtgtccatcagcagcgggctcaacagcgacccggacatggtggacagcccggtggtcacaggtgtgtccggtatggcggtggcctctgtgatggggagcttgtcccagagcgccacggtgttcatgtcagaggtcaccaatgaggccgtgtacaccatgtcccccaccgctggccccaaccaccacctcctctcacctgacgcctctcagggcctcgtcctggccgtgagctctgatggccacaagttcgcctttcccaccacgggcagctcagagagcctgtccatgctgcccaccaacgtgtccgaagagctggtcctctccaccaccctcgacggtggccggaagattccagaaaccaccatgaactttgaccccgactgtttccttaataacccaaagcagggccagacgtacgggggtggaggcctgaaagccgagatggtcagctccaacatccggcactcgccacccggggagcggagcttcagctttaccaccgtcctcaccaaggagatcaagaccgaggacacctccttcgagcagcagatggccaaagaagcgtactcctcctccgcggcggctgtggcagccagctccctcaccctgaccgccggctccagcctcctgccgtcgggcggcggcctgagtcccagcaccaccctggagcagatggacttcagcgccatcgactccaacaaggactacacgtccagcttcagccagacgggccacagcccccacatccaccagaccccctccccgagcttcttcctgcaggacgccagcaaacccctccccgtcgagcagaacacccacagcagcctgagtgactctgggggcaccttcgtgatgcccacggtgaaaacggaggcctcgtcccaaaccagctcctgcagcggtcacgtggagacgcggatcgagtccacttcctccctccacctcatgcagttccaggccaacttccaggccatgacggcagaaggggaggtcaccatggagacctcgcaggcggcggaagggagcgaggtcctgctcaagtctggggagctgcaggcttgcagctctgagcactacctgcagccggagaccaacggggtaatccgaagcgccggcggcgtccccatcctcccgggcaacgtggtgcagggactctaccccgtggcccagcccagcctcggcaacgcctccaacatggagctcagcctggaccactttgacatctccttcagcaaccagttctccgacctgatcaacgacttcatctccgtggaggggggcagcagcaccatctatgggcaccagctggtgtcgggggacagcacggcgctctcacagtcagaggacggggcgcgggcccccttcacccaggcagagatgtgcctcccctgctgtagcccccagcagggtagcctgcagctgagcagctcggagggcggggccagcaccatggcctacatgcacgtcgccgaggtggtctcggccgcctcggcccagggcaccctaggcatgctgcagcagagcggacgggtgttcatggtgaccgactactccccagagtggtcttacccagagggaggagtgaaggtcctcatcacaggcccgtggcaagaagccagcaataactacagctgcctgtttgaccagatctcagtgcctgcatccctgattcagcctggggtgctgcgctgctactgcccagcccatgacactggtcttgtgaccctacaagttgccttcaacaaccagatcatctccaactcggtggtgtttgagtacaaagcccgggctctgcccacgctcccttcctcccagcacgactggctgtcgttggacgataaccagttcaggatgtccatcctggaacgactggagcagatggagaggaggatggccgagatgacggggtcccagcagcacaaacaggcgagcggaggcggcagcagtggaggcggcagcgggagcgggaatggagggagccaggcacagtgtgcttctgggactggggccttggggagctgctttgagagccgtgtggtcgtggtatgcgagaagatgatgagccgagcctgctgggcgaagtccaagcacttgatccactcaaagactttccgcggaatgaccctactccacctggccgctgcccagggctatgccaccctaatccagaccctcatcaaatggcgtacaaagcacgcggatagcattgacctggaactggaagttgaccccttgaatgtggaccacttctcctgtactcctctgatgtgggcgtgtgccctagggcacttggaagctgccgtcgtgctgtacaagtgggaccgtcgggccatctcgattcccgactctctaggaaggctgcctttgggaattgccaggtcacggggtcatgtgaaattagcagagtgtctggagcacctgcagagagatgagcaggctcagctgggacagaaccccagaatccactgtcctgcaagcgaagagcccagcacagagagctggatggcccagtggcacagcgaagccatcagctctccagaaatacccaagggagtcactgttattgcaagcaccaacccagagctgagaagacctcgttctgaaccctctaattactacagcagtgagagccacaaagattatccggctcccaaaaagcataaattgaaccctgagtacttccagacaaggcaggagaagctgcttcccactgcactgagtctggaagagccaaatatcaggaagcaaagccctagttctaagcagtctgtccccgagacactcagccccagtgaaggagtgagggacttcagccgggaactctcccctcccactccagagactgcagcatttcaagcctctggatctcagcctgtaggaaagtggaattccaaagatctttacattggtgtgtctacagtacaggtgactggaaatccgaaggggaccagtgtaggaaaggaggcagcaccttcacaggtgcgtccacgggaaccaatgagtgtcctgatgatggctaacagagaggtggtgaatacagagctggggtcctaccgtgatagtgcagaaaatgaagaatgcggccagcccatggatgacatacaggtgaacatgatgaccttggcagaacacattattgaagccacacctgaccgaatcaagcaggagaattttgtgcccatggagtcctcaggattggaaagaacagaccctgccaccattagcagtacaatgagctggctggccagttatctagcggatgctgactgccttcccagtgctgcccagatccgaagtgcatataacgagcctctaaccccttcttctaataccagcttgagccctgttggctctcccgtcagtgaaatcgctttcgagaaacctaaccttccctccgccgcggattggtcagaattcctgagtgcatctaccagtgagaaggtagagaatgagtttgctcagctcactctgtctgatcatgaacagagagaactctatgaggctgccaggcttgtccagacagctttccggaaatacaagggccgacccttgcgggaacagcaagaagtagctgctgctgttattcagcgttgttacagaaaatataaacagtacgcactttataaaaagatgacacaggctgccatccttatccagagcaaattccgaagttactatgaacaaaaaaaattccagcagagccgacgggctgctgtgctcatccaaaagtactaccgaagttataagaaatgtggcaaaagacggcaggctcgccggacggctgtgattgtacaacagaaactcaggagcagtttgctaaccaaaaagcaggatcaagctgctcgaaaaataatgaggtttcttcgccgctgtcgccacagccccctggtggaccataggctgtacaaaaggagtgaaagaattgaaaaaggccaaggaacttgaagacatacagcagcatcccttagcaatgtgacattgcttttcagactgttttcatttctgtttttagcagagacatgcaacaacaacacacacgcacacacgcacacacacacacgtacacacacatacaaaatccctctgcagttttggggagatcagctgcaggattttaacaggaatgttttggtcattgcatttgcactttcatggacaacttttaatttgatcagcaagacatcttggaactcaatcttctgttggatcacgggaaatcaagacacccaggaggaattgaaagaggcttcctcttctcaggaagaagccatttccttctcatatagggctgtattcaaacatcgtgtggaactgtacaaatatttataccaaaaatatagataagaaaaggtggggctatactagcaacaaaaaaagaatgctgttcctgcacctgccggttatttccaagaagctgaatctttgggactgattctcagtggagggcttagatcatacaaaaatctttattgggtccgtgtgttctcatttccttcactgtttatttttgtttgtttgtttgtttgttttaatctctacagcacatttaatgcaacttttgaaatctgcaggtttttaatgtcttgtggaaatttgcagaggggcaggtgtgtggtaaacgggtaatgcatgggaaataatgagaagcagctcacagagtttaaactattttcttgtccccaccaccttccaagaacctgcgagggtagtaatcatcttgtcccctttttcatgttcagcactttaatttttttgccttactttcatgtgcaatgagaattacttaagaattggtaacgcatgtagccttttttagtaaccttggaagctgtagtaattctaaggaatcatgaaccttgcctggacatttgccacctaaacgatcagtgtggtgctgcgttctggccagtaaattccatgtttttggctatatctcatccaaactgagcagtttctgtgtatatatagaaggtagaaatgaaaagtgagaaaatatttgaaagggattatattaattgctaaatattttattcacaaaggtcaataacatggcaagataaaattatttgtatagttttgtctgaatgagcgagaaaaatgtggatgtactgtttgtatatattgtatatattaaaacagagatatgtgcatgaaatcaagaaaaaagaaatgaacaaaagcaaagcattagtggctatggtctgtaaaatgaaacaaaaaaactttatttcactataagagtactttattttaaatgttctttaggagaacattttgctaaagcatgactaaactgcaaaaaaaaaaaaagagctactgtatttagacttaggaaaaaaggcagagtaacattacttaaaaaaaaaaggatatgtttacatttaattttggctaccaggagtttagtttattttatttaaaatttttttgccaatggtgccaagtaatgtgaatgctaatactgcttaagaaaattaagttacttttgcaaaacagataatcataagatgaatcagtatgtagcttaacaccatccactcactccaacaaagaacacttagaatgataaaaaaaaaaaaaaaaaacctgacaaaagaaatagtatgaaaagtagaaaaatgtcacgtttccatatctcctgctggaaatcagaaaatataataaaattgcacaaaaaaaaaaatgaaaaagatgcagactggtcttttagagacggcatggtatattactatttccacataatgaggagccaaagaaatctgatgtttttaacaattaaactgctaatgttaaattgagagaataaagttcgtatttgctgatgccagtttaaaattcccaggttacgtctgaggatcagttggtgtaaagctgagatgttttttcttggttctggctgccaactgtgagttaaaactcaaggcttgttgtgaagcctaaaaatattcacaaataagcttttaaactggtgtctttggaaggaaggtagatacaaaaagattgtggtaaaaactggggtcagtgctcttggtgccttttctataattgtacttgttttttaattacttcctttcactgccaacctcgaattactgtacagtatatgtctttctgcttgtgatcagctttgacaacagtgacagccccacaactagtagccacctgtacatttgtaaactgacctgactccattttgtttttaaatgtgtgggttatgttgcagctgttgcagtcccccagatacctattattttacacaatttgacctataggaggacactgagtaatttacaaacacaactgcattcataaatgggaatagaacgtgaaagccagctctttcagaatatcctctattaatactgaatttagatatctttattccatttattatggtacaaataactgatgttttaaccagagtaatgacctcagtggatttgctttaaccctcacattttttttttaatgtttcacatgttacattattagctgaatacgttagaaaatgacagatggtagagacttccatagaattaagagggttctcatggaggggataggaagtaggtttaaagcctaccagtgtaacctaccagtacaactgtgaatcctaggcgaggcaaaaatgcacttccactgaaacgaagcatttctgaccgctttttcttggttatgaatcttaatttcgaatataagatgataggtaagcgcagctttcttggataatctgaattcccaagtgccaggagtaggatttcattataaaattaatagctaatcttattctatctcctgaagatttaattgctattgttacccattcgaaatcagctgtactgtgtgaacgaaataaagacaataatacgaacccctctctggctgcacggtcgcttatggcagttccacacagtagttggcgcccaatggggggtccctgagacttgcatgtaaaactagtctagatgtcttctttttttgtaagttttatttttgtaattgtgcatgtaaagcatcattgaatcaatggatctgttgaagaactcagctgctggaaaccatgcaaaatgttttgaattgcccttaaaatatggaaaatgttttctgaatgctttatattctttctgctgtaaattaaaaatgaagaaaatttccccaaaaaaaaaaaaaaaa

SEQ ID NO: 56143 - DNA, 3060 bp, Homo Sapiens
acacagagccgcctttcagccgcccgagaactgcccgccgcactccgcgactgcggcgcctgctctcgggccggggtctgcgcgcaccacgcggccggcagaaagggtaagagaagggaaccccgctttgcagggctccaacttcggcggacgcgttacggcgagggcgaaatgagtcggccgtgaacggtgtttcctgttccgaatcccgagagccctggaaagttttgaaggaggaggcatggcccggcagccttatcgttttccccaggcaaggattccggagagaggatcaggtgttttcaggttaaccgtcagaaacgcaatggcacatcgtgattctgagatgaaagaagaatgtctaagggaagacctgaagttttacttcatgagcccttgtgaaaaataccgagccagacgccagattccgtggaaactgggtttgcagattttgaagatagtcatggtcaccacacagcttgttcgttttggtttaagtaaccagctggtggttgctttcaaagaagataacactgttgcttttaagcacttgtttttgaaaggatattctggtacagatgaagatgactacagctgcagtgtatatactcaagaggatgcctatgagagcatcttttttgctattaatcagtatcatcagctaaaggacattaccctggggacccttggttatggagaaaatgaagacaatagaattggcttaaaagtctgtaagcagcattacaagaaagggaccatgtttccttctaatgagacactgaatattgacaacgacgttgagctcgattgtgttcaattagaccttcaggacctctccaagaagcctccggactggaagaactcatcattcttcagactggaattttatcggctcttacaggttgaaatctcctttcatcttaaaggcattgacctacagacaattcattcccgtgagttaccagactgttatgtctttcagaatacgattatctttgacaataaagctcacagtggcaaaatcaaaatctattttgacagtgatgccaaaattgaagaatgtaaagacttgaacatatttggatctactcagaaaaatgctcagtatgtcctggtgtttgatgcatttgtcattgtgatttgcttggcatctcttattctgtgtacaagatccattgttcttgctctaaggttacggaagagatttctaaatttcttcctggagaagtacaagcggcctgtgtgtgacaccgaccagtgggagttcatcaacggctggtatgtcctggtgattatcagcgacctaatgacaatcattggctccatattaaaaatggaaatcaaagcaaagaatctcacaaactatgatctctgcagcatttttcttggaacctctacgctcttggtttgggttggagtcatcagatacctgggttatttccaggcatataatgtgctgattttaacaatgcaggcctcactgccaaaagttcttcggttttgtgcttgtgctggtatgatttatctgggttacacattctgtggctggattgtcttaggaccataccatgacaagtttgaaaatctgaacacagttgctgagtgtctgttttctctggtcaacggtgatgacatgtttgcaacctttgcccaaatccagcagaagagcatcttggtgtggctgttcagtcgtctgtatttatattccttcatcagcctttttatatatatgattctcagtctttttattgcacttattacagattcttatgacaccattaagaaattccaacagaatgggtttcctgaaacggatttgcaggaattcctgaaggaatgcagtagcaaagaagagtatcagaaagagtcctcagccttcctgtcctgcatctgctgtcggaggaggaaaagaagtgatgatcacttgatacctattagctaaagttctgctaaagatgattaaagttcaggcatccttatccagcggctgagcagaggaaccccaaatgacttggacaagcagttccaaaatgactctcttatttaattgtggagtgggaaagaggactcacagttagccagctgaccatgactgaagttccagctttactttttataaacttgaatgataaagaatagaccatgggctactactgggcattagtgcaatataacagcgataataaaattctctattagtctgttaatttatgacatgatctcggaatggaaaaagatcatttcagagtgtgcgaaataatagtctttaaccatgtaattaaatatgtgtgtttattgtcaaataaggatttgttttaaaggtgattcttgggtttgaagacatttgttaattcatggtctgtacagaaatgaagctggttgcaataccaatctagagagtccaagctggcgaactattaagctgtttaaagatcacccttggcctggcacagtggttcacacctgtaatcccagcactttgggaggcctaggcaggcagactgagctcaggagcttgagaccagcctgggcaacatggcaaaaacccacctctacaaaaagtacaaaaattagtcgggcgtgatggcaggcatctgtagtcccagctacttgggaagctgaagtgggaggatcacctgagctctggaggtggaggctgccatgagccatgatcgtgccactacactccagcctgggtgacagagtgagatcctgtctcaaaaaaaaaaaaaaatcacccttaaatcaacaaaaagacctcatgctcatgcagtggacatttcttggcctgttttcctgtgggttttcttcagcatgatatgaagcaactgttggcatagccagtgggataaataagaaatggaatcatttggctgcctcgtcacttgtgctaatggtcagttgtacacacatgacatgtggaagtgacctgtagcagcggtcactcattttaacaattgaactctgctgggttgggtatttacctttgtctagaaaagaaatatgatatattttctctaaataaatttattttcatcattccaaaaaaaaaaaaaaaaa

SEQ ID NO: 56144 - DNA, 2246 bp, Homo Sapiens
gatccagctatggagaaagccgcagatctgcaggacacagcctcgttaactctgaagtttaagtttaacccaaagctgggcattgataatcctgtcctctccctggccgaagaccacgacccctatgatccctggagcctggagcggcctcgcttctgtttactgagcaaagaggagggcaagagttttggcttccacctgcagcaggagctgggcagggctgggcatgtggtgtgcagggtggacccaggcacctctgcccagcgccagggtcttcaggaaggagacaggatcctggcggtgaacaatgatgttgtggaacacgaagactatgcggtggtggtacgccgcatccgggccagcagccctcgggtgttgctgacagtattggcacggcatgcacatgacgtggcccgagctcagctgggagaagatgcccacctctgtcccaccctaggcccaggggtccggccccggctgtgccacatagtgaaagatgagggtggttttggcttcagtgtcacccatggcaatcagggtcctttctggttggtgctaagtactggaggagcagctgagcgggcaggggtgccccccggggcccggctgctggaagtgaatgggctttggcagagtggacagcaggtgaccttgctggtggcagggccagaggtggaagaacagtgtcgccagctgggattgcccctggctgcacccctggcagagggctgggcactgcccaccaagccccgctgcctgcacctggagaaagggccccagggttttgggttcctgctccgggaggaaaagggccttgacggtcgccctggacagttcctgtgggaggtggacccgggactgccagccaagaaggctgggatgcaggctggggaccggctggtggctgtggctggggagagcgtggaggggctgggccatgaggagacagtgtccaggatccaggggcagggctcctgtgtctccctcactgtcgtcgaccctgaggcggaccgcttcttcagcatggttcgcctgtccccactcctcttcttggagaacacagaggctcccgcctcgccccagggcagcagctcagcctcactggttgagacagaggacccttcacttgaagacacaagcgtgccttctgtccctcttggctcccgacagtgcttcctgtaccctgggcctggtggcagctatggcttccgactcagttgtgtggccagtgggcctcgtctcttcatctcccaggtgactccaggaggctcagctgcccgggctgggctgcaagtgggagacgtgattctggaagtgaacgggtatcctgttgggggacagaatgacctggagaggcttcagcagctgcctgaggctgagccacccctctgcctgaagctggcagccaggtctctgcggggcttggaagcctggattccccctggggctgcagaggactgggctctggcctcggatctactgtagagcacccctgcttggtacagacatactcaggggctaccgtgtcttcactctccagcctgaggtggtgaaggcaggatgctctctctaagccagaccagagggactcagacaccaccgatcacaggctggcccaggtgctccctcccttcctgcaggcccacctgccagcagagggtgtggttggaggcctcagacaggtccctgaaggagtctgaggctccagaggatgtcatatgggagttttagagagctgtgtcccaaggatgaaggtgtggctgtgggtctggctaggattgaagccatctggaccttttctagatatgactccaggacccttgagtgtaatgcaaaaatttggagaccagctatgcctgccctctgtgggtgccttagcattgcgggagggtggtgcttggtcaccgttgcatttgttatagaaatggccattcgccataaatctgactgcctgtgtttgtgttggtgggggtaaggggcagtggtgtgaagggaccaaaagggcctcaggctcaaggggtgggatgcggctcctgcaggagagaggttgagacctggtcaaatttatttcctatcaatcactgaatctcagggataatgggtcaacccagaactgagatgtctgtatgacagccactcctaaaaataaacaacaacaaaaacaaaaaaagaagaaaactaaataaaaataaaaataaaaataaaaaaaaaaaaaaaaaaaaaaaaaaaaaaaaaaaaaaaaaaaa

SEQ ID NO: 56145 - DNA, 2815 bp, Homo Sapiens
gcggccgcggaggaggaggaaggggaggagggcgaggcgggaggtgcaggagggaccctcgccatgggtccacgggcctagagtggcggaagataccggcctggtgccaaactggctactgctgcttcctgtggcctccatggctgaggactggctggactgcccggccctgggccctggctggaagcgccgcgaagtctttcgcaagtcaggggccacctgtggacgctcagacacctattaccagagccccacaggagacaggatccgaagcaaagttgagctgactcgatacctgggccctgcgtgtgatctcaccctcttcgacttcaaacaaggcatcttgtgctatccagcccccaaggcccatcccgtggcggttgccagcaagaagcgaaagaagccttcaaggccagccaagactcggaaacgtcaggttggaccccagagtggtgaggtcaggaaggaggccccgagggatgagaccaaggctgacactgacacagccccagcttcattccctgctcctgggtgctgtgagaactgtggaatcagcttctcaggggatggcacccaaaggcagcggctcaaaacgttgtgcaaagactgtcgagcacagagaattgccttcaaccgggaacagagaatgtttaagagccgagggtgtggagtatgccggggctgtcagacccaagaggattgtggccattgccccatctgccttcgccctccccgccctggtctcaggcgccagtggaaatgtgtccagcgacgttgcctacggggtaaacatgcccgccgcaagggaggctgtgactccaagatggctgccaggcggcgccccggagcccagccactgcctccaccacccccatcacagtccccagagcccacagagccgcaccccagagccctggccccctcgccacctgccgagttcatctattactgtgtagacgaggacgagctacagccctacacgaaccgccggcagaaccgcaagtgcggggcctgtgcagcctgcctacggcggatggactgtggccgctgcgacttctgctgcgacaagcccaaattcgggggcagcaaccagaagcgccagaagtgtcgttggcgccaatgcctgcagtttgccatgaagcggctgctgcccagtgtctggtcagagtctgaggatggggcaggatcgcccccaccttaccgtcgtcgaaagaggcccagctctgcccgacggcaccatcttggccctaccttgaagcccaccttggctacacgcacagcccaaccagaccatacccaggctccaacgaagcaggaagcaggtggtggctttgtgctgcccccgcctggcactgaccttgtgtttttacgggaaggcgcaagcagtcctgtgcaggtgccgggccctgttgcagcttccacagaagccctgttgcaggaggcccagtgctctggcctgagttgggttgtggccttaccccaggtgaagcaagagaaggcggatacccaggacgagtggacaccaggcacagctgtcctgacttctcccgtattggtgcctggctgccctagcaaggcagtagacccaggcctgccttctgtgaagcaagagccacctgacccagaggaggacaaggaggagaacaaggatgattctgcctccaaattggccccagaggaagaggcaggaggggctggcacacccgtgatcacggagattttcagcctgggtggaacccgcttccgagatacagcagtctggttgccaaggtccaaagaccttaaaaaacctggagctagaaagcagtagactggaggcttctacagactgtaggattcaagtctgcagggcaggcactcgggaagggaagatggatgtaaagtgtgggagaccgaggacacagtggagcccacgagcacgagctggaacccacgaggatggcctggaacccatgtcagtctctcaccacctccagcttcgatgatgtgggtgtcctgcagaagaagctggtgcccttcctcacagagttaaatatgcatctggcccaggaattagagaagctgaaaggatgatcctggggaaggtggagcagctgcaggcctggctgcaggcctgactactgcccacaccaacgaggtgatctagcagatacatggcaacgtgtgaactgcaacaacgcctggtgccccagcaccaaccttccaagtgtaaaaacaatgtgctgctgcttcacttccgccctccggttatcaagcaaaatgtctcttgtggcccatcttactggaagagagttccgggaaacatagcctcaccaaggtgacacattacaaagccaccctaccatgaatccgctcccaagggtctcactgctcacctgaggataactcaatataactatgttgctgaaaatgcaaagctgaagaccatggatttcatggtgattccagcaagtacagagattctatgaagcccacccagaaaaaacttgctggtcctggctatttttgtgtcatttattcaagtattgagaacctggcctgtggtaggcactgtacttaatactaggatacagaaatgcaaaagatacggcccatgcaattttattaaatgcatcaatatgtattacaaatggtgaatggatttccaactttatcatggaatttaatgctgaatatatagaattcagaaaattgttgggaggacagcccttttgtgaaccttgtttggggcacagtaggaattggaaataatttagtttctatctctaagctgttctattttaaaattatttttaaatttttattgtcccactta

SEQ ID NO: 56146 - DNA, 3015 bp, Homo Sapiens; identical to SEQ ID NO: 31470

SEQ ID NO: 56147 - DNA, 7385 bp, Homo Sapiens; identical to SEQ ID NO: 29989

SEQ ID NO: 56148 - DNA, 2252 bp, Homo Sapiens
gcttcgcgactgcggaaggttgcccgggctggcgccgctgggcagagccggtgcgacgtttccctttccagctttgttcttccggccctgctgtctgcctccccggctgattggattcgttactgctttgcaacgcgcacctaactccagacggggtctcactctgtcgcccaggctggagtgcagtggcacaatctcagcttgctgtgacctcagctctctgcgacctctgcttgctggactcaagcgatcctcccaccacctcagcctcctgagtagctggaaccatcatatgcaccagcacgcctggctaagctggaatgcaatagcgtggtcttggctcactgcaacctccgcctcccgggttcaagcaattctcctgcctcagcctcctaagtagctgggactacaggggccctcctgctgctccctccatgaggctggtcctgaaggaataggcctgtggctcgtccctcctccccatctcggccctgaggcaaacataccttccacagctctgggagcaccgcctccacccaggtctcacaggatgggacacaaggataggcattaagcaggacttccagggcccgagggaagttggcgcagtgtttcagcatctaggggtcaaaagagggtcttgggcacatgcctcccccacccgagggcagacccaagtcttgcctcacccacatggccaatcctagcctaatctggggggctaaggtctgagtctctcttcccttttttgtgcctctgtctaccccaccctcaagtatgctccaaccttttggccccagttttcctctggggctcttccctcccttggactctctctcccagaatcctctctccccctcccaagctggggacagccccctggccactgagggcaggctttcagtctcttggaccctctgtcttccccagaagcggagcagttccagccgcgggctcccccacacaggagcctcctatgtcagggcctcccagcgcacctcagggcgcactggctgcgccccgtagtccagcagtgcggcgaaaaggacttcaggctcccagttgggggagtcctggacggcctgcagcgcacagtccatgggcgtgtggcccgccccattggggacctcagcgcgggccccgtaacgcagcagcagctcggccaggcccccgcagccgttggcacaagcgttgtgcagcggcgtgtggcgcttgcgcccggccgcccgggcatcagctccagcctccaggagccggcgcgccgcagcctggtgtcgcctgcagctacctgggccctcggccccagcgcacgccgtgttcagcgcagtctcgccctggctggtgcgcaggcccacgtcggcgccatgctccaggtacagagccacatgttgctccaggccgcgcgccgccgccacgtgcaggggcgtctcctggctctcgcctgctgccaggttcaccgtcgctcctgcttccagcagcaacttggcgcacctggggacaagagagcaaggtcctgaggaaaatcctgaaggcttgggaccccttcagcttgctgtgacactcccttgcctttccacccctctcagcttgaggtcctacctggtgtcctccatgagaatcatacaagccccgctacagacaacagaattggaaggtcctgagagctaccagaagcatcttcagttttcatatgaaaaacttaagcccaggagtgatttgtgcagccaaggacacacagcaagttagtggctgcaccagaaatagtactcactgcctcagacagtccctcccacagtctactctgtctccaccccaaggtctggttctgaatcattcagttgtcagttgtctccttttttttttttttttttggagacagggtctctctctgtggcccaggctgaagtgcagtggtgtgattacagctcatgtagcctggacctcccaagctcaagcaatcctcctgcctctgcctcccaagtagctgggaccacaggtgggcagcaccacacctggctaattttttaaatttttttttatagagacagggtcttaccatttgccccagctggtctcaaacccctgggctcaagcaagcctcctgccttggcctcccaaagtgctgggattacaggtgtgagccaccacacccggccttatctcctaacattttgatagcacaaaattttgaaaacccacttctgtgtacgttatgaagcatagaaaattaaacagtatgcaccaaaaaaaaa

SEQ ID NO: 56149 - DNA, 3628 bp, Homo Sapiens
attcactgctggccagtgcctgcctttttcaccacctctaatttcagcttcagcagttgcttggaactttggttctggcagcagcagcaacatcattaccgctagcggcagttttgtgccgaggcacctacacacctcccgtcctctctgccagatcgcgggcctgtcggtgtctgctcctacacgccaacgccggtgggcaggaccatgtctctggtaagccagaattcgcgccgccgccgccgccgcgttgcaaaggctactgcgcacaacagcagctggggcgaaatgcaggcccctaatgcccccggtctccccgctgatgtgccaggctcagacgtcccccagggtcccagcgattcccagatcctccagggcctctgcgcctctgagggcccaagcacctccgttctgcccacctccgctgagggcccaagcacctttgtgccgcccaccatctctgaggcctcaagcgcctccgggcagcccaccatctctgagggacctggcacctccgtgctgcccacccccagtgagggcctaagcacctccgggcctcccaccatctctaaggggctgtgcacctctgtgacgcttgccgcctctgagggccggaacacctccaggccgcccacttcctctgaggaacctagcacctccgtgccgcccaccgcctctgaggtaccgagcacctccctgccgcccacccctggtgagggaacgagcacctccgtgccgcccacagcctatgagggaccaagcacctccgtggtgcccacccctgatgagggaccaagcacctccgtgctgcctacacctggtgagggaccaggcacctccgtgccgctcgccgccactgagggcctgagcacctccgtgcaggccactcctgatgagggaccgagcacctccgtgccgcccaccgccactgagggcctaagcacccccgtgccacccacccgtgatgagggaccgagcacctccgtgccggccactcctggtgagggaccgagcacctccgtgctgcccgccgcctctgacggacaaagcatctccttggtgcccacccgcggtaagggatcaagcacctccgtgccccccaccgccaccgagggcctgagcacctccgtgcagcccactgctggtgagggatcgagcacctccgtgccgcccacccctggtgggggactgagcacctccgtgccgcccaccgccactgaggagttgagcacctccgtgccgcccactcccggtgagggaccaagcacttccgtactgccaatccccggtgagggactgagcacctctgtgccgcccaccgcctctgatggatcggacacctccgtgccgcccactcctggtgagggcgcaagcaccttagtgcagcccaccgcccctgacggaccgggaagctccgtgctgcctaaccctggtgagggcccgagcacattgtttagctctagtgcttctgtggaccggaacccctccaagtgttcccttgttttgccaagccctagggtaaccaaggcctccgtggactcagattctgagggtcctaagggtgcagaaggccctatagaattcgaggtcctgagagactgtgagagccccaactccattagtattatgggcctcaatacttcccgggttgcaattaccctgaagccccaagaccctatggaacagaacgtagctgagctgttgcagttcctgctggtgaaggatcagagcaagtaccctatccgggagtctgaaatgcgggaatatattgttaaagaatatcgcaaccagtttcctgagatactcaggcgagcagcagcccacctggagtgcatttttaggtttgaattgagagaacttgaccctgaggcacacacctacattctgttaaacaaactgggacctgtgccctttgaagggttagaagagagcccaaatgggccaaagatgggcctcctgatgatgattctaggccaaatattcctgaatggcaaccaagccaaggaggctgagatttgggaaatgctctggaggatgggggtgcagcgggaaaggaggctttccatttttgggaacccaaagagacttctgtctgtggagtttgtatggcagcgttacttagactacaggccagtaactgactgtaaaccagtggagtatgagtttttctggggcccaagatcccacctagaaaccaccaagatgaaaattctgaagttcatggcgaaaatatataacaaagatcctatggattggccagagaaatacaacgaagctctggaagaagatgctgccagagcctttgctgagggttggcaggctctccctcactttaggaggcccttttttgaggaagctgctgcagaggtaccatcccctgattcagaggtttccagctattcctcaaaatatgccccacattcatggcctgagtcaagattggagagcaaggcaaggaagctggtgcagttatttctgcttatggattcaactaagctgcctataccaaagaaaggaattctgtactacattggccgagagtgcagcaaagtgttccctgacctcctgaatcgtgctgcccgcaccctgaaccatgtctatgggacagaactagtggtacttgatcccaggaatcactcctatactctgtacaaccgaagggagatggaagaaactgaggagatcgtagacagtccaaacaggcctggcaacaactttttgatgcaggtcctaagcttcatctttattatgggcaaccatgccagggagtctgcagtctgggcctttctgcggggcttaggggttcaagctgggagaaagcatgtgattacctgcagatacttgagtcagcgctatatagacagtttacgggttcctgacagtgatccagtgcaatatgagtttgtatggggtcctagagcccgtttggaaacctctaagatgaaagccttgcgatatgtggccagaatccacagaaaggaaccacaggactggccacagcagtacagggaggcaatggaagatgaggccaatagagctgatgttgggcacaggcaaatctttgttcacaacttcaggtagaggaatgcatggcagtcagaggggccttgcaaggaggggcctttgagcctcagttctcatgtattggggggtgggggtgggtacatattgtatttggtatttgtgttccagttatatttatgtcttttcatatttagttctggtgtggtgtctggaaatgtttcaactgttttaatatattgtctgattgggtaaatgtgattgaccacttgctgtctctgttgtattttggtatgagttttgatagctctataaaatgttttggaaatctttccatcttgttgcattatctagaaaagaatatagcatatagctatagatataggcttttccttgaaagcttgaaaaaaattcgccagtaaaataatctagcttaaagtgataaactaacaaacaaatataacaacaactgaaaaggcactctaaattgtggctggcttccctttctgtctgctattgtatgaagaatactgatgtttacctgtatttgctttgctgtactaaaatgtaatgaaaaataaaagattaataaatgaaacataatgct

SEQ ID NO: 56150 - DNA, 3285 bp, Homo Sapiens
atttccttctccctttccccgccagcttcgcatccatctcccccaccccgtaaccccctcctgcctccatccaccggggctatggccgcagaagaggtattgcagacggtggaccattataagactgagatagagaggctaaccaaggagctcacggagaccacccacgagaagatccaggctgccgagtacgggctggtggtgctggaggagaagctgaccctcaaacagcagtatgatgaactggaggctgagtacgacagcctcaaacaggagctggagcagctcaaagaggcatttgggcagtccttctccatccaccggaaggttgctgaagatggagagactcgggaggaaacgcttctgcaggagtcagcatcgaaggaggcttactatctggggaagatcttggagatgcagaacgagctgaaacagagccgggctgtggtcactaatgtacaggcagaaaacgagaggctcaccgcagtcgtgcaggatctgaaggagaacaatgagatggtggagctacagagaatacggatgaaggatgaaatccgagaatataagttccgggaggcacggctccttcaggactatactgaattggaagaagaaaatatcacattgcagaaactagtgtccacgttgaagcagaaccaggttgaatacgaaggcttaaagcatgagattaagcgatttgaggaggagacggtactgctgaacagccagctggaagatgccatccgattgaaagagattgctgagcaccaactggaagaagccctcgagactttaaaaaatgaaagagagcaaaagaacaacctgcggaaggagctctcccagtatatcagcctcaatgataaccatatcagcatctcagtagatggactcaaatttgccgaggatgggagtgaaccaaacaatgatgacaaaatgaacggtcatatccatgggcctcttgtgaaactgaatggagactatcggactcccaccttaaggaaaggagagtctctgaaccctgtctctgacttattcagtgagctgaacatttcagaaatacagaagttgaagcagcagcttatgcaggtagagcgggaaaaggccattcttttggccaacctacaggagtcacagacacagctggaacacaccaagggggcactgacggagcagcatgagcgggtgcaccggctcacagagcacgtcaatgccatgaggggcctgcaaagcagcaaggagctcaaggctgagctggacggggagaagggccgggactcaggggaggaggcccatgactatgaggtggacatcaatggtttagagatccttgaatgcaaatacagggtggcagtaactgaggtgattgatctgaaagctgaaattaaggccttaaaggagaaatataataaatctgtagaaaactacactgatgagaaggccaagtatgagagtaaaatccagatgtatgatgagcaggtgacaagccttgagaagaccaccaaggagagtggtgagaagatggcccacatggagaaggagttgcaaaagatgaccagcatagccaacgaaaatcacagtacccttaatacggcccaggatgagttagtgacattcagtgaggagttagctcagctttaccaccatgtgtgtctatgtaataatgaaactcccaacagggtcatgctggattactataggcagagcagagtcacccgcagtggcagcctgaaagggcccgatgatcccagaggacttttgtccccacgattagccaggcggggtgtgtcatccccggtagaaacaaggacctcatctgaaccagttgcaaaagaaagcacagaggccagcaaagaaccaagtccaactaagacccccacaatctctcctgttattactgccccaccgtcatctccagtattggatacaagtgacatccgcaaagagccaatgaatatctacaaccttaatgccataatccgggaccaaatcaagcatctgcagaaagctgtggaccggtccttgcaactgtctcgtcaaagagcagcggctcgggagctagcccccatgattgataaagacaaggaagccttaatggaagagatcctcaagctaaagtccctgctgagcaccaaacgggagcagatcgccacattgagggcggtgttgaaagccaacaagcagacagctgaggtggcgctagctaatctcaagaacaaatatgaaaatgaaaaagcaatggtgactgaaaccatgacgaagcttagaaatgaactgaaggctttgaaagaagatgctgcaaccttctcatccctgagagcaatgtttgcaacaagatgtgatgaatatgtcacccagttggatgagatgcagagacagttagcagctgcagaggatgagaagaagactctgaacactttgttacgaatggctatccagcaaaaactcgccctgacccagaggctggaggacttagagtttgaccatgagcagtcccgacgcagcaaaggcaaacttggaaagagcaagatcggcagccctaaaattgtcagcagcctgctgcctccgtaccgccacagtgctcacaactagccgggaggcaagactgcccaactgtcagtcctgacacagctctccctgaggagcagccacattccagctcccagtgcgcccctctccactgtctctccaagcctcctcacccctagtcttcatctcctgtggacgaacatctggggtggaagttttgtagccacacacaggatactgcccaagatccagcgggtgttttcttctcggttgttagatgtacaattggattaatgtccatcgttttggaagacgagagaaagttgagaagaacacgaagcacagaccctgatgtgataaaacattttgtggtttctctgagtcacagataaacttctgccatcaaatggctacagttcatttaaatttaaaaaaaagaaaaaagaaacagaaaacgtgtctcagatggctggctttacctcgatagcataagagagacctaagacatgtaaaatacgtatattgcagtatcatctttcctcacactccaaattcagctagggaagttgattccaatatgtttgtcattgatatttattttgtactttatttgctacatgatttatgtctatacaaataatttctctgaggtgaatttaattcatttattttcaaataagcataatttgctcaattaagtatgagtttgaatttagtttgaaatctggaattggccagactgtggtcatttttcttgca

SEQ ID NO: 56151 - DNA, 5694 bp, Homo Sapiens; identical to SEQ ID NO: 30110

SEQ ID NO: 56152 - DNA, 5371 bp, Homo Sapiens
tacggctgcgagaagacgacagaaggggacatacagcagctgtaggaggcagaaaggatgtggctgtggaaggaaaccttttgggtttcagcacagagtctggaattcctgcttctgatcatcctaggccacaggcaaggagcgtggcagagtcccccagctatggccctggcctcccgccgtcgcctcctgagaacccacaggcaaagggcagggagggcgtcaggtttccccgtggggcggagcctgaccatctgcttcccgcagtgcctcccgcggaggtggacatggggtgggtaggtggcacccaccagcggggccctccccatctacaggcacacctgccccctactgctggtgacacacaggcaaagctccgggccagtgtccccgagcctaggacgcaggcaggtgaatcccaggagcgtcccctgacacaggcggacctggggaggcaacagagtcaccaggcacaggaggagaccccccagcccggggatgcggggaagagggtggcgccgtcgggctcgaaggttgtgctgaacccagcaaaagagcctcagacatggtgggcacaggatctggccggggacaaagggatggccattggggttgggggcgcctgccagcgcagtgaccaaggtcagcagcatctgcagggaccctgggaggagcgggggcggagcacggcgtggggagagggcaccagggctgccaggaacccagctgtgcctccaggggagcccgaggggccgggaagcccggcagcccaaggacaggcccagaaacaggttcaggaatgggaccggggacaggttcagggacacgctcaagaacaggcccagtggcagacccagatagaggcccaggggcaggcacaggaacaggctcagggtgggacccagggacacagtcagggacaggcccagaaacagtttcagaattgggcccagggacaggctcagggacacgctcaagaacaggcccagtggcagatccagatagaggcccaggggcaggcacaggaaccggctcagggtggggcccagggacaggttcagggacaggcccagaaatgggctcaggggcagattcagggacaggcccagaaacaggttcaaggagaggttcagaaatgggcccaggaagaggctcagggacaggcccagtggcagacccagataaaggcccagaaatgggctcaggaacagacccagaaaggggctcaggaacgggttcagggtcaggcccagaaaggggctcaggaacgggcccaggaacaggctcaggagcagacccagatagaggctcagggtcaggcccagaagggggctcaggaacgggctcgggaacaggcccagaaaggggctcaggaacgggctcgggaacgggcccagaaaggggctcaggaacgggctcgggaacaggcccagaaaggggctcaggaacgggctcgggaacaggcccagaaaggggctcaggaacgggctcgggaacaggcccagaaaggggctcaggaacgggctcaggaacagggtcgggagcagacccacatagaggctcagggtcaggcccagaaaggggctcaggaatgggctcgggatcgggctcgggatcagggctgggagcagacccagatagagactcagaggcagacccagaaaggggctcaggaacgggcttgggaacagggttgggagcagacccacatagaggctcagggtcaggcccagaaaggggctcaggaacgggctcgggaacaggcccagaaaggggctcaggaacgggctcaggaacagggtcgggagcagacccacatagaggctcagggtcaggcccagaaaggggctcaggaatgggctcgggatcgggctcgggatcagggctgggagcagacccagatagagactcagaggcagacccagaaaggggctcaggaacgggcttgggaacagggtcgggaacaggccttgacaagtgggatggcgcctcgggcctgggagcagcccattagtggcatagctgagggagtggatgctgctggcaggagtggggggtccagaagcccagcccccagggatggtggacagtcagggggcagtggcctgggggagcccagcgccgggtacccacccccaggaagccgccccctcaggggcaagagcattgccacctctcccctggggctgggaaagagcccaactgagcccaagcctgaggctgggggctgcgggactccccaggccccggcccaggaggggtccccagaccaccctggggctgagagggccctgcaggacaggatggaggcatcggagcctgagcgtcgcgggaggtccaggcacctggccaagtacaaagcccagagcttccgtgaccagagggccttcgatttgtccttcagaccaatgagcgtcagggccagcgacatgtctgagctcccaaagtgaggccccgagtacacaccgtggctcgcccagcactgtgacatccgcccattgagggacttcaggcattttcctgcctccaaatgcgtcttggagcatcccctacagagacgcctgtttccataattttctttcccttcttcacaagctgaccttgggaggattgagctacatgtgggtcgggttcctgtcaccccacagagccacgaggccatgggggtgggaggtgcgggcctgtggcctcaccaggccctcgggattgtgtcttcactcgggggcgccggctcacccctctctcacacagcctgcagcgtggagctcacacctcccgcagtggcacggtgtgtgcgtccccttcaatctgcaggatgctggcactttgggacacctccccagctctcacagggccacctcccactgctccctgcccacaccccaccatgccctgctctgatgtggccacatggcacccaccatccatgggcccaaagtgacgcacaccgccccacccccatgactcgaaagaaagggcagagcttcctccagcctcagacgcccaggtgggtgccgggtgctgtgtggctgctgggccatgtggtggtcaccagagggtgtggggacgctgggatcccaggccgaaaccagctcatccggaggaagaggcctcaggaaatgcccacgttaagttctgagaaagggacagtgcagagccgtgggaagccaggatcccagggaggcttcgtctggaaactgggtgctgggagaacgaacgggagcctgcccgcccttccctgcagtccctgtgggtggtgccactggtgccggtgacctgagagcctcgctgtctgtcctccgtccccccgaacagcatagaagtgtttcctgccctggcccgagacggcccacgactccggccctgttcaggtactgaggtaatgcatgttcaggctggaatatttgaatgctgtctagaggcacaagaaggaaatcaaagccacctgtggtcacattgcctcgagatggtttttgttgctactctggactattttttaggctcttcctccatgcacctattttaaagcacattcttccccatgatggagccatgcacctccgtgtcgcgatccatcgtcccaggccactcggtggcctctgaaacccggacccatgaggccacacggctgcctgagtggccccggagcagctggattttcagcgtgaaccgatgcagcctgtcgccctacagccccgcacccttgtttttggtggtgccctccctgtggaaagttaattcctgctttttgaaggtgtcttggcatcttctgcctttgctactgagcggtttcctgaaacagccctaagcgttcgcaaaggcgctttggtgcctgctgcgagcacctgttttctgactcggatgttcctttagaggaaggtgttttccagtgtcggccctgagagggcgttcagcaggcgcgtcctacccacgcggggctgaggtctctccttccagggaaggtccatcccggcagacgccagtggctttggctctgcagcgccaaggaggcggcgtggcgtcatgctccggggagcgcacaggtttccttccagtcggacaattaacttcagatccagcaggtttgacccaccctcacctgctgggacatgcgagtgctggtgtctggaaggagggccgggctgtgctgagctctggggggccggtccccacagctcccccgacagggcccccggggcctcctctataaatcaggggtccgtgctcccagcctgcttcgaggggtttctgcttggcgtgtgggttctaagtgcgagctgctgtgtgtggaggctcctgagcaccgggtgcccctcgcgcgtgtgggtcccggggcagcccagctgcacacaggatggtccgggggtgcgggtgggggcagagctgagcatggcgtgtacttggccacagaagtcttgctgtggtgccgctggacccctgctaggaggacagggtcccctctctcacgaagcacacggacctccagagtccctgcccctgcagtcctgggagcctgcagttggggctggagttggcctctcggagccacccaaacggagaggcccatgagaggggagctcaggggtccagcagaggctgacagagtggcctctttgtcctgttggcggcccctgctcatgcctggggcgtcctccctggagctgggggagctcagggacccccaggtctgtgtggctgcccctgccactccaggcacagcggcacggccctcactctttacctatttggaattggaggcaatgagtggcaagaacatgatgacagacacgggaggtaaaaatatgttcactggctgttccctttataaataagaagtggtgggacttgcgctgctatttttaaatagaccagagagtacactggagaaggcattgagtggttttattttaagtggtggaaaaaatgatgagaatctcctccagatgacagctccggaagtgtcgtgcctgaacccctctcacagtctggcgggcgcagagtctgtgagcggccaggaggccacctgctcgactggcccgtcctctccatgtgccagatgcagcccagcatgacactgccctcagctcaaaaacagcacagctactctgtgtgcaggaaaaaactgccagtgacttcaccaggatttgagaacggtccgtacgttcacactaagctgagacagcgcaggttagaagatagcgcggggaagtattcacacttcagatacgaccatcacggccacatggctaaggcccacaccctcccggggtgaaataactacagcagaagaatggggcgctaaccacctccacgggcattttaaataaaacccaaagttgttttgtttttttaagaaaaaaaaaaaaaaaaa

SEQ ID NO: 56153 - DNA, 1711 bp, Homo Sapiens
gctgctgctgctccagctctccggatctctccaacagctgctccagctccgagaacctcttcttgtactggagaatctggggattgggagctgatgagtcttactctgttgcccaggctgcggtgcaatggcgcgatctcggctcacagtaacctccacctcccgggttcaagcgattctcctgcctcagcctcccgagtagttgggattacagacacacaccactgcgcccggtaagtatgagatcttcgggctctgccccgacacagcctcatacgcctcactctttacacacacggtcacttgccccgcgcactcccgagccctttccagccctgacacacagctgggattctcacttccgatccgcggtcctgaacccgctcccagggcacgggaactccttcgtggcgaagcagcaagtggcgaagcagcagcctctgcgctgcctcatctacatagaagtcgccctgtccgtgatgtcaccgacagtgccttgcccagtccccgtctgcctttctgccactcaaccgaccaatctgctgccagagccgccaaggggaagtgacgtctgcctctccctttttccctcccgcccctgcgtctgttctctcccaaagaagctggtccttagcctgtgttaaggagcaacctttcggtggccagatggagccggggcatccttcttcaaataatggcttttaattcgcagactagaatgtttcggattacaaaagaaaccggttctcttcacatccttatccttgtgatgcagcattccgcttgcaattggaagccgtttaatatcagagagaaaccatatttatgaaagtaaagaggctgcttagatgactgcaaaccagccgtccttactggttttatcactggtaatgttataaagacagttgtccagtttcatgaatcttgtaggtttttttttttttgatgttgttttttttttcaaaaatccgtattgtagaaaaatatgctgtcccagaagagatgattggacactctcaagcgtggtgctggactttgtcatctcttgcacagccatctccacaccttagtgcttacctcatgttagttttttatattctgcaaagacgaaaccaaaataatccaaatttgacacaaatacctgggctacatcttatttgagatgtttaacaaatgtctggatcatcttttcttatatattacgcaggaaacactgtgaagtaagcaaagttggaatgcccaagtgaaagaccatttgaatatttacaagtagatttcagacaggaatactacagggtggtcacaggataacaaattctaggcagcagatttacatgacttgaggctgtgggctgttaagacgctgaaaaaccagggtgtggaccaagctggctaaggctgagtggacccaacgtggtgctggattggatggaggttttacctaggccctcattatatgctcattaacatactaaatcacacacccgccagtgccatgacagttctgagaccagtgtttgatgtaaaaatggcaccacagttccaagaaatctccacctttacccaggaattttcgtgaatattccaattcttggttaaagaaacccatcaagatgaaaccccagaacccattattctctcttgggtatgcccaagctcccctttcttgagtgtgtactttttgctttgcaataaatctcttctttcacta

SEQ ID NO: 56154 - DNA, 2429 bp, Homo Sapiens
gaacccaggcatcctgggctccagctgaaaccattgcatgtggctttccccatccctggccccgtgactcagtccctctgaagggagcagccctcttttttggcaatcaccagggaggtggggggaggaggaggggagctaggtggtgacatcacagtcgaaggttataaaagcttccagccaaacggcattgaagttgaagatacaacctgacagcacagcctgagatcttggggatccctcagcctaacacccacagacgtcagctggtggattcccgctgcatcaaggcctacccactgtctccatgctgggctctccctgccttctgtggctcctggccgtgaccttcttggttcccagagctcagcccttggcccctcaagactttgaagaagaggaggcagatgagactgagacggcgtggccgcctttgccggctgtcccctgcgactacgaccactgccgacacctgcaggtgccctgcaaggagctacagagggtcgggccggcggcctgcctgtgcccaggactctccagccccgcccagccgcccgacccgccgcgcatgggagaagtgcgcattgcggccgaagagggccgcgcagtggtccactggtgtgcccccttctccccggtcctccactactggctgctgctttgggacggcagcgaggctgcgcagaaggggcccccgctgaacgctacggtccgcagagccgaactgaaggggctgaagccagggggcatttatgtcgtttgcgtagtggccgctaacgaggccggggcaagccgcgtgccccaggctggaggagagggcctcgagggggccgacatccctgccttcgggccttgcagccgccttgcggtgccgcccaacccccgcactctggtccacgcggccgtcggggtgggcacggccctggccctgctaagctgtgccgccctggtgtggcacttctgcctgcgcgatcgctggggctgcccgcgccgagccgccgcccgagccgcaggggcgctctgaaaggggcctgggggcatctcgggcacagacagccccacctggggcgctcagcctggcccccgggaaagaggaaaacccgctgcctccagggagggctggacggcgagctgggagccagccccaggctccagggccacggcggagtcatggttctcaggactgagcgcttgtttaggtccggtacttggcgctttgtttcctggctgaggtctgggaaggaatagaaaggggcccccaatttttttttaagcggccagataataaataatgtaacctttgcggtttaagaggataaaatggaggatattattatgtgggtatttatatgacctttgtaaccatttaaaaatgtaaaaacgacctgacttagtaatgcgaacctatagtagcagctactccagaggctgaaatgggaggatctcttgagcccaggagttggagtccagtccagccagggcaacacagccagacgcccttgttttttattttgttttggtttggttttttgttttttgaggagtttccctctgtcacacaggctggagggcagtggcgccatctcagctcactgcaacgtccacctcctgggttcaagcgattctcctgcctcagcatcctaattagttgggattgcaggcgcccaccaccatgcccggctaatttttgtgtttttttagtagagacggggtttcaccgtgttgtcaggctggtctcaaactcctgacctcaggtactccacccgccttggtctctcaaagtgctgggattacaggcataagccactgtgcccaggcagacccccttctttaaagatgtaaaacccggccgggcgcggtggctcacgcctgtagtcccagcactttgggaggctgaggcgggcagatcacgaggtcaggagatcgagaccatcctggctagcacggtgaaaccccgtctctactaaaaatacaaagattagccgggcatggtggtgggtacctgtagtcccagctactccggaggctgaggcaggagaatggcgtgaacccgggaggcggatcttgcagtgagcggagattgcaccactgcactccagcctgggtgacagagcaagactccctctcaaaagaaaaagaaaaaagatgtaaaaaccattcttagtttgtgggccttacaaatcaggccactggcccattgcttgtagttagttgatccatgtcatgcaccctaaaaatggctctgtcactgtgagtggcttcagtaggattttgagaataagtttatattcttgctaggtaaaacaaaacaaaaacgacagtaataccaaggaatttccccccccttttaccctccatttgtgtttattgcatatccactataacaacattaaaggacctttaaaaggaagtaaaaaaaaaaaaaaaaa

SEQ ID NO: 56155 - DNA, 14977 bp, Homo Sapiens; identical to SEQ ID NO: 31421

SEQ ID NO: 56156 - DNA, 3656 bp, Homo Sapiens
ccggagctggacgtgggcggcggcggggcctgaggtctggggctcgggcggtgggcgctgctctggccggcgcgcgtgggccccggcgaggcggcgctgcaggagctttgcgggcagctggagcgctacctgggcgcggcggcccacggctgtggcggcgccaccgtgcgcgacgctctcttcgcggctaagggccgcgcggccgactgcgagagcccgcgcgagtttcgggagcgggccctgcgcgcctgatgggtcgaggcggacgcgcggctgcgtcaggtaagcgaggccgggccgccggcgtttgaccgcgcttgggtggcctgggaccctgtgggaggcttccccggcgccgagagccctggctgacggctgatggggaggagccggcgggcggagaaggccacgggctccccagtaccctcacctgcgcgggatcgctgcgggaaaccagggggagcttcggcagggcctgcagagaggacaagcgaagttaagagcctagtgtacttgccgctgggagctgggctaggcccccaacctttgccctgaagatgctggcagagcaggatgttgtaacgggaaatgtcagaaatactgcaagcaaactgaaaacaacccatccatgtaggaaagaataacacggactacacgttattcaaggacacggaaaagccaacaccatggtagcattaatgaaagtttaccaagaggaagatgaagcctaccaggaattagttaccgtggcaaccacgttcttccagtacttattgcggccatttagggctatgcgagaagttgcaactttataagtccttggatgaggatgacctaggtcctagaagggtagttgccctggagaaagaagctgaagaatggaccagacgggctggagaagctgtcgtctctattcaagatatcacagtgaattattttaaggagacagtaaaagcattagcaggagtttctgatatattgcacagaatcaacaagatataaagcagaatgatgatcctggttttttggtcaaactatccatatgagcctgtctgtctagctagtcatagaaacaatatggaagcaagtgtgccaaaatataagaagcagttgcctcaactaggaatgcaaaaagaaatggaacaggatgtgaagagacttggccaggctgcctgggccacagcaattcccaggttggaaaaacttaagctaatgctagctcaagagactctgcaactcatgagagcgaaagaattgtatttaaattgcaaaagagctgaaattcagggaaagatggaagatcttccagaacaagaaaaaaatataaatgttgtagatgaattagaaatacaattttatgaaattcagttagaactatatgaagttaaatttgagatattaaaaaacaaagaaatactgcttactacacagttggactctcttgaaagacttataaaagatgaaatttagaatcaagttcaaaacaaaaaactctttggaattttgattgtgattttgcttaaaattagagattactttggggagaatagtggtctttgcaattttgaatcttcctacccaagaacttgaaaaacaggatgaagttgtctattacgatccatgtgaaagtccagaggaacttagtcattgactgtggtggggctgcaggacgataagaattcggaagtgaaagaactcagaaggcagtgccagcagctggagtctattaaacggggcaggatctgtgtcaaaagagcttctctccagagtagaaaggatcagtgcaaagaaaatcattggctcagattgcaacaggctgaagaaagcataagatattctcgtcagcatcacagtattcagatgaaaagagacaagataaaaaggagcaaaagaaaaaagaatgggtcaaccaagaacgtcaaacactccaacgattgagagcatttaaagatagaaataatgagagagattgtctctcttgaagttctcagtgcctgtgcattgctgccactacacagctagtatcatgacagcagcttcagaaccagagctggcttccaggcaaggctgggtggggaagaaagagaaaaacaaaagaattatttctctatgccgagaccagctcggtcagggagaccctaacctagcggtgctagaggaattaaagacatagacacagaaatatagaggtgtgaagtgggaaatcaggggtctcacagccttcagagctcagccacaaacagagatttacccacgtatttattaacagcaagccagtcattagcattgtttctatagatattaaattaactaaaagtatcccttatgggaaacgaagggatgggccgaattaaaggaataggttgggctagttaactgcagcaggagcatgtccttaaggcacagatcactcatgctattgtttgtggtttaagaatgcctttaagcggttttccaccccgggcaggccaggtgttctttgccctcattccagtaaacccacaaccttccagtatgggtgttagggccattatgaacatgttacagtgctgcagagattttatttatggccagtttatggccagattttggggggcctgctcccaacactctacatatgctccatcttgcagaggcttcattcttggttctctagctaaaaacagtagaaattttgcacacctgggttagaaaaaaaaaaaatagccattaaacccacccctgttacaggtcactattggtattttgattttgccttcaatccatctgttattgtttacttttaagagtccttgatagttgctttttatgtccagagttttaatttcagtcagaaagagaaataggccttggtgagcatgctttgtcttggctggtgccagaagtcagtactcaaatatttttaaaataatttttagttgaataacaagttagacctgtgtttagctttctcattgttttcctaaaaatagaagaaaaggttttaaatactttaaccacgaaataatttaaagcaggtttaaaataaactccttcattttgcctgttctattactctgttctcacactgctaataaagacatacccaagactggtaatttataaagtaaagaggtttaattgactcacagttccacatggctggggaggcctcccaatcatggcagaaggtgaatgaggagcaaagtcacatcttacatggtggcaggcaagagagagagcatgtgtgcaggggaattcccctttataaaaccatccaatctcatgagacttatgcagtctcatgggagcagcatgagaaagactcacctccgtgattcagttacctcccactgtgtccctgccacaacatgtgggaattgtgggaactaaaaatcaagatgagatttgggtaggaacacagtcaaaccatatctcctatatacattcacactagcattttagttttagaactagttctatgttactatctgaattaatttttccacaattttgtaaggaaaaataatgcgttctttgaatttcatgtgtaaatgatatttttagttttgtgtcattttgtcaaataaattctgaaaatctttgtattgacagtgtgttatctctgcataaccatatatgtataagagtgctcaataaaaagaataaagaggaaa

SEQ ID NO: 56157 - DNA, 2755 bp, Homo Sapiens
agccagctgccgagtgagaagtctgactatccggagatggcggtgagtatagagaatttctgctaggtctcctgtgtttcagccatcccagcccaggcaccacgacacattatcaaaggactatcttggaccttctcatcccagcaaacatccaatggagaagaatgaagactccaggcatatgatcccactctagccatcccaggagcccccagctatccaaacaactacagctgtggccaaaaacatcgtgtatcagggacaaactctctgcttatggctgctctaatccttgacctacagaatcatgaaatttgtggatacggtcatgatcttgattttggcgatggtttcacagtaactcatgctttcaaaatatcaggaagcaaatgagaaaaggaaaaaaagacattcattgtatatgctgtgaagtaatcctgccaaaggacactttgggctccgcagtgagtatattttttccttaaaaattgccaatttcttgatctatattctatgataaaagttttaatattttgctaagttaattagtattgcctattgaccaacatgttctatttagtgtactgcttcaccaagtgccaacatatacgtctccagtgactgctgatggctgagtctccttatgttagtaaatttctaaacatttttcttagtacatggagtaacgtgttatgttgatcaatgtttgatgacacttaaatgtaactacaatgcagtaattcgaaggtaagaaaaagttgccatgactctcatttctttgaaattgtgtacaatgaaaggcttctcagcatgataccccaactaaaatttaggcgtatgacagcacttataagtaaatccattttatttgagtaaatattgagtttcatttaccttttagcaaattccgaagtagcatctccataaatttaaactgattttacttattgagtcctattactaactttaaaagacaatctactttggatcattttgagcatcacatattgcttacataaaataagtttaaatctgagtcaataatgatactaagcaaacaaataaaatcattggtcactgtattaagtctgttttcatgctgttgataaagacatacccatgactgggcaatttacaaaagaaatgtttaattggacttacagttccacgtgtggctggggaagcctcacaatcatggtggaaggcgaaaggcacatctcacatgatagcagacaagggaaaagagcttgtgctggggaactccttttttaaaaccatcagatctcgtgacacttatctactatcagcacgggaaagaccttcccccatgattcaattaccttccaccagtccctcacataatatatgagaattcaagatgagatttgggtggggacacagcaaaaccatatcagtcacctttggagaatactagagaattaactaactattctgaaaatcagtaattaaagggaaagaagcaaacattttttctgtctttccataaaaaattgtactttgaacaaccaaatgggtgataatgaaagaaagttcctctttataaaagtaactgaagaggccaggcgtggtggctcatgcctgtaatcccagcactttgggaggccgtgatgggcagatcacttgagcccagaagtttgagaccagcctgtgcaacatatctagaccctgtctttaaaaagaaagaaaaaatttaaaacagtaactgagcatcagctattgtgggcacactgcctatgggtagccctgctccacaaggagcagttaaaaaaaaaagtaactcagtagataaatgagaaaggaatgataattacaataacaagatgtggcaatcctgatttaattaatgaatctaagcaaaaagcaatggctttgaatagaacacagaaaagaaacaactaaatattatgtgcctcctggttgaaatatacacaattatctatgatttcatcttttgaacctgaatctgatcaagcctctagatctattcatcaatttatataaaacacaagagacacagaaaagacaaaggaatgtactaaactacagcatgaggtacaatcaagcaaaattcataccatggaaactacagaacaaacaatttagtttcttgcagaaataaattgcaagggaaaaataaagacatggttaaagacacttcggagatatgcttaccagatgcaatttatggatgtgtattagcgttctccagagaaacagaaccaagaggatatatatgggtatataagagggaatttgttatggaagccagctcacatgattatggagggtgagaagttccacaacatcccatctgcaagctgtacaaccaaggaagccaatgttgtaattcagtctgagtccgaaggccagagaaactggggccattggtgtaatcttggagtctgaaagctcaatgaagtcacgagaagatggatgtcccagccccaagagggagagaatttgcccttctctttttattctattggaacccttaacagattggatgatgcctgtccatattgatgagggtggttcttctgtactcagtttactgcttcaaatgctagtctcttctgaaaattctctcacagacccacccagaaatgttttaccagctatctggctatcccttaacccagtcaagttgacacataaaattaaccatcacagaatgttatttggattcagattttaatcaacaaagtgtgaaaaaataataagattattggagaaa

SEQ ID NO: 56158 - DNA, 2063 bp, Homo Sapiens; identical to SEQ ID NO: 32365

SEQ ID NO: 56159 - DNA, 1965 bp, Homo Sapiens
ttgctgcatgccttcattcctggtgccctctcttgtctcttccccagtcctgctgaagctgctctttagcccaggccccaagactatatggtccctgtggcagcagccaatgttgtttcaggaagcaacagcatttgaaaatatgaccaaagattggaattatttagaaggctctcaaaaggattgctacagagacacaatgctggacagttatgagaacacggtcccacagggatccttcttacagctctccatgatgcctcagagagctggaaatgatccacctggggtttcaaatgcaagtgaaatggaaatggagataagtaacatgagagaaaagtttcttatgagtgtaacaaagttagtagaaagcaaaagttacaacagcaaggtattttccaaagaaaagtactttcaaacaataaaggaagttaaagaagctaaagaaaaagggaagaagtcatcacgtgattatcgccgtgcagcaaaatatgatgtgatctctgtacagggcacagagaaactgatagaggctactcatggagaacgtgatcgaatacggtattatgtacataaggaagagttgtttgatattcttcatgatacacatctcagtattggacatggtgggcggacacgcatgctcaaggagctgcaaggaaaatatgggaatgtcaccaaagaagttattgtcttatatctgactctgtgtaaacagtgccaccagaagaacccagtacccaagagaggccttgcaccaaagcccatgacttttaaggacatagactccacatgccaagttgaaatacttgacatgcagtccagtgccgatggtgagttcaagttcattttatactaccaggatcactcaaccaagtttattattttacggccattaagaaccaaacaggcccatgaggtggtcagtgtcttgttagatattttcacaattcttggtacacccagtgtgttagactctgacagtggcgttgagttcacaaaccaggttgttcatgagctcaatgagttgtggccagacctaaagattgtatctggtaagtaccaccctggccaaagccagggctccctggaaggagcaagccgtgatgtaaagaacatgataagtacctggatgcagagtaaccactcatgtcactgggccaaaggcctccgattcatgcagatggtgaggaatcaggctttcgacgtttccttgcagcaaagtccatttgaggcaatgtttggctataaagccaaatttgggctatattcctcaaacttgccccgggaaactgtggctactttacaaacggaagaagagctagaaattgctgaagaacagctagaaaatagcctttggatcaggcaggaagaaagggctgagattggagcagacagatctgatatggacgatgacatggatcccactcctgaagcttcagaacccagcacctcacaagggacttccggtctcctctgctggtgaacagatggctgctgggtggacagtcacaggtgtctctctgagcatagtcatctgagaactgttgccagaggccccagaggaaaagattgaaggctgcactctcaggtcaagttgtacatggcagtccttgctcaaaaagacaaaagttcaggtctgtgtatttattcttagggctgccataaaaaattaccacaacctggccgggcgcagcgctcatgcccgtaatcccagcactttggtaggccgaggtgggcgggtcacttgagatcaggagttcaagactagcctggccaacatgatgaaaccctgtctctactgaaaatatagaaattggccaggcttggagctgtgtgcctgtaatcccagctaaccaggaggctgaggcaggagaatcacttgaacccgggaggcagaggttgcagtgagccgagaccatgccactgcactccggcctgggtgacaaagcaagactctgtctc

SEQ ID NO: 56160 - DNA, 5877 bp, Homo Sapiens
gaatcggttcccgggtgatcctcgcgcctgccgctgctcggccgccgccgctgacgaggagctgcagcgcgccgggccgaggcctcgagccgccccgggagctggagctgaaggcgccgcgcggagcgcgcacctcagccctgagcccggcggcggcaggcgtcgctgtcttttctccttttccccaatatggcagcggcggacggcggcgggcctggtggggcctctgtggggactgaggaggatggcggaggcgtcggccacaggacggtgtacttgtttgatcggcgcgaaaaggagtccgagctcggggaccggcctctgcaggtcggggagcgctcggactacgcgggatttcgcgcgtgtgtgtgtcagacacttggcatttcacctgaagaaaaatttgttattacaacaacaagtaggaaagaaattacctgtgataattttgatgaaactgttaaagatggagtcaccttatacctgctacagtcggtcaatcagttactactgacagctacgaaagaacgaattgacttcttacctcactatgacacactggttaaaagtggcatgtatgaatattatgccagtgaaggacaaaatcctttgccatttgctcttgcggaattaattgacaattcattgtctgctacttctcgtaacattggggttagaagaatacagatcaaattgctttttgatgaaacacaaggaaaacctgctgttgcagtgatagataatggaagaggaatgacctctaaacagcttaacaactgggccgtgtataggttgtcaaaattcacaaggcaaggtgactttgaaagtgatcattcaggatatgttcgtccagtaccagtgccacgcagtttaaatagtgatatttcctattttggtgttgggggcaagcaagctgtcttctttgttggacaatcagccagaatgataagcaaacctgcagattcccaagatgttcacgagcttgtgctttctaaagaagattttgagaagaaggagaaaaataaagaggcaatatatagtggatatattagaaacagaaagccctctgattctgttcacattacaaatgatgatgaaagatttctacatcatcttatcatagaggagaaggaaaaagatagctttactgctgtggttatcacaggggtacaaccagaacacatacagtacttgaaaaattatttccacctttggacacgacagttagcgcatatttatcactactatattcatggcccaaaaggaaatgaaatacgaacatcaaaagaagttgaacctttcaacaatattgatattgaaatttctatgtttgaaaaagggaaggtacctaagattgtcaacctaagggaaatacaagacgacatgcagacgttgtatgtaaacacagcagctgatagttttgaattcaaagctcatgttgaaggagatggtgtagtggaagggattatccgttatcatccattcttatatgatagagaaacttaccctgatgatccatgctttccatcaaaattaaaagatgaagatgatgaagatgattgtttcatacttgagaaagcagctagagggaaaaggcctatttttgaatgtttttggaatggacgattaataccatatacatcagttgaagactttgactggtgtactcctcctaagaagagagggcttgcaccaattgaatgctacaataggatatctggtgcattattcactaatgacaaattccaggtcagcacaaataaattgacgtttatggatcttgagctaaaattgaaagataagaacaccctttttacaaggattttaaatggacaggaacctcaggcactatatgatgaagtaagaactgtgccaattgcaaagctggataggacagttgctgagaaagctgttaaaaaatatgtagaagatgaaatggcaaggctccctgatagattgtcagtaacttggcctgaaggagatgaattattgcctaatgaggttaggcctgctggaacccctattggtgcgttaagaattgaaatactgaataaaaaaggggaagcaatgcaaaagcttccaggaacaagccatggagggtcaaagaaactcctggttgagctcaaagttattttacattcttcaagtggaaataaagagattatttcgcatattagtcaacatggaggaaaatggccttactggtttaaaaaaatggaaaatattcagaagttggggaattataccttgaaattacaagttgtgttgaatgaaagtaatgcagacacttatgcaggaagaccactaccatctaaagcaattaagttttctgttaaagagggtaagccagagaaattttcatttggtcttctggatcttccttttcgtgttggagttccatttaatatccctctggagtttcaggatgaatttggtcataccagtcaactagtaactgatattcagccagttcttgaagcaagtggtttatctttacattatgaagaaataaccaaaggaccaaattgtgtaattcgaggtgttacagccaagggccctgtaaactcttgtcaaggcaagaattataatctgaaggttactctgcctggcttaaaagaagactcacagattttgaaaattagattactacctggtcaccctcgtcgactgaaagtgaaacctgattctgaaattttagttatagaaaatggaacagctttcccatttcaggtggaagttttagatgaatcagacaacataacagcacaaccaaaattgattgttcattgtaagttttcaggtgctccaaaccttccagtctatgttgtagattgcagtagttctggaaccagtattttaacaggatctgcaattcaagttcagaatattaaaaaagaccagacgcttaaagcaagaattgaaatacctagttgtaaagatgtggcacctgtggagaagactattaagttgcttcccagtagccatgttgcaagactacaaatattcagtgtagaaggacaaaaggcaattcagatcaaacatcaggatgaggttaattggatagcgggtgatattatgcataatcttatttttcaaatgtatgatgaaggagaaagagaaatcaatataacatcagctttagcagaaaaaattaaagttaattggactcctgagattaacaaagaacacttgctacagggtctgcttcctgatgtgcaagtaccaacatctgtaaaagatatgcgctattgccaggtttcattccaagatgatcatgtgtctttggaaagtgcgtttacagtaagaccacttcctgatgaacctaaacatttaaaatgtgaaatgaaaggaggaaaaacagtacagatgggccaagagcttcaaggagaagtagttataataattacagatcagtacggaaatcagattcaagcattttcaccaagttctttatcttctttgtcaattgctggggttggacttgatagctcaaatttgaaaacaacctttcaggaaaacacacagagtataagtgtaagaggcatcaaatttattccaggtcctcctggaaataaggatctttgttttacttggcgtgagttttctgactttattcgagtgcaactaatttctggacctcctgctaaacttctccttatagactggccagaactaaaggagtccattccagtgattaatggaagagatttacagaaccctattattgttcaactttgtgatcagtgggataatccagcaccggtacaacatgttaaaataagtcttacaaaagctagcaatttaaagctcatgccttcaaaccaacagcataaaacagatgagaaaggcagggctaatttgggagtattcagtgtttttgcccctaggggagagcatactcttcaggttaaagccatctataacaaaagtatcatagaaggacctataattaagttaatgattcttccagacccagaaaaacccgttcgtctcaatgttaaatatgacaaagatgcatccttcttagcagggggtcttttcactgattttatgattagtgttatttctgaagatgacagtatcattaaaaacattaatccagcacgtatttccatgaaaatgtggaagctgtctaccagtgggaaccgacccccagcaaatgcagaaacatttagttgtaataaaataaaagataatgacaaagaagatggctgcttctatttcagggataaagtaattcctaataaagtggggacatattgtatccagtttggttttatgatggataaaacaaatattctcaacagtgaacaggttatagttgaagtcctgcctaatcaacctgtgaagttagtacctaaaattaaaccacctacaccagctgtttcaaatgttcgctcagttgccagtaggaccttggtcagagatctacatcttagtatcacggatgactacgacaaccatactggaattgatttggttggcactataatagccaccattaaaggctctaatgaggaagatactgataccccactttttattgggaaagttagaacacttgaattccccttcgtgaatggttcggctgaaatcatgagtctggtgctggcagaaagtagtcctggaagggatagtactgaatattttattgtatttgagccccggctaccacttttatcaagaaccttagaaccatatatcctaccgttcatgttttacaatgatgttaagaagcagcaacaaatggcagcacttacaaaagaaaaggaccaattatctcagtctattgttatgtataaaagtttatttgaagccagccaacagcttcttaatgaaatgaaatgtcaagttgaagaagcaagattaaaagaggcccaattgcgaaatgaactaaaaatacataatattgacattcctacaacacaacaggtgccacacattgaagcacttctgaaaagaaagctatcagaacaagaagaactgaagaaaaaacctagaagatcgtgtactcttccaaactatactaaaggcagtggagatgttttgggaaagattgcacatctagcacaaattgaagatgatagagctgcgatggttatttcttggcatctggcaagtgacatggactgtgtagtcaccctaaccactgacgctgcacgtcgtatctatgatgaaacccaaggtcgtcagcaggtgttgccccttgattctatttacaagaagactcttccagattggaaaagatctctacctcatttccgaaatggaaaattgtattttaaacccattggagatccagtctttgctcgagacttgttaacatttccagataatgtagaacattgtgaaacagtatttggtatgctgttaggagacaccattattttggataatctggatgcggccaatcattatagaaaagaggttgttaaaattacacactgtcctacactgctgaccagagatggagatcgaattcgaagtaatggaaagtttgggggccttcagaataaagctcctccaatggataaacttcggggaatggtatttggagctccagttccaaaacagtgtctgatcttaggggaacaaatagatcttcttcagcagtatcgttctgctgtgtgcaaactagacagtgtgaataaggatcttaacagtcaattagagtaccttcgcactccggatatgaggaagaaaaagcaagaacttgatgaacatgagaaaaatctcaaactaatagaggaaaaactaggtatgactcccatacgtaagtgtaatgactcattgcgtcattcaccaaaggttgagacgacagattgtccagttcctcctaaaagaatgagacgagaagctacaagacaaaataggtga

SEQ ID NO: 56161 - DNA, 2351 bp, Homo Sapiens
caaacccggaagcgggtcgcgtggagtgacggtcccaccgcggggatatctcttccaaatgcatgatgaaggagttctcatccacagcgcaaggcaatacagaagtgatccacacagggacattgcaaagacatgaaagtcatcacattagagatttttgcttccaggaaattgagaaagatattcataactttgagtttcagtggcaagaagaggaaaggaatggtcacgaagcacccatgacagaaatcaaagagttgactggtagtacagaccgacatgatcaaaggcatgctggaaacaagcctattaaagatcagcttggatccagctttcattcgcatctgcctgaactccacatatttcagcctgaatggaaaattggtaatcaagttgagaagtctatcatcaatgcctccttaattttgacatcccaaagaatttcttgtagtcccaaaacccgtatttctaataactatgggaataattccctccattcttcattacccatacaaaaattgggaagtacacatgagagaaaaatctttccaatgtaatgagagtggcaaatcctttaattatagctaactcttaaggaaatatcagataatccatttaggatagaaacaatataaatgtgaggtatgtgacaaggtctttaatcagaattgattccttgtatgccataatagatgtcacactggtaagaaaccttacagttgttatgagtgtggcaagaccttcagtcagacgtcatcctttacatgctatcgtagacttcatactggagggaaaccttacaagtgtagtgagcataacaagacctttggttgaaattcagcccttgtaattcataaggcaattcatactggagagaatccttgcaagtgtaatgaatgtggcaaggtttttaatcagaaagcacaccttgcacgtcatcatagacttcatactagagagaagccttacaaatgtgaagaatgtgaaaaagttttcagtcgcaaatcacatcttgaaagacaaaacttaaaagaggtggcgttgcccttgtttttgagaatgccctactgtgtaagtggtagtgttctttctttttttttttttttttaagacggagtctcacctgagcgagcctctgcactggccttatttattattgttattaattttttgtttttgagacggagtttcactcttattgcccaggctggagtgcaatggtgcaatcttggctcactgcaccctctgtctgttgggctcaagcgtttctcttgcctcagcctcccaagtagctgggactacaggtgcatgccaccacgcctggttaatttttgtatttatagtggagatggggtttctccatattggtcaggctggtcttgaacccttgacctcaggtcatccacccgcctcggccttccaaaacgctggatttacaggcttgagccacgcgtccggcctgaagtggtattttttagaaagtaactaaaccttttttcagtttaatgacccagggatgtatttctgaaggacttgggagcgatccttttaaggcaaacaagggagatagtacctgtatcttagtaggaaattaaataattcaaacatcaaatgtttcaaattaaaagctaccgacctttaaataattctgagccttgagaggaacgtggtcatgcaacaagagtccagtggcatgcaggcacaaggttttttgttttttgttttttgtttttttttgagacagcctcgctctgtcgcccaagctgaagtgcagtggtgcgatctcggctcgctgcaggctccgcctcctgggttcaggtcattttcctgtctcagcctccccagtagctgggactccaggcacccaccaccactcccggctaattttttgtatttttagtacagacggggtttcactgtgttagccaggatggtcttgatctcctgaccttgtgatccacccacctcggcctcccaaagtgctgggattacaggcatgaatgaccgcgcccagccgcaggcgcaacttttttgagttttcctggccaggcgcggtggctcaagcctgtaatcccagcattttgggaggccgaggtgggcggatcacttgaggtcaggagttagaaaccagcctggccaacgtggtgaaaccccgtctccagtaaacatacaaagccattacagggcatggtggggcacgcctgtattcccagctacttgggaggctgaggcaggagaactgcttgatccggggaggtggaggttgcagtgggccaagatcatgccactgcaccccagcctgggcaacagagcaagactccgtaccaaaaaaaaaaaaaaaaaaaaaaaaa

SEQ ID NO: 56162 - DNA, 7817 bp, Homo Sapiens
agatggcgaccgcggcgctgcttcgaggcgccactccggggcgcggcggcccggtctggcgctggcggctgcgcgcggccccaaggtgccgcctggcccacagctcctgcagtcctggtggcgacccaacggccggagcggcctgggcctgcttccggctggacgggcgcaccctgctgcgcgtgcgtggccccgacgcggcgcccttcctgctagggctgctgaccaatgaactgccgcttccgagtcctgcggccgcgggggccccgcctgctgcgcgcgcgggctacgcccacttcctgaacgtgcagggccggacgctctatgacgtcatcttgtacgggctccaggaacactcggaggtgtctggcttccttctggagtgtgacagctcggtgcagggcgcgctgcagaagcacctcgcgctatacaggatccggcggaaggtcacggtggagccgcacccggagctgcgagtgtgggcggtgttgcccagttcccctgaggcctgcggggctgcatcgctgcaggagagggcaggggctgccgccatcctcatccgcgacccgcgaacagcacgcatggggtggcggctcctcacccaggatgaaggcccagccctggtgcccgggggccggctcggggacttgtgggattatcaccagcaccgatacctgcaaggcgttcctgagggggtccgagacttgcctcctggggtggccctgcccctggagtccaacctggccttcatgaacggcgtgagcttcaccaaaggctgctacattggccaggagctgacggcccgcacccaccacatgggcgtcatccgcaagcgcctcttccctgtccggttcttggacccccttcccaccagtggcatcacccctggtgccacggtgctgactgcctcaggacagactgtgggcaagttcagggctggccagggcaacgtggggctggccctgctgtggtcagagaagatcaagggtcctctgcacatcagagcctctgagggtgcccaggtggccttagccgcatctgtgccagactggtggcctacagtctccaagtagtccgaagccttggctggcgcaggctgatggggaggctggggcctggggcctttggcctctgtccagggtcttcccgtcccatctgtctgctgcgcctactgggtgggagccctggtttccatctgggaaagtcccccttgtaggtgccctgcctggccccacccatgctcaggggccccaggcacgtgggttgttttctccctggacttcctgtggccccagaggagcccaccgtgtgagtgctgggctccagatggcgccgggtcccaatcgtggctccacacagggttgtctgggaggacgggacggtgtctctggccagcactggcagcttccgggccttgtaccccactctgcctggcatgagcctcatggggggttggtccctgtgcctggaagcggggtggtgtccagggtctgcaggctggggctcgggctttgggagttgtttcactgtgcttgcttccagcatgtctcagggtggggctatgcgtggtctagaggggtctggggcattggatcaggtggcatgtgggtgtctacacatcgagaagcacacagggatgagccactaggtatcccatgctggaggcttgtggaaggctgtgcccatctcccatgtttccccacctctgttcctcctcagagccctccaggagcgtggggtgggggccagcgcagggctcaggagccagcagggcagagttctgcctgtgtgtgctgggttttggcatagcctgtgtttgcagtgagagtgacttgctgtcagtcacggggcacagcctcctgttcacccactggcttcccccttcccactgaagtgtgagctctatgtttcagggcatctattaaagagtgagccacaggcagccccttgggagctctggtttcatttgggggagagggaggtgggggcttagtttttgtgatctggctgactggaccccgggaacagcgctcctttgagaacgcccagacctaccagatgaagcacttggcatggctgcaggccagcaggggaggcctcagaggcccaggctgggcacgtgggtgccgagtctgcaaaggacagccccatggctgtgagctgtcggctgcagggcgcagggcctggggggcaggcgtttgggccaccaagctggacgttagggtggccacagagggccaagcaggcagggagcctgtgccgccatcctggggggccacaggtgctctctagaaatctgcagccatggcggttttggggtcaggggtctaaaggcagctctgagctgcagtgtagtttgtgatcacccaggaggagggtgtagagcggatggacgggaggaagcggctgcagctggagggaagagaggggccgtccagcctcacccgctgcagtcagctctcctatgggcaaggaaacagctaggtggccctgacccctgcggtcctgagagccggtggccttcagcccctcttggacaggtcatggtctggaagcgcccagcgcaggatggattccagaccagcatccctgcaaccttttcagccccactggctgctgctttaaactggcatggagacatttgatcagcttcccagccagttttctctccagctcagccaggagtgggtgcctgtggcctgtgtcaccaagagctggtgtctcctgcatgaggggcatgcacccctggaatgagggtctgtgcctcgagctcaaagtgtcccggctctgtcatctgcctgaagttgcctggcttttccagtggggcctccttgagtgctgcagcatctgggagcatcctagcctgtcccgtgggtgtggctgggtgagggctaggaggtgagccaggaaggaagcactccactccagagtgaggtgccgcctgagccatcctgtgccccctcagtgtcttcaggtctctgcaggtgtcaggatctcaaaatacttggttcagatcaaacacatttcgtgttcttctgtgtccttttttttttttttttttttttttgagatggagtcttgctctgttggccaggctggagctcagtggcacaatctctgctcactgcaacctctgcctcccaggttccagtgattttcctgcctcagcctcctgggtagctgggactacaggcacatgccccatgcccggctaatttttgtatttttagtagagatggggttttaccatgttggccaggatggtctcaattacaggcatgagccactgtgcccagcctcttctgtgtctttaaaaaggaaagtgtcagtcaacaaaagagcccctctgtcatacaaaccaaatcagttttcaccaaaatgtccttagtcctctcagaaaggcctggcctttaggaccttggaagcaggccctaaagcgcatcggcagggtcagagctttgtgttcaggaacactgggatctgctgagagctggtgtagccgctccaaaactgcacactgcttttcctgtctgctttagtttgtgttgtaaaaacataggaagttcgtgtgtgtgtgtgtgtgtgtgaattcaaggcataaggtgcagttgtgttatgtgggtatagtgcatggtggtgcagtctgggcttcttaccctcacacctcctgcctcccctcgttagagtcccccacatccgccttccactttctgagcccacattgcctgttgggcagctcctggttatgaggcaggacgtgtggtgtttgactgtctgtttctgagctgttttacttaacacagtgtatatggtgcatctttaggaaagcatgcttgtattttcctttcaaagccagatatgggcgggtgtggtggctcatgcctgtgatcccagcactttgggaggccgaggcaggaggattgcttgagcccaggagtttgagagcagcctgggcaacatatcaagactctgtctcttaaaaaaaaaaaaattagccaggcatggtggtccacacctgtggtcccacctattcgggaggctgaagtgcgaggatcacttgagcccaggaggttgaggctgcagtgagctgtgattgtgccactgcactccagcctgggcaacagagcaagaccctgtcttaaaacaaagaaagaataaaaaagaagagaagttgcagttggtagtatttccagagcccggcagacagtgtagaaactgtgagaaacccacctccaaatcaggccttagatagaaaacatcctaagaagtatacgttcattgtaaaatcattatcatcatcatcttctaatccccaaggagacaagctccctgttctgtgttcttgtatgaggcggtcagtcaagcgcagcccgagaggagaggcaggagcctgggagagcctctgctagacctttcctggcacttccccaggaaaggcaaggcagggcagatgtgcggctggccagctggagtgatttccatgggctccaagctgtaggagtggtccctggctgccagagtgctctggccagatagaggtgggctctggactggtgaggctgcattgcggaggcgcgcacacccagctgggcccttatctgtaaggactggctggcctgggaggggcagtctcccagccagaaggtggaatttttttttttttttgagataccaaaacatcctaaggtacaggaaagaaattgtcaacacacacacacagtaccataaacaaggcccagcagaaaggcagacagaagcacacacaccaatgttctgatcttagagtaagcagacacatcacatggaatgaggatgtttaatatatttaaagaaaacaatttatgcacaggaagcaagagactataaaaatgaccaagcagattttaaaaagagaacttgttgaaataaaaataaaatactctaaaaaatattccatgatgtgtttcctgaagaatcgggaactgtttgaagaaatgacccaaagtgcagcacagaaagacagagctggaaaatatgagatgggatgagacaagaagatggagagtttagtatgacatccgcaatttacgagtaattccagaaggaggggaaagagaatatggggtggaggcaagtattcagagaaatacggctgagaactttcccaaaccaacaggagcccctgctccttaggttcaggaaccagcagctcccaagcagcatagttaaaaagctctacccaaacagtcacgtcttggtgaaagtacagaatctcatgacaaagagatcttaaggcagaaaagaaagagattatctggaaagaagaaaataagtagttgattaaaagcaacagtggaagccagaaagatagtaaataatatcttcaaagtcctgggagaaaatagtgatagcctagaattgtgtacccagaaaatccgtctttcaagaatgaggggccaggcgcagtggctcacgtctgtattcccagcactttgggaggccaaggcaggtggatcacctgaggtcaggagttcaagaccagcctgatcaacatggtgaaaccctgtctctactaaaaatataaaaattagctgggtgtggtggcatattcctgtaatcccagctactcgggaggctgaggcaggagaatcacttgaacccaggaggcagaggttgcagtgagccaagattgtgccattgcactccagcctgggcaatagaatgagactctgtctcaaaaaaaaaaaaaaaaaaaaaaaaaaaaagagggctaaacgcattttcataccacgaaactgccctcactccggagtttgctgccagcagagcctagagcgtctaaggcatgtctgggcttctggcgagggatcctgtggggaagctggagatggaagaaggagtgaataggcaggaaggtggatttgtgggcatgtctaaaacaccacatctagaagcttctacttagaatgcctacttttggagtttataaaaaagatgccacatgttgagttgggagagaggtgcccaaacctacagtgttctaaagtccccctactggtcggaaggagggcacggacactgacttcagcatctgttacaaggcttatcagagttttcagataatctctaaaagaatggaaatatatcttccaaactatagagggaagaccatggaatttaaaagccagtccttcaaggagaaatgaacaaactcaaaatcgtagttgggagtgttttttttttttttgagacagagtctcactcttgcccaggctggagtggagtggcataaacacagctcactacagcctcaaccttctgggctcagatgattctcctgcctcagcctcctgagtagcaggaactacaggtgtgagtcatcacactcagctaattttttttttttttttttactttttgtagagatggggttctcactgcattgcccaggctggtcttgaatttctgggctcaggtgatcttcccacctcagcctcctgagtagctgggaccacaggtgcatgctaatttttaaaattttttgtttttaaatgctggtcttcaactcttgtccccaagtagctgggattggggcatgaggcactgtgctaacttcatgttgaaattgaattgccattctaacagtgttaagagatggggcctgtaagaggtgattaggctgtgagggctccactctccaagggcggagttaatgttatgaaagggtaagtccagcccgcttgtgcctctcttgccctccagtgttcaaagcaccatcttggaggtggaattcccaagtcggccagttcctggatcttggactgtccggtctccagaaccgtgagccaataaacctctgttccttgtaaatgagtcagcctcaggtattctcttgtagcagcacaaatggaggcagacacttccttcaccaatctcatgggaggcccactcctgtgagctgcctctagttccccaggccacagactccatcagggctcacctggagccgtccctgtctcacctggaagctctcccactcctctggccagcctgggcatctccacccaatatgagtgatggcgactgattcccttactttagcaagctgggaataaggaatgtttgcctgttcttattcaggggtctctgcatctccacacttgcacaggttgtgtgtacatacattttcctgtctttctggtaagcccctggggtggagctctgggccacagggcaggaaaactcagtgttgctaggaactgccagacattttcccggagtgagtgcagcatttacattcccaccagaagtgtgccaggttcttgtcatactgcgtcctcgccagcgcttggtgctgtcagtcttcttagtttccatttagagattcagtgtttaaattttgaacgtcttgggtgaacaccttggtttgagaaaagtaagaaaaagggtctgtctggctatgggccatggagacccagggcagtgctccacgtgccaaccctggggcagggagcccaagctaggactgtgactgtctgggctgtgggcatctgaccatctccagtgtccccgtctttgatttccctggcgatggtgctagcttagtttgtgcgcatcggcatttgtgggagaaatgaaggattaatacattttgttttatgtcagactctctcagtgagaagttctcagggacaataatagcagggggtcctgctgaagaaaaactgggagatggctgagctctggtccatctttcattgattcattcatttcttcattcattcaaccatgtattgaatgcttatagccaatgaaaataaagtacacagtatatttta

SEQ ID NO: 56163 - DNA, 4039 bp, Homo Sapiens
atacttacaattacgagatttatatttgcattagtctctttggctggtgggtaggggtgagaggctcttcctggatcccttattttctacaggagaggaggaaaacacctgggatgctccagtgctcttacgcagataatgatcattaacatcagcctctctgatcaaagagctactccaccccactctggctgtagtgtgacattcctgcctgcctgaggaagaaatggtgagcaggggctgcaattgcagacaagtgtcacccagaagccacaagtttctgtgagcaccaggtctacaaactacccaaggcatagcaatggcattatcactggaagaattcgtccactcccttgacctcaggaccctacccagggttctagaaatccaggcaggcatctatcttgaaggctctatttatgaaatgtttggaaatgaatgctgtttttcaacaggagaagtgattaaaattactggtctcaaagttaagaagatcatagctgaaatttgtgagcagattgaaggttgtgagtctctacagccatttgaactgcctatgaattttccaggtctttttaagattgtggctgataaaactccataccttactatggaagaaatcacaaggaccattcatattggaccaagtagactagggcatccttgcttctatcatcagaaggatataaaactagagaacctcatcataaagcagggtgagcaaatcatgctcaactcagttgaagagattgatggagaaataatggtgagctgtgcagtagcaaggaatcatcaaactcactcatttaatttgcctttgtcacaagaaggagaattctacgagtgtgaagatgaacgtatttacactctaaaggagattgttgaatggaagattcctaagaacagaacaagaactgtaaaccttacagatttttcaaataagtgggactcaacgaatccatttcctaaagacttttatggtaccctgattctcaagcctgtttatgaaattcaaggtgtgatgaaatttcgaaaagatataatccgcatcctccccagtctagatgtcgaagtcaaagacatcactgattcttacgatgctaactggtttcttcagctgttatcaacagaagatctttttgaaatgactagtaaagagttccccatagtgactgaagtcatagaagcacctgaaggaaaccacctgccccaaagcattttacagcctgggaaaaccattgtgatccacaaaaagtaccaggcatcaagaatcttagcttcagaaattagaagcaattttcctaaaagacacttcttgatccccactagctataaaggcaagttcaagcggcgaccgagggagttcccaacggcctatgacctagagatcgctaagagtgaaaaggagcctcttcacgtggtggccaccaaagcgtttcattcccctcatgacaagctgtcatccgtatctgttggggaccagtttctggtgcatcagtcagagacgactgaagtcctctgtgagggaataaaaaaagtggtgaatgttctggcctgtgaaaaaatcctcaaaaagtcctatgaggctgcgctgctccctttgtacatggaaggaggttttgtagaggtgattcatgataagaaacagtacccgatttctgagctctgtaaacagttccgtttgcccttcaatgtgaaggtgtctgtcagggatctttccattgaagaggacgtgttggctgccacaccaggactgcagttggaggaggacattacagactcttacctactcataagtgactttgccaaccccacggagtgctgggaaattcctgtgggccgcttgaatatgactgttcagttagttagtaatttctctagggatgcagaaccatttctagtcaggactctggtagaagagatcactgaagagcaatattacatgatgcggagatatgaaagctcagcctcacatcccccacctcgccctccgaaacacccctcagtagaggaaacaaagttaaccctgctaaccttagcagaagaaaggacggtagacctgcccaagtctcccaagcgtcatcacgtagacataaccaagaaacttcacccaaatcaagctggcctggattcaaaagtactgattggtagtcagaatgatttggtggatgaagagaaagaaaggagcaaccgtggggccacagcaatagcagaaacattcaaaaatgaaaaacatcaaaaataacaagatgtgacagaagccacttaggcagcaaacataaatgttgcagtgaaaaaagaagctagccttctagctgaaaaacgagtattccccaatggactccagaagaaacttgattcatcgctgcaaaggaaagaacaaccttaaaacttttaacagataaaacttacagaaacctatgatatagaattcatatagtctattctgttgtgtctaaatctgtaggcattgtgttgttgttctttaggacgtatttatttaacttgcacattttttcagattcttatttctactaccaacaactaagtaattgggaaataattctgtatttcagtttctgagtaaaaccagtctgaaataggataaaagccaccaaatattttcttttttttccagaatttgttttgccattttttagtgctatcatcattcctaacaagactaacttacagaaaaataattatatctgactgatttaaaatgttcaggtttcttatccaaatcccttggaactatggaaaggagtttgatttcacattcacagtgtatttacaaaatacgctgtgtcataaatatgtttgaattccaacagccaaagccattgagagtcataggagttttccataaccttctcttctatgacccaacaacaagctcatgactgaaatttcaccagatttctgagacgatgtcttaatattctatgtgctatgtaccagataattctttagatgaatgtttcttaggattgtaggaaaattatctagttaatcataatatttgatggaaagaaaaagacaataaaattgtaatataataaatttggctgacaagaaaccaaagtgattcttaattagtatacatcagaatgatgctcttatagttgtaccatctataaaaattactttaagggctctcacattttaataatttatcttattatgtattaagtatacaggaacaatattatttttcctttaacaaaatgaagagacaggctatctggttaatgttacataggaatttaatagtaatgcttgaacttcatccatagatcatactctgtacaaaatttgttagctaacatcctatctcataattattttatgttttgtggagaaatttgttgattttgtaccaaagtgtttctgaagacaataaattgtgagtcaactttagaacaaaaaaaattagagttttttcaatgtttatattctgattaagcttactttaccttacattttttctaagtaacaatgaatcctgatttctagtgtcctaaaaattgcttagtgatttgattgtggtaatatcatttcttatctacaatgtctaaagttttatgggacagtttttcttttatttattttgcctgtttgtgcagataagaacagaaacttttctaagacccacatttggttattgaaggccacagcgaatcttaacctaacagccttgacaaactgcaccataggtgtttttagactcatataatttgttatttttcaaacaatagtgaataattaatatttttgtttggaatttgagaacaattaaatttgtacttttagtaactaccattctttgattagaaaattaagagaatgcatatcttactttggttgtaaattatcaagggctttctaatagaaatcatatataacatttctaaatataagtcctttcacatactgtgtttccagttgtcttgatattgaaaagtgtaataaacttcatgctcacctattggagatttgggaaggttgaaaataaacttcctaatttttaaaaaaaaaa

SEQ ID NO: 56164 - DNA, 6339 bp, Homo Sapiens
tttgctttaacaacaagtgggggtggttgaatttactcctccctctcctctctcctccccttcctcttgctgcggttcttgacactactacaaaccaggactataaacataaacatgtgtcactgtaacagggcaggttcccagtagctgcagcagtgaaagacagtgattggctccagtgctcccagaaggatttgggctgaagccaggggaacagaaccagaagaggattccctttccagagaccatcaggctcctcatgtcttgtctctcctctctcccctcgtggtggctcaggatttcagtatggctgagcagcccatagagtcagctgacatggtcaacaaatttatcaaagaaaccccctggcttttgaagaatagtactttatacatctggatctgcacatcaggcaaagctcagaaatatccgtttattcttttaatcacgcggatgtgtctatttttggaggaacaaggaaacacataaatgcctgggttgcatttatgttgtagttgcaaacactgaacagttaagaagattttgccgaattttgcaaagcagccaaggagccgccttgggatcgtggtaatgcgactgggaggacccttgctctcatttggcaatattttggatatccttgaaaacgacaccaaaatttgccttaatttgactaagaagaggttaaaccacattgattttcatccaaagtgattttgttaaagcagatgcttgactttgatggaaaaactgggagttgtggaagatttacctaaactaccaaccaaaagcatcacaaaccactgaaacagtctgcatcgtacatcagcactttcttttcattgttattacgtaaaacctctggaagcaccttgggcgtttgacagtttcttttctttgctgcagaaggaagcaatctgctccctggaattctgacctgtggtgaacaggaccctggcaaaggctttgctggggactcttggacgatcccgcctccaatccagtacggttaattgtggaaaagtgttcacatttctggcttatctatgctttgttatgggtctgacgtgaaactacctcctccccaccccaccccccagcagagaaccgaaatccagttgaattgttacagtgtttcggagctggagccttgaactgcttccttggtcaaataactttgtttctggttgtaaaaaggcatttcaggaaaaaaaaaaaaaaaaaaggaaaatcgagagaaattccaaacgtaagtccgcactggggtggttcacggggcgggtttaactttggagctcccagccggtctccttccccactcctgtaagggaaataccaggctattctgcacattttcccttaagctccattttccaaaaggaaaagggggtggggtatctctctttcggcttgataatgttttttaaatgcttttctttgaaatgataatagctgtatcggtaaaatgcaaataaacgaaaaaaataggcagtatttctttaaaggcgaatatacggtgcggtttttttttttttctcccttaagcgtacacacactgcttctgatgaagtctgtgagtcaggctgtttctgagctccgatagtttaatggaaagatttatataccgactgtattatttactttgggaggggaggtggcagtataagggtatgctaattagtgggagattttggggggaaggggtggaatatcaatttttattgcatcacctgtcaggagtgtccaatcagcgctggctttaggggaattaattgatgaaggtgtctccggacgagctcacttcactctgtcattttatttgtagctaaagcagcggcgggaatagcagctgcatttcttttctctttctcccttcacattccattatcatagtgctccaatggagaaggaaggaatagaggggcccaggtactgatctgcatcggggactcagaccaacacactggcagatcagaaaccggatggttttttccctcttttttaaaaaaacgaaaacaacaacaacaaaaaagcaagaatcaagtcagtgtaatttcatggggtttccccccccccaataatttcgcctagagtttggcacttccttcgccgggaataacagtctttgttattttattagcaggatgccttgagacacacgcagcatctggctgaggattaacatacatacatgtgtatgtatgcgtcacgtatatatttactgcaaatggtggggatcatttagtgcccgagatgggagacctgaagtcaggttttgaagaggtggatggcgtgaggctcggctacctcatcattaaagggaagcaaatgtttgccctctcccaagtcttcacagatctgctgaaaaacatcccgaggacgaccgtgcacaagcgcatggatcatctgaaagtgaagaagcaccactgcgatctggaggagttgcggaaactcaaggcaattaacagcatcgccttccacgccgccaaatgcacgctcatctcccgggaagacgtggaagcgctctacacctcctgcaaaaccgagcgcgtcctcaagaccaagcgcaggcgggtcggccgggccctggccacaaaggcgccgccgccagagcgcgccgctgccgccagcccccgcccgggattttggaaggacaagcaccaactttggcggggcctgagcggagccgcgcggcccctgccaatcagcgcgcagtcccagcgcccgggcgccgccgccgcgcgccccgccgcccatctacctcagatttttagcaaataccccggctcgcactacccggagatcgtgcgctcgccgtgcaaaccccctctaaactatgaaactgccccgctccagggaaactacgtcgccttcccctcggaccctgcttattttcggagcctgctgtgcagcaaacacccggcggcggccgccgcgggggccacttgcctggagaggtttcatctggtcaacggcttctgcccgcctccgcaccaccaccaccaccaccaccatcaccaccaccaccaccaccaccgggcccagccgccgcagcagagtcaccacccccctcaccaccaccggccgcagccccatctgggcagctttcccgagagctgcagcagcgactccgagtccagctcctactcggaccacgcggccaacgactcggattttggctccagtttgtccagctccagcaattctgtgtcctcagaggaagaggaggaggagggagaggaggaggaggaggaagaggaggaggaggggggcagcggggcctcggattccagtgaagtcagctcggaggaggaggactcgtccaccgagtcggactccagctccggctccagccaagtgtcagtgcagagcatccgattcaggcgcaccagcttctgcaagcctcccagcgtgcaggcgcaggccaacttcttgtaccatctggcctccgccgccgctgcaaccaaacccgctgctttcgaggatgccggcagacttcccgacctcaagagtagtgtcaaagcggagtcgccggcggagtggaatctgcagagctgggcccccaaagcatctccggtgtactgcccggccagcctggggagttgtttcgctgagataaggaacgatagggtatctgagattacattcccacactctgaaatttccaatgctgtaaagagaactgacctgacaattaactgcctggcagagggggcctcttcacctagcccaaagacaaacaatgcatttccacaacaaagaatactccgagaggctaggaaatgcctacaaacaactcctactacacactgtgcagataacaacacaatagctgctaggttcttaaataatgattcttcaggagcagaagcaaattcagaaaaatattccaaaatccttcattgtcctgaatttgctacggatttgccctcttcgcagactgatcctgaagtgaacgctgcaggagcagcagcaactaaagccgagaatccctgcactgacacaggcgacaagacattgccatttctgcacaatattaaaatcaaagtagaagacagtagtgctaatgaagaatatgaacctcacctttttacaaataagctaaagtgcgagtgcaatgatacaaagggtgagttttacagtgtgactgagagtaaagaggaggacgccttgttaaccacagccaaggaaggttttgcatgccctgaaaaagaaactccttccttaaatccactggctcaaagtcagggcctttcatgcactttaggttctccaaaacctgaggatggggaatataaatttggtgccagggtgagaaaaaattaccggacactagtactgggaaagcgacctgtccttcagacacctccagtcaaaccaaatttgaaatcagctagaagccctcgtcctacaggtaaaactgagacaaatgaaggaacactggatgattttacagttataaacagacgcaaaaaggtagccagcaatgtagcatcagcagtgaaaaggccatttcatttcatggcaaattttccttgtccaccatcactcattattgggagagatggggatttgtggccggcgtattccttaaacaccactaaggattctcaaactcctcacaaggcccatcctatatggaaatggcagctgggcggttctgcaatacctcttccacctagtcacaaattcaggaaatttaattcataaaaatgttttggaagatattttcttgaaccatattaccttccttttgttgtaaactgcacaggatggtttgtacaagtccattaatgtgttacaccccctttggagtcctggtttatcgcattttgaagacagaaatcggattactttttttccgttgcgggtttttttttttttttctggagtagggtgggggcggggtgggagaagggttggtttacattccacagactacttcaggctaaagactcaagtaaaactcagttattacggtagagctggaacactttactgtttcgatgctaataatgcacccggtacctcaattcaactgctacaaataaatgtcaaaaggttgaataataaatattacaatgagccattaagtttatgcactagatttcagagctgaaagtgtaactgttaattcagtgaaagtttgttaggttacatggttacacagtgaggtgaggtgaggtagcaagaagtttctgtgagcccaaaatgttattttctggagctcttgtttgtggggtatctttttcttttgactccccttattccctctccaagagtagttgcacttaactttttttttttttttttagtggaaagattggggtgtgagtcctgattaaatgctagtaaaagctgcctcatacatactgagtaaaataaatacggaattgtattttttttgtaaagggtgtgattttacttttaaagccactcctttgcaacaggaaaagtctgttttgtgttctcacccaaaggttttaaataaggtgactcttactattgtcctgcttatcttgtggtctgaacatgactcttcaaactcccaaaacaattgaaatatttcttttttttttttttttttttggagagagtctcgctgtgtcgcccaggctggagtgcagtggcacaatcttggctcactgcaacctccacctcctgggttcaaacgattctgctgcctcagcctcctgagtagctgggattacgggcgcgtgccaccatgtccggctaatttttgtatttttagtagagacggggtttcaccatgttgaccaggctggtcccgaactcctgacctcaggtgatccgcctgtctcggcctcccaaagtgctgggattaaaggtgtgatccaccatgcccgggctgaaatatttctcgtaatagcagaatatttcatggccgaactcttgatagtgacaaatcagtaaatacaaccaagaaaaagaaaatgaggggtcagagttgcaataccccaaatgaaaaataacagttttttcagggctttttggtaccagaactcaggcacttggattttatgaccttatactttttctgcatctctctaaaacttgtgttttcagaccatcctgtgtatagagcaggagagtttctactgcaagtgacaatcagaggtgactatctatatttgcacttaaaatcaaagtagttcaacatgcaaatgctagggtctagccctgggtaagggccatgctggtgtactgtgttgtgatgatggaagcagtaaatcaaaattatggaaatttgcactgttgaaaagcatgctttagctttattttcaattaaaaacactgtttaaaaaaaaaaaaaaaaaa

SEQ ID NO: 56165 - DNA, 1451 bp, Homo Sapiens
tgaaagttgtcgagtgcgcctgtccctgtggtgggagcagtggcgccgagcgtgcccacgggccgccgcttgggtttctctcgtgttcagggtagtatggacgtggacaatggcagtggcccctggctggcccaagagccgggtccagatacgcgcgcctgattccaggcgtcataaccaacccggggccgcgaggctgggatcaggcaccccggagccgcttgcccgtggccgggctgctctccccctctaagcctaagcaccgccagtcgcggcgctgcgctttccgccgacctcccagagcgtcccgccgtcgccggcggccagcctcgcgcaggaccagtgtggcgccgccctgctgttgctggggggcgcccgaggcctccattccttgcccaggcttccggctctcggggcggcctcccttccgcccacgctccagggcttccccggctcccgagctccgagcttccaccacatcggccggctcaggacagggcttccactgtaaagtcggctgccagacgtgttggagctcaccggatttgtccctggtgccttatttagttcacttggtgaggtcatgtttttttcctggatggtgttgatggtagtagatgttcttcagtgtctggacattaaaatcttgggcatgcagcaccatatgagaggtttaaaaaataaaattaaaaaagagaaaagaacccagagttgatctctgcagcatgccatcactgctggggatgaggaaacggtgatttcaggactgttttttctgtctcttcagtgcctctttcagtgatctgaggttaaaaccagagggacaatcagtggagccttctttctgccgtcttgctttactctcacgcccaagaatcagaattcagaacttttaataagaaaagctttcagaactcaggaaggacaaggaagacattctggttctccatgcttaacattggactgtttcttcaactgagactatggaggattcatcaacagaccaggaagcaacagcctgggctccagaattgaccagtagtccgtgcacagacgaggagaggtcccatgaaacttcggcgcagtctgggaaccgagctctttttgtaacaagttgtttgtcaggaggcccggtcatgaaagcccttcctgactgggctcaaggaatacaaaaaggacaacttgtttttgccattgtctgttgtttttcaataactagttctccgaaacagcactggatgaatgcctcaaggggctcacacaactcgttccaggacttagtgaccattgtttctgtccctgttcaatagagttcaaatttaatatttaaattttgctccacaatgtgccatattatctgtatccaacctgtcattgggcatttaggttgattccatgtctttactattgtgaataatgctgcaataaacatttacgtgcttgtgtcttta

SEQ ID NO: 56166 - DNA, 1958 bp, Homo Sapiens
tcgaatttgcctctgcaacttgactctcctctaggaagagtactccagagagcagggatatgtcaccaggactcctgacaaccaggaaggaggcattgatggccttccgggatgtggctgtggccttcacccagaaggagtggaagctattgagttctgctcagaggaccctgtacagggaggtgatgctggagaactacagccatctggtctccctgggaattgcattttccaaaccaaaactcatcgaacagctggagcaaggcgacgaaccttggagagaggagaacgaacatcttctggacctttgtccagagcctagaacagaattccagccaagttttccccacctggtggccttttctagctcgcagctcctcagacaatatgcgctaagtggccatcccacacagatcttcccaagctcatctgcaggaggtgacttccaactagaagctccaagatgctctagtgaaaaaggagaaagtggagagacagaaggccccgacagctcattaagaaagaggccaagcagaatttctaggacattcttcagcccacatcaaggtgacccagtagaatgggtagaagggaacagagaaggaggaacagaccttcgcctggcccaaaggatgagtcttggggggtcagacacaatgttgaagggagcagacacttcagaatctggagcagtcatacgtggaaactatagactgggacttagcaaaaagtcaagcctgttcagccaccagaagcatcatgtgtgccctgaatgcgggagaggcttttgccagagatcagaccttatcaagcaccagaggacacacaccggggagaagccatacctgtgtcctgagtgtgggcgtcggtttagccagaaggcctccctctccatacaccagaggaagcactcgggggagaagccgtatgtgtgcagggaatgtgggcgacacttcaggtatacatcctctctcactaatcacaagaggattcactccggggagaggccctttgtatgtcaggagtgtgggcgaggctttcgccagaagatagccctccttctacaccagaggacgcacttggaggagaagcccttcgtgtgtcctgagtgtgggagaggcttttgccagaaggcatcactcctccagcaccagagctcacacacaggggagaggcccttcctgtgccttgagtgtgggcgtagcttcaggcagcagtcactcctccttagtcaccaggtcacacactcaggagagaagccttatgtctgtgctgagtgtgggcacagctttcgccaaaaggtcactctcatcaggcaccagaggacacacacaggggagaagccttacctgtgcccccagtgtgggcggggttttagccagaaggtcaccctcattggacaccagaggacacacacaggggagaagccctacctgtgccctgattgtgggcgtggctttggtcagaaggtcaccctcatcagacaccagaggacacacacaggggagaagccttatctgtgccccaagtgtgggcgtgcatttggctttaagtcgctcctcacccgacaccagaggacacactcagaggaggagctttacgtagacagggtgtgtggacaaggacttggccagaagtcacaccttatctctgaccaaaggacacactcaggagagaagccctgcatttgcgatgaatgtgggcgcggctttggctttaagtctgccctcatccgacatcagcggacccattctggggagaagccgtatgtctgcagggagtgtgggcgtggctttagccagaagtctcacttgcatagacacaggaggaccaagtctggtcatcagctcctaccccaagaggtcttctgacctttcctttccccgtgagtgtgaagctggcagaaatcactagtaaatgcttcagtttcctgaaatggaatgaaaaaaaaaaaaaaa

SEQ ID NO: 56167 - DNA, 5211 bp, Homo Sapiens
atggctgagttagagtctgaaatccagctttttgcaggtgacctcttagagcgtactcttctgtatgcagcccagggcagtggccctagagggtcagggcatcccctgcatcctcaaaaccccaaggcagtaggaggggtgagctgtgagggctcagggaagcagggagatgtgcaggcggcggagccactgccggtacacgctgggctatggggacaggttgggcgtggctttcaggtcagccagcagccaaaatgggaagggaggagtcgcagacggattacgcgaaggctctatcccacgaaaggactgggtgcaccccagaacgaggacgcggagcttccctgttccaagcagcaacagactgagaaaatccaagaaaggaggcccgaggggctgctgtggccccatcctcctggcacccgcggcccgggctctgcgacgcctttcgccccacctgcggaagcagcgatgcctggcggagcctgcgtgctggtgatcgcgctgatgttcctggcctggggggaagctcaggagtgctctcctgggggacaccagtttcttcggagtccttatagaagtgtccgttttgactcatggcacctccagcagtcagctgttcaagacctaatatgtgaccattccctctcccctggatggtatagatttctcatccttgacagacctgccgagatgccaaccaaatgtgttgagatgaaccattgtggaactcaggcccccatctggctgtctctgagagattcagaaacactgccatctcctggggagatcaagcaattgacagcttgtgcaacatggcagtttttgttcagcactacaaaagactgctgtctctttcaaatcccagtgtctgtaagaaactgtgggaacttttctgtatacttactacaaccaactcagggatgtatgggctactgtgcggaagctatttctgatgcacgattacacccatgtggttctgatgaaactgaaacaggaggtgattgtgttcgtcagctggctgcctcattgccacctccacctgcaggaaggccagaggttctggtggagttgattgagtccaggcttttctgtaggtgttcttttgatgttcccgctacaaaaaactcagtgggatttcacatagcttggtctaggctttcttctcaagaagtcaaagaggagctgacacaagagaccacagttcaggcattctctcttttagaacttgatggcataaatctcagacttggagacaggatattctgcagcgcttctgtctttttcttggagaatcctcatgtacaaagtgtagccatcgaaagccaagaattttttgcaggcattaagctacagcctgaattgagcactatatcagaggatgggaaagaatactacctgaggatagaaagcacagttcctattatttgttctgaatttagtgagcttgatcaagaatgcaaaatctcattaaaactgaaaactattgatcaaggtaatatactaactttattttatcttattattagattgcaaacaataatgcttttttttcctgtaggaaaagtcactggagtgtactcatataataaatcatgttgcatgttgacatcaaattttagcccaatcatattactaatactcggccaaactgacgattgccaaagcaattcacatttcttcttcttggctgaaagcatacattttaaaaaaagaaaaaaaataatctggttttcttctggggcatttatccgtgctgatcttggtgaatggggcatgagtctaacgatcagagcccctagtgtagattacagaaacactctgggactttgtggaacctttgatgaaaatccggaaaatgatttccatgacaaaaatgggatgcaaattgatcaaaattttaacaattatgttgcttttattaatgaatggaggattttaccaggaaaaagcatgtttgacacactgccagtttctatgacatcacctggaaagccatcctattgtagctgttcattggacactgcagcgtatccgtcttccgaagatctggacagtgtttctcgatcagaaattgccttgggttgcaaagacctcaatcatgtcagcttatcttctttgataccagaactagatgtcacctccgaatatattaattcagacactcttgtcagagagataaacaagcatacatctccagaagaatataatctaaatttatttctgcaagaaaaaaaacacataaacctgactaaactcggcttaaatgtacaaaaacatcctggaaatgagaaagaagattcactacaatatttggccaataagaaatatacacaaggccggggaagccacagccaagaaatgaggtacaatcgacaaaacagatggaaacggcagaactttcatgagtttcctcctttgtttgctttcccgagtctcagccaaacggatctggaagaacttacttattttttcccagaggaccatgctgaggatgtacagcaagagtttttcccctcttggcccactccctctggcctcaccgagtatagcaccttgaccctctgtcaggagactctagccaactccagcataggaaggctgtgtcttgcttttcttggcaagagattagacagtgttatagagatgtgtgtgaaggatgttctgttaaaagatgatcttagttgggcagaagcaggtgtggcccttttagaaaatgaatgtgaaaagaggattgtggaggaggggaaatataacacagaagagtatggcacatcaattgaagacattctctcagtattaaaatgccccaatttatgcagcggcaatgggcagtgcatggaatgggggtgtgcgtgttccccaagctttagttcctatgactgcagtgattcctatgacaaagctcctgaaattacagagcttgggaatgctggattctgtgatgttcaaaaatataattgtatgatggtgagagtttttggcaaaggcttcaaagaattaccttcaattaaatgtgaagttactaacctacagtataatagcagtgaatggatgcctggagaacccatctatacacagactgttttccacaatagcagagctgttgattgtcagctgcccactgatgttcagcagtttgataccatggatctggtgggtgggaaaccaactgggaagtggcagttgaaggtatctaatgatggttataaattcagtaatcccaaaataatggtcatatatgatggtgcttgccaagtttgtggtctctataaaaatgactcatgtactataaaggaaaatgtttgcattattgatggactctgctatgttgaaggagacaaaaatccaaccagcccttgtttgatttgtagacccaaaatttcaagatttacttggtcatttttagaaaacaaccagcccccagtgattcaagcattgcaagacaaattacagacattttatggtgaaaactttgagtatcagttcgtggccttcgatccagaaggttctgacatccattttacgttggactctggtcctgaaggggcaagtgtttcctctgcagggctttttatgtggaaaacagatttactaactacccaacaaattactgtacgccttaatgatgactgcgatgctgaaactagagtcacgattgaggtgactgtgaagtcttgtgattgcttgaatggtggatcatgtgtatctgataggaacttttctccagggagtggagtgtacctgtgtgtctgcttgcctggcttccatggcagcctttgtgaagtggacattagtgggtgccagtccaacccttgtggtcttggcagctatattagtggttttcacagttattcctgtgattgtccacctgagctcaaagttgaaacacagtttgtaaatcaatttactacacaaactgtggttctcacaagatctgataaaagtgtaaataaagaagaggatgataaaaatgcccaagggagaaagaggcatgttaagccaacaagtggaaatgccttcaccatttgtaaatatccatgtggaaaaagtagggagtgtgttgccccaaacatctgcaaatgtaaacctggttacattggttctaactgccaaactgctctttgtgaccctgattgcaaaaaccatggaaaatgtattaagcctaacatttgtcagtgtcttccaggacatggtggagcaacctgtgatgaagaacattgtaacccaccttgtcaacatggtggcacatgcttggctgggaatctctgcacttgtccttatggttttgtaggaccaaggtgtgaaacaatggtttgtaacaggcactgtgaaaatggaggccagtgtcttacaccagatatttgccagtgcaaacctggctggtatggacccacctgtagtacagctttgtgcgaccctgtctgcctcaatggtggttcgtgtaataagccaaatacttgcctctgtccaaatggattctttggggaacactgtcagaatgctttctgtcaccctccctgtaagaatggtggccactgcatgagaaataatgtgtgcgtctgtcgtgaaggatacactggtaggagattccaaaaaagcatctgtgatcctacgtgcatgaatggaggaaaatgtgtgggaccaagcacttgctcttgtccttctggttggagtgggaaacgatgcaacacacctatctgcttgcagaaatgtaaaaacggtggtgaatgcattgcgcccagcatatgccattgtccttcctcctgggaaggagtgcggtgtcaaataccaatttgcaacccaaaatgtctttatggaggcagatgcatatttcccaatgtgtgttcctgccgcactgaatactctggagtcaaatgtgagaagaaaatacagataagacgccattgagtagcatcaagtatatgaattacaagcctgtatcttaagaatggaaatattttgttcagaaaaagttggagataacttggagtttatttgaacatcattcaaaaaatatcttaaagactgaagaaactaataaaatacataatgatctctgttgtaatcatagagaaaagcaaagaagaaatccaggtaatctaaatttgatgttgagatgggataggatatttacatattgagatgatgtatctgatattccacccattcacaatatttaataaactgaatattttctcagccctaact

SEQ ID NO: 56168 - DNA, 1819 bp, Homo Sapiens
caggaggtttcaggaaaacacaagctatgcagtggggcaggtgaggcttggcctgcccagcctgtcctgagtgtcatgggaacagctctggaagtgactcctctgtcctctggaatctggatcagatggggccttctccagacatctgtgctcagcagatgcgacagacggcccctcgagtgtagcccaggatccagcaccggcccaagcaggtgggagctaaggggaaaccgaggctcacagcgaggaacttggtcaacaagcccaggcccctccaccctgcccgcgtttcctgcactgcactggatcaaaccggtttgatccttgataatgcctccgacaaatatttgatgagggaggaggctgagagaggggctgtggaacaaatcaccacaaactggagggccgaaaacaccagcaatgggctccctcttggttctggagccgagaaggcagaaatgaaggcgtcatcagggttgctccttctggggcctcagagcaggactctgttccctgcccgtccccagctccggtggttggcggccttcctccgcctgtggccctgcactccaatcgctgcctctgttgtcacttggccccccatgtgcctctgtgtctcagaaggacacaagtcatattgaattaaggaccctccctaccccagcatgaccccgttttaacttagaactttcacaatgatctgatttgcaaagaaggctggattctgaggtcctgggaaggacatgaattttgggggatgctgttcacctcagtacaccggtgcagagttcggtgacaccgccaagttgcttgacggtgagcagcctggcattgtagaaaggcagaggttgactttagtttggtccctggctttgtcctttatttgttctgtgacaccttggacaagttttgtgacccgagtgtcagtttcctaggaaccagtgacaatgatcagagatagggggactcaagggtaagtaaagtgcaggatgaactgcagcggagcgtgtgaggtgcctggcaggtgtcggccacccagtggcgctcgaagcacctgctgctccctccttcctcgctcccagctgccttctctgctgggagctctttggagaggagctgtgtgactggttcatcctgtccctcgaggagctaccagttcagtcaaggacattgagaagcagcggatggtgacagtgcagtgtgacagtggtgtgctgtgggagccccatggagcggctacccaggcaggaacgtcagggaggcttcctggaggaggtggtgcttcagatgagacttgaaggagcagaaggtgtttgctagacaaaggggcttgcttggatgaatggtcttcagagcgtggtcccagtaaggaaggagaccactactactcttgctgccctcctcccccgaccttgcctagtttacaagacaggaggaaagagagaaagcaaaaagttagaaaaaaaaaaaaaaaaaacagaagtaagataaatagccagaagaccttggcaccaccacctggccctggtagttaaaaaaagtaataataataatatcgacccctgacttaaactacttgtattatctgtaaattccagacattgtaggaaaaagcattgcaaaattttctgttctgttagctgattcatgtagcccccagtcacgttccccatgcttgttcgatttatcatgaccctttcacgtgggccccttagaggtgtaagcccttaaaagggccaagaatttctttttccgggagctcggctcttaagacgcaagtctgctgatgctcccggctgaataaacctcttccttcttt

SEQ ID NO: 56169 - DNA, 1731 bp, Homo Sapiens
agtccggacagacagacaggcagacagacgcacggacaagcagatgctccttggccagctatccactcttctgtgcctgcttagcggggccctgcctacaggctcagggaggcctgaaccccagtctcctcgacctcagtcctgggctgcagccaatcagacctgggctctgggcccaggggccctgcccccactggtgccagcttctgcccttgggagctggaaggccttcttgggcctgcagaaagccaggcagctggggatgggcaggctgcagcgtgggcaagacgaggtggctgctgtgactctgccgctgaaccctcaggaagtgatccaggggatgtgtaaggctgtgcccttcgttcaggtgttctcccggcccggctgctcagccatacgcctccgaaatcatctgtgctttggtcattgctcctctctctacatccctggctcggaccccaccccactagtcctgtgcaacagctgtatgcctgctcgcaagcgttgggcacccgtggtcctgtggtgtctcactggcagctcagcctcccgtcgacgggtgaagatatccaccatgctgatcgaggggtgtcactgcagcccaaaagcatgaactgagcatcgtggatgggtgcacggagacacgcaccttggagaaatgaggggagatggaccaagaaagacgtggacctggatgatgtactctgggtcaagagaccagggatgcagggttaggcagacaggtccccagagtcctcaccctgctccccagacagtagacacagtgcccgtcctggagttgcaccactgatagtcacagcacacaatgattgacaactcacttttttttttttttttgagatggagtctcgctctgtcgcccaggctggagtgcagtggcgcaatctcagctcactgcaagctccacctcccgggtttatgccattctcctgtctcagcctcccgagtagctgggactacaggcacccgccaacacgcccggctaatttttcgtatttttagtaaagacagggtttcaccgtgttagccaggatggtctctatctcctgacctcgtgatctgcctgccttggccttattattttttttttttaaggacagagtctctctctgtcacccaggctggagtgcaatggcgcgatcttggctcactgtaacttccacttgccaggctcaagcagttctcctgcctcagcctcctgagtagctgggactacaggcacccgccaccatgcccagctaatttttgtatttttagtagagacagagtttcaccatattagcctggctggtctcaaactcctggcctcaggtgatctgcccacctcggcctcccaaagtgctgggatcaaatccactgttaatcattaggctgaactgtctcttatagaatgaggtcaaagacactcccagttgcagggagggtagatggccccacccagaccgagagacacagtgatgacctcagcctagggacaccaaaaaaaaaaaaaaaaaaaacccaaaccaaaaacgcaaaccaaagcaggcaggcagacagctgctgggggaaatcctggggtccttgagacagaggcaggaccctcgtgttcccagctgcctcttgccttgatagtggtgctgtgtccctctcagaccccccacctgagtctccacagagccccacgcctggcatggcattccacagaaaccataaaggttggctgagtcc

SEQ ID NO: 56170 - DNA, 7385 bp, Homo Sapiens
agcgaggagcttttgcggcaggcagagacaatggaagaaaatgaaagccagaaatgtgagccgtgccttccttactcagcagacagaagacagatgcaggaacaaggcaaaggcaatctgcatgtaacatcaccagaagatgcagaatgccgcagaaccaaggaacgcctttctaatggaaacagtcgtggttcagtttccaagtcttcccgcaatatcccaaggagacacaccctaggggggccccgaagttccaaggaaatactgggaatgcaaacatctgagatggatcggaagagagaagcgttcctagaacatctgaagcagaagtacccccaccacgcctctgcaatcatgggtcaccaagagaggctgagagaccagacaaggagccccaaactgtctcacagtcctcaaccacccagtctgggtgacccggtcgagcatttatcagagacgtccgctgattctttggaagccatgtctgagggggatgctccaacccctttttccagaggcagccggactcgtgcgagccttcctgtggtgaggtcaaccaaccagacgaaagaaagatctctgggggttctctatctccagtatggagatgaaaccaagcagctcaggatgccgaatgaaatcacaagtgcagacacaatccgtgctctcttcgtaagtgcctttccacagcagctcaccatgaaaatgctggaatcgcccagtgtcgccatttacatcaaagatgaaagcagaaatgtctattatgaattaaatgatgtaaggaacattcaagacagatcactcctcaaagtgtacaacaaggatcctgcacatgcgtttaatcacacaccaaaaactatgaatggagacatgaggatgcagagagaacttgtttatgcaagaggagatggccctggggcccctcgccccggatctactgctcatccaccccatgcgattccaaattccccaccgtctactccagtgccccattccatgcccccctccccgtccagaattccttatgggggcacccgctccatggttgttcctggcaatgccaccatccccagggacagaatctccagcctgccagtctccagacccatctctccaagcccaagcgccattttagaaagaagagatgtcaagcctgatgaagacatgagtggcaaaaacattgcaatgtacagaaatgagggtttctatgctgatccttacctttatcacgagggacggatgagcatagcctcatcccatggtggacacccactggatgtccccgaccacatcattgcatatcaccgcaccgccatccggtcagcgagtgcttattgtaacccctcaatgcaagcggaaatgcatatggaacaatcactgtacagacagaaatcaaggaaatatccggatagccatttgcctacactgggctccaaaacaccccctgcctctcctcacagagtcagtgacctgaggatgatagacatgcacgctcactataatgcccacggcccccctcacaccatgcagccagaccgggcctctccgagccgccaggcctttaaaaaggagccaggcaccttggtgtatatagaaaagccacggagcgctgcaggattatccagccttgtagacctcggccctcctctaatggagaagcaagtttttgcctacagcacggcgacaatacccaaagacagagagaccagagagaggatgcaagccatggagaaacagattgccagtttaactggccttgttcagtctgcgctttttaaagggcccattacaagttatagcaaagatgcgtctagcgagaaaatgatgaaaaccacagccaacaggaaccacacagatagtgcaggaacgccccatgtgtctggtgggaagatgctcagtgctctggagtccacggtgcctcccagccagcctccacctgtgggcacctcagccatccacatgagcctgcttgagatgaggcggagcgtggcggaactcaggctccagctccagcagatgcggcagctccagctgcagaaccaggagttgctgagggcaatgatgaagaaggccgagctggaaatcagtggcaaagtgatggaaacaatgaagagactggaggatcccgtgcagcgacagcgcgtcctagtggagcaagagagacaaaaatatcttcatgaggaagagaagatcgtcaagaagttgtgcgagttggaagactttgttgaagacttgaagaaggactccacggcagccagccgattggttactctgaaagacgtggaagacggggctttcctcctgcgtcaagtgggagaggctgtagctaccctgaaaggagaatttccaaccttacaaaacaagatgcgagccatcctgcgcatagaagtggaggccgtgcggtttctgaaggaggagccacacaagctggacagtctcctgaagcgtgtgcgcagcatgacagacgtcctgaccatgctgcggagacatgtcactgatgggctcctgaaaggcacggacgcagcccaagccgcacagtacatggctatggaaaaggccacagccgcagaagtcctgaagagtcaggaggaggcagcccacacctccggccagcccttccacagcacaggtgcccctggcgatgcgaagtcggaagtggtgcctttgtccggcatgatggttcgccacgcgcagagctcccctgtggtcatccagccctcccagcactccgtggccctgctgaaccctgctcagaacttgcctcacgtggccagctccccagccgtcccccaggaagcaacctccactctgcagatgtcgcaggctccgcagtccccacagatacccatgaatgggtctgccatgcagagcttgttcattgaagaaatccacagtgtgagtgccaagaacagggcagtgtctatcgagaaagcagaaaagaaatgggaggaaaaaaggcaaaatctggatcactataatgggaaagagtttgagaagctcctagaagaagctcaggccaatatcatgaagtcaataccaaatctggagatgccgccagccacaggcccactgccaaggggagatgccccagtggacaaggtggaactttcagaagattctccaaattcggaacaggacttggaaaagctggggggaaagtcgccccctcctcctccgccacctcctcgtcgaagctacctgccaggatcgggactcaccaccacgaggtcaggcgatgtggtctacaccggcagaaaggagaacatcaccgctaaggcaagcagtgaagatgctggaccaagcccacagaccagagctacaaaatatccagcagaggagcctgcttcagcctggaccccatccccaccgcctgtcaccacctcctcctcaaaggatgaggaggaagaagaagaagaaggagacaaaataatggcagaactccaggcattccagaagtgttcctttatggatgtaaattcaaacagtcatgctgagccatcccgggctgacagtcacgttaaagacactaggtcgggcgccacagtgccacccaaggagaagaagaatttggaatttttccatgaagatgtacggaaatctgatgttgaatatgaaaatggcccccaaatggaattccaaaaggttaccacaggggctgtaagacctagtgaccctcctaagtgggaaagaggaatggagaatagtatttctgatgcatcaagaacatcagaatataaaactgagatcataatgaaggaaaattccatatccaatatgagtttactcagagacagtagaaactattcccaggaaactgtgcctaaggccagtttcggtttctctggcattagtccattagaagatgaaataaacaaagggtctaaaatctcaggcctgcaatactctatacctgacaccgagaaccagacgctgaattacggaaagacaaaggagatggaaaagcaaaatacggataagtgtcacgtttcctctcacactagactaacagaatcaagcgtgcatgattttaaaacagaagatcaagaggttatcacgacagattttggccaagttgttctaagacccaaggaggcaaggcatgctaacgtgaaccctaatgaggatggagaatcaagttcaagttctcccactgaagaaaatgcagccactgacaatattgccttcatgattaccgaaaccactgtccaggttctttccagtggggaggtgcatgatattgttagccaaaagggagaagacatacagacggttaatatcgatgccagaaaagagatgaccccccgacaagaagggactgacaatgaggatccagtcgtgtgcctggacaagaaaccagtgatcatcattttcgatgagcccatggacatccggtctgcctataagagactttcaactatctttgaggaatgtgatgaggaattagagagaatgatgatggaggaaaagatagaggaggaggaagaggaggaaaatggggattctgtagtccagaataataacacttcccagatgtctcataagaaggtggccccaggcaatcttagaaccggacaacaggtggaaacaaagtcacagccacactccctggccacagagaccagaaacccaggaggacaggaaatgaacagaacggagctgaacaagttcagccacgtggattctccaaattcggaatgcaagggtgaggacgcgaccgatgaccagtttgaaagccccaagaaaaagtttaaattcaaattccctaagaagcaactcgccgctctcactcaagccattcgcaccggaactaaaacagggaagaagactttgcaagtggtagtctatgaagaagaggaagaggatggcaccctgaaacagcacaaagaagccaagcgcttcgaaatcgctaggtctcaacctgaagacacccctgaaaacacagtgaggaggcaagagcagcccagcatcgagagtacatctccgatttcaagaactgatgaaattagaaaaaacacctacagaacattggatagcctggagcagaccattaaacagctcgaaaatacaatcagtgaaatgagtcccaaagccctagttgatacctcatgttcttccaacagagattctgttgcaagttcatcccacatagcccaagaggcctctccccgacccttgctagttccggatgaaggtcccactgccctagagccccctacgtcgataccttcagcttcacgtaagggctccagcggggccccacagacgagcaggatgcctgtccccatgagtgccaagaacagacccggaaccctggacaaacccggcaagcagtccaaactgcaggatccccgccaatatcgtcaggctaatggaagtgctaagaaatctggtggggactttaagcctacttccccctccttacctgcttctaagattccagccctttctcccagctctgggaaaagcagttctctgccctcttctagtggtgacagctctaacctccctaatccacctgctactaaaccatcgattgcttctaaccctctcagcccccaaacaggaccacctgctcactctgcctccctcatcccttctgtctctaatggctctttgaagtttcagagcctcactcatacaggtaaaggtcaccatctttcattctcaccgcagagtcaaaatggccgagcaccccctcctttgtcattttcctcctcccctccttctcctgcctcctccgtctcactgaatcaaggtgccaagggcaccaggaccatccatactcccagcctcaccagctacaaggcacagaatggaagttcaagcaaagccaccccatccacagcaaaagaaacctcttaaaggtcaaatcctattaggcacaagtcggagttacatttaaaaaaaattaacagtctacaacaactgttttcacaagagaatgtaacatattgctgtatcgtttgaggcttaatgctaaatatgtgctaaatactggattaatagatttcagtaaagctcgttcgttttgtttggttttctttttacctagttgctatagtgtctacagtctatactcaatacctataaaatgcagtaagcatgtgttacagaaagaggttctggtgggagagaaaggtgcgtgtgagacaggagaattgtcttaagcatataaaacatgtatgattccagaattttagtatgttttgtataaaactatttttcattacggagactagaagtgaacagagaattacacaagtgtgactatacaaattgtaaaacagatactataatatttccttttattttagtgttatttagctttattacagatttctatttttgtcaaaacttcatggttcctttcaagatcttttttgccaaaacattttgatactatagcattgtacatttgaaagtagtgttctagactataaaaccaatgaacttctacatgagccctacagacaggcatgtgtagaaggcaatttatcaaacctattgcactgccatgaaaagtgtgtataataatttgctagcccaagcaagctagttttctttgcttgcttcttttctttcttttttccttccttttttttttttttttcttttttaacatgttgagattctctagttgttttctttggcgtatctaaccccttcttttgttttctgagacctggtaacccacgctcttgcattgtggattttaaaatgtatactctgtacggttctgtaaaccgaaaaacttttgtaaatatataaatatacatagacataaaaatactgtatgtgacagcacatagagtagttttcccacaccaaagttaatttttatgcatgctttaaaagtatatatcgggaccggcagaaatggaagtatccatacatttttaaaaagcaacaagtttgcacagctagagtgtttttgtaaataaatgtatttgtataacacagtcatgtaatatacagaactataagcagagactttgcaaaactaaataaagggctgcatgcttattattttttgtaccttgtcactataactacttcctagtcaaagaacgaaatgtaactgttaccgagttaaatgtttttccgctttgagggatgtaaccacatccactcagaggacactacttttctgaaagctctggggtgactaatgatgagttcctaataaattaattgcaagtgtggtgccttggatgtggcctgttggctcgctttcttctctgtggcttatcaaggtgtagatgacagaaagcaaacctggatacagagtttccaccctcagttcctggaggggctcttattattttctctctttttaaaaaacttccagtagaagtaaagtggaaataaaatgtctttatcaaaaa

SEQ ID NO: 56171 - DNA, 4586 bp, Homo Sapiens
aaaggaaggagggtgactgcagagaccggccctgggcagcggtaccaggggcacagggagcctggcccggcccattgtcactggaattcatgccatgcagacttctacatcaaagggaaacaaggtcgggagggccgaggggtccacggcactccgcacccacggggccaggctggcacaacgccccaacgctgcaatcctgggaagagtcacacgcgccctcccgggacccacgtgaccatcaagggagtgtggaggacacatccctcgggggtgacgcccctgcagatggagtttccccatctgtgccacccttgcaaggcctgggaaaggctgcggggccaggcggcaccgggcaagctgagtgccaggtggtggttgcaacacaccgggcaaatctgaaaccatgggacggacgagctgcacccctgggaaagagaacagaggaaggccggttatcaacgtcctcctgtgcctcagtttccagaaacaagccagactcagtgcctcagggagaccccgtgtggcctccggagagcacgggacccgccctttgtgcaggtgaggaaactgaaccccagagcagtgagggactggcctggggaccctgggctcagccctgggcgccttccctctgcccatctcagacgggcacagccagcaccgcctcaccccaacgcgcctccagactggccctccaggggcccccaggcacaatcctctcactttcttcctcaagcccctgccttcccccttcgcactgtgacccaggggctgctagcagctgggctgggctccaaagcttgaagctgcttctccaggtctctttccagggggcggcggatggctgctcactcagggacgccaacaccaacaggaagggacccatgcacggatctgacttccctcccaggctctgccttcactcaatgtccctgtggggcagctggggctcccggccgccctcccctgcccacagccgtgaggttgcttcctagggttctgttttccccacagtcggaactgaggtgctgggaggctccagaagagggatggggtggagcaagtggcctggagccccccagggcagaccccaaagagaagggtcagaagtgccctctggggcctgggcagctggggggagcccacaagcctgagaccctgtgggagggaagcgcccccaccccgtggtaagaaaggggctggtagaggctcctatgtggctccctctgtcccctcccgacctctggccaggcttgggataatccctgagtggacacaggcgccacgatggggtctcgggggtgagggctgaggaggctgagcctccaaggaccccagggtgcctgttcccactgcacacccaccagggcacagggtagggatagtgccaggagggccacagctgcagggtccatcccaggccgtggtacacaggtagaggtgggtgccagccttcgtgaagcacctgcagaagctccactcagggagagaacgaggcactcgcccaaacagatcctgggtcacacggggcagcaagagagggtggagcaagtggcctggagcaaagggttggaggccccggggcggcgcgttctcccccaagcccattccagggccatgggcaccccccagaggcagctggtgggactgcagccatgcaggtcctagagggcaggtgacaggggacgtgacagaaggggacaaagggccggcaacatccctgggggaggcacagagagggccagactgccctcggtggactgcggaacccagaacccaacggccaatcctccccctactcctcacccacagtaaggggccagggctccatgcaatgagaacccacgggtgatgccacacgggggagaagccacgcgggggagaggccatgcaggggagaggttacaagggggagaggctgcggggtgagaggtcacatggggcagaggccacgcgggggagaggccacgcaggggagaggtcacatgggggaggccacgcaggggagaggtcacatgggggagaggccacacaagggagaggccatgcaggggagaggtcacaatggggagaggccgcaggggggagaggtcacatggggcagaggccacgcgggggagaggccacgcaggggagaggtcacatgggggaggacacgcaggggagaggtcacaagggggagaggccgcagggggagaggtcacatgggggagaggctacacaggggagaggccgcacgctggggagatggtccctgcgggaagactccgaggcagtctcctgcagctccttccggcgaatccggttcaggaagtaaaaccagccctgtgtagaggtaagtgatgcttgtggggataatctccgagcagctcaccgcggcgctggccattgccgttctcttcacggtagaagagtccatttggggaaaaggtccccatcagagatggagatgttccctttcagactccaggctatggctgtggggccggctccctaccacgtgggctgggggctgggcacatgcatgcccactcctgggccctcttcctggtaggccacagcaccacacacactgcaaaccaggcctcttcttcatccaccaccaccgtccaggcctcaacatcaccgcgtggggtcttgtgccctctgggggaacttccgggctaatgaggggggacagtccccattaccggtctatctttataaggcagtatatgcaacagtggaagttctgtgagacatgttccaaccccggggctgctggcagaactgtccccaaacccaccctcgatcccacggccaggaagtgggtccaaaattgcctggccaggtcacacccctgcgtgaaccgccccacaacacccagggcgctgcctgacttgccgtccacctctcagcccctcccctcacccctgccgcagctgcagggcctaccctcgccgggggctgctccctgcttacctccctcgcccgtgcaatgcctccacttcccgcaaggcctaccgggagatgttacaggtcacggtcatatttgagcatgagaagctcacgcagagaacattctggctgagggagaggtcttggggttcaaggctgtttcttggctctgctcagccatgccaggcaggaaaatgggcacctctagtgacccaggctggctgagagcctgcagggaagagcctttggaacgtgagccactgtgggctggcaggactgcaactggcgtctccatctactggtaccgaggcgaggaggaaaaagcaggggggcccggagacggcccctctaagtctgtaactccagagctgctgctcagtccccagaacgtcacctccgagcagagcctgtgacaactgtcaactgtgaagctgtggcgtgggttgctactgaagctctgaagtcagcgaggacacagcatgtttgttctagaccgtttggctgcgggaggaagctgtacatgcacacactcgcctcaccaccctgcgagtccacaggcccctccccggagtcacctccaggtaaagggggccctgcgtcgggacttgctctctggggcgctgagatgctctacaatgagctgtgctgcagtgcacggccgcccgactgtgcacccgcaacggggaactgaacgctgcatgaagtacatctccaagttgttctttaagaaggcttagggtccctggaagaccctcgcccacacccagcgtggagcgttgttgctcacgtggccacacctctcgggatggccgtgggtctccgtgatgggcaggcgagtggaaccacaggtgcttcccgtcctggtcacaaagtcagagtggctgggccaagtgtcctgagaagagtcacctcctgggatcccatcagcctggccatagcagaacacccagacaggggcccatccccgaggctcaactcaacgcatgcagccaccgtagaaaagtctggaaagtagttcttcaaccgactagacatggtgagcccaaaacccagccatgacactcctaggcatctgccccagaggaatgaaagcatccatcccctgcaaactcatccttacacagcagcgtgactcaagacggccaaaggcggaaacaccccaaacgtccatcagtggacaaacgggcagatgcaatgcactgtctgtaccgtgggatgtcactcagccatatgaaggaaagactccagtgtggatgagccctggaaccacggtgctgcgtgatcccgtaacacatggccagaacagacacggcccggaacctgaggccgggaggatgcgtgcaggtggcggggagacagaggggcgatggcccagtttcttttgggctgaaaatggtctaaagttgactgtggtgatggctgtacaactctgaatatgctgaaaactcgaattacacacttcagttgggcgaactgtactccatgtgaattacctctcgatggttctctcctgggctcaggcgcttctcccaccttggcctcctgagtagctggaactaccattcatgtgcggaaataaaacaactcggtctcaaaaaaactcaactcaaaactcagtctcaaaaaaataaaaaagtaaaagaggc

SEQ ID NO: 56172 - DNA, 1989 bp, Homo Sapiens
cgcctgcaggttttgggatttgagattgacgcggtgaactctgtccagttttcaaaccacacagagacaaggtcggtctctgtcgcccaggctggcgtgaagtggcgcaaccagctcactgcagccttgacctcctgggctgaagcaatctttctgcctccacctcccgagtggctgggactatagttgtgcaccagcacgcccacctcctgcccagggttgttactggggtggtcacgtgggcagcttctgcctgggatgggccacaaagccagactcccggcagggacacgggtgttccacacaagctgcgttgttggttccctgacgcccttcaggctggggggtgggaaagccgatcccccaagtgcctgcagagcccacctggcgcaggcctcgccgcctcgaggctgctgctcgcacttctgccccttcccccggccaggcccccgttccttgaggccgtaccacaaggtgcgttcatttttccacaccgtgagctgggcttggcagagcctccaccttgtggccagtattcccagtggcccctttgagaggatttcctggagctccctgtctgagcttcccggactgagggcactgggaaggagcctgcggagctggaggtcagcgggtggacgggttgcgctgtcctggctttcggagtgtagagccagaggggatgggacaggtgccctgctgctgggcttggtggtccctgctgcagggaaggggcagctggtgtgaacacaaggagctgcggggctggagaaggccagggccaggagcctgccgacggacaccagcgaggggccaggccgggccaggagcctgccgacggacaccagcgaggggccaggccgggccagactccctggccggctgggatctgacaggagcgccaggctccttgggccgcccgaggaaccgcttgtttgcctgtgctttttcatctgtaaatggaatgagttggacacaagatccaagcgccctcccctgttggagaaggttcttgtgggctctgggcccatcccacatcccacagtgggcaggaggccaccaagaggtgcaagaccatgccctctgtttcgataggaagctgggcctcagaggggcctggggcctgtgtctgagacccggccaagtgctggacgtctccccttcctcatggctgttatggctgaattacgtccccccaaattctcatgttgcagccttaaccccagcacctcagtgtgggactgggtttggagatggagcccctacagaggtcagcaggttaaaagaggccatcagggctctgggtgggccctgatccaagctgcttggtgtccttgtaagaagaagagatgaggacacagacacacacagagggacagccccatgaggaaacagggaggcaatgccgtctgcaagcccagggcagaggcctcaggaaccagccctggtgacacctggaccttggacccccgtgcccaggacagtaggagaattggagccgcctggctgcagtccttcccgatggcaccctgtattagtccgttctcacactgctaattgttgggaaaagggcttgtggaatgcctgtataaactggccatgaaaatatgggacaataagttgtggaaagccacaagaggcctctgaggaggaaagcctcctaattgccatcatgttcgcatgctcagggcgagacctgctgtcttatctgtaaacactgtgttcaaggagaaagacattccttcgaagcactggactgtggacagacacacgagctcctggttaagcccgctcccaccagctcctgtccgataagttaaagatacgctgtttgagcacaaaggagattcattgaaaccgctattgctgtagattacgcctgtgacgcactgcctccctttcactgtttcgccctgaatatctgcttctcagatctaagtgactgtactcaataaatagcgtggagaccagaaaaaaaaaaaaaaaaaa

SEQ ID NO: 56173 - DNA, 8246 bp, Homo Sapiens
cggccgccgccggcacccacagcgccaagagcggcggctccgaggcggctctcaaggagggtggaagcgccgccgcgctgtcctcctcctcctcctcctccgcggcggcagcggcggcatcctcttcctcctcgtcgggcccgggctcggccatggagacggggctgctccccaaccacaaactgaaaaccgttggcgaagcccccgccgcgccgccccaccagcagcaccaccaccaccaccatgcccaccaccaccaccaccatgcccaccacctccaccaccaccacgcactacagcagcagctaaaccagttccagcagcagcagcagcagcagcaacagcagcagcagcagcagcagcaacagcaacatcccatttccaacaacaacagcttgggcggcgcgggcggcggcgcgcctcagcccggccccgacatggagcagccgcaacatggaggcgccaaggacagtgctgcgggcggccaggccgaccccccgggcccgccgctgctgagcaagccgggcgacgaggacgacgcgccgcccaagatgggggagccggcgggcggccgctacgagcacccgggcttgggcgccctgggcacgcagcagccgccggtcgccgtgcccgggggcggcggcggcccggcggccgtcccggagtttaataattactatggcagcgctgcccctgcgagcggcggccccggcggccgcgctgggccttgctttgatcaacatggcggacaacaaagccccgggatggggatgatgcactccgcctccgccgccgccgccggggcccccggcagcatggaccccctgcagaactcccacgaagggtaccccaacagccagtgcaaccattatccgggctacagccggcccggcgcgggcggcggcggcggcggcggcggcggaggaggaggaggcagcggaggaggaggaggaggaggaggagcaggagcaggaggagcaggagcgggagctgtggcggcggcggccgcggcggcggcggcagcagcaggaggcggcggcggcggcggctatgggggctcgtccgcggggtacggggtgctgagctccccccggcagcagggcggcggcatgatgatgggccccgggggcggcggggccgcgagcctcagcaaggcggccgccggctcggcggcggggggcttccagcgcttcgccggccagaaccagcacccgtcgggggccaccccgaccctcaatcagctgctcacctcgcccagccccatgatgcggagctacggcggcagctaccccgagtacagcagccccagcgcgccgccgccgccgccgtcgcagccccagtcccaggcggcggcggcgggggcggcggcgggcggccagcaggcggccgcgggcatgggcttgggcaaggacatgggcgcccagtacgccgctgccagcccggcctgggcggccgcgcaacaaaggagtcacccggcgatgagccccggcacccccggaccgaccatgggcagatcccagggcagcccaatggatccaatggtgatgaagagacctcagttgtatggcatgggcagtaaccctcattctcagcctcagcagagcagtccgtacccaggaggttcctatggccctccaggcccacagcggtatccaattggcatccagggtcggactcccggggccatggccggaatgcagtaccctcagcagcagatgccacctcagtatggacagcaaggtgtgagtggttactgccagcagggccaacagccatattacagccagcagccgcagcccccgcacctcccaccccaggcgcagtatctgccgtcccagtcccagcagaggtaccagccgcagcaggacatgtctcaggaaggctatggaactagatctcaacctcctctggcccccggaaaacctaaccatgaagacttgaacttaatacagcaagaaagaccatcaagtttaccagatctgtctggctccattgatgacctccccacgggaacggaagcaactttgagctcagcagtcagtgcatccgggtccacgagcagccaaggggatcagagcaacccggcgcagtcgcctttctccccacatgcgtcccctcatctctccagcatcccggggggcccatctccctctcctgttggctctcctgtaggaagcaaccagtctcgatctggcccaatctctcctgcaagtatcccaggtagtcagatgcctccgcagccacccgggagccagtcagaatccagttcccatcccgccttgagccagtcaccaatgccacaggaaagaggttttatggcaggcacacaaagaaaccctcagatggctcagtatggacctcaacagacaggaccatccatgtcgcctcatccttctcctgggggccagatgcatgctggaatcagtagctttcagcagagtaactcaagtgggacttacggtccacagatgagccagtatggaccacaaggtaactactccagacccccagcgtatagtggggtgcccagtgcaagctacagcggcccagggcccggtatgggtatcagtgccaacaaccagatgcatggacaagggccaagccagccatgtggtgctgtgcccctgggacgaatgccatcagctgggatgcagaacagaccatttcctggaaatatgagcagcatgacccccagttctcctggcatgtctcagcagggagggccaggaatggggccgccaatgccaactgtgaaccgtaaggcacaggaggcagccgcagcagtgatgcaggctgctgcgaactcagcacaaagcaggcaaggcagtttccccggcatgaaccagagtggacttatggcttccagctctccctacagccagcccatgaacaacagctctagcctgatgaacacgcaggcgccgccctacagcatggcgcccgccatggtgaacagctcggcagcatctgtgggtcttgcagatatgatgtctcctggtgaatccaaactgcccctgcctctcaaagcagacggcaaagaagaaggcactccacagcccgagagcaagtcaaaggatagctacagctctcagggtatttctcagcccccaaccccaggcaacctgccagtcccttccccaatgtcccccagctctgctagcatctcctcatttcatggagatgaaagtgatagcattagcagcccaggctggccaaagactccatcaagccctaagtccagctcctccaccactactggggagaagatcacgaaggtgtacgagctggggaatgagccagagagaaagctctgggtcgaccgatacctcaccttcatggaagagagaggctctcctgtctcaagtctgcctgccgtgggcaagaagcccctggacctgttccgactctacgtctgcgtcaaagagatcgggggtttggcccaggttaataaaaacaagaagtggcgtgagctggcaaccaacctaaacgttggcacctcaagcagtgcagcgagctccctgaaaaagcagtatattcagtacctgtttgcctttgagtgcaagatcgaacgtggggaggagcccccgccggaagtcttcagcaccggggacaccaaaaagcagcccaagctccagccgccatctcctgctaactcgggatccttgcaaggcccacagaccccccagtcaactggcagcaattccatggcagaggttccaggtgacctgaagccacctaccccagcctccacccctcacggccagatgactccaatgcaaggtggaagaagcagtacaatcagtgtgcacgacccattctcagatgtgagtgattcatccttcccgaaacggaactccatgactccaaacgccccctaccagcagggcatgagcatgcccgatgtgatgggcaggatgccctatgagcccaacaaggacccctttgggggaatgagaaaagtgcctggaagcagcgagccctttatgacgcaaggacagatgcccaacagcagcatgcaggacatgtacaaccaaagtccctccggagcaatgtctaacctgggcatggggcagcgccagcagtttccctatggagccagttacgaccgaaggcatgaaccttatgggcagcagtatccaggccaaggccctccctcgggacagccgccgtatggagggcaccagcccggcctgtacccacagcagccgaattacaaacgccatatggacggcatgtacgggcccccagccaagcgccacgagggcgacatgtacaacatgcagtacagcagccagcagcaggagatgtacaaccagtatggaggctcctactcgggcccggaccgcaggcccatccagggccagtacccgtatccctacagcagggagaggatgcagggcccggggcagatccagacacacggaatcccgcctcagatgatgggcggcccgctgcagtcgtcctccagtgaggggcctcagcagaatatgtgggcagcacgcaatgatatgccttatccctaccagaacaggcagggccctggcggccctacacaggcgcccccttacccaggcatgaaccgcacagacgatatgatggtacccgatcagaggataaatcatgagagccagtggccttctcacgtcagccagcgtcagccttatatgtcgtcctcagcctccatgcagcccatcacacgcccaccacagccgtcctaccagacgccaccgtcactgccaaatcacatctccagggcgcccagcccagcgtccttccagcgctccctggagaaccgcatgtctccaagcaagtctccttttctgccgtctatgaagatgcagaaggtcatgcccacggtccccacatcccaggtcaccgggccaccaccccaaccacccccaatcagaagggagatcacctttcctcctggctcagtagaagcatcacaaccagtcttgaaacaaaggcgaaagattacctccaaagatatcgttactcctgaggcgtggcgtgtgatgatgtcccttaaatcaggtcttttggctgagagtacgtgggctttggacactattaatattcttctgtatgatgacagcactgttgctactttcaatctctcccagttgtctggatttctcgaacttttagtcgagtactttagaaaatgcctgattgacatttttggaattcttatggaatatgaagtgggagaccccagccaaaaagcacttgatcacaacgcagcaaggaaggatgacagccagtccttggcagacgattctgggaaagaggaggaagatgctgaatgtattgatgacgacgaggaagacgaggaggatgaggaggaagacagcgagaagacagaaagcgatgaaaagagcagcatcgctctgactgccccggacgccgctgcagacccaaaggagaagcccaagcaagccagtaagttcgacaagctgccaataaagatagtcaaaaagaacaacctgtttgttgttgaccgatctgacaagttggggcgtgtgcaggagttcaatagtggccttctgcactggcagctcggcgggggtgacaccaccgagcacattcagactcactttgagagcaagatggaaattcctcctcgcaggcgcccacctccccccttaagctccgcaggtagaaagaaagagcaagaaggcaaaggcgactctgaagagcagcaagagaaaagcatcatagcaaccatcgatgacgtcctctctgctcggccaggggcattgcctgaagacgcaaaccctgggccccagaccgaaagcagtaagtttccctttggtatccagcaagccaaaagtcaccggaacatcaagctgctggaggacgagcccaggagccgagacgagactcctctgtgtaccatcgcgcactggcaggactcgctggctaagcgatgcatctgtgtgtccaatattgtccgtagcttgtcattcgtgcctggcaatgatgccgaaatgtccaaacatccaggcctggtgctgatcctggggaagctgattcttcttcaccacgagcatccagagagaaagcgagcaccgcagacctatgagaaagaggaggatgaggacaagggggtggcctgcagcaaagatgagtggtggtgggactgcctcgaggtcttgagggataacacgttggtcacgttggccaacatttccgggcagctagacttgtctgcttacacggaaagcatctgcttgccaattttggatggcttgctgcactggatggtgtgcccgtctgcagaggcacaagatccctttccaactgtgggacccaactcggtcctgtcgcctcagagacttgtgctggagaccctctgtaaactcagtatccaggacaataatgtggacctgatcttggccactcctccatttagtcgtcaggagaaattctatgctacattagttaggtacgttggggatcgcaaaaacccagtctgtcgagaaatgtccatggcgcttttatcgaaccttgcccaaggggacgcactagcagcaagggccatagctgtgcagaaaggaagcattggaaacttgataagcttcctagaggatggggtcacgatggcccagtaccagcagagccagcacaacctcatgcacatgcagcccccgcccctggaaccacctagcgtagacatgatgtgcagggcggccaaggctttgctagccatggccagagtggacgaaaaccgctcggaattccttttgcacgagggccggttgctggatatctcgatatcagctgtcctgaactctctggttgcatctgtcatctgtgatgtactgtttcagattgggcagttatgacataagtgagaaggcaagcatgtgtgagtgaagattagagggtcacatataactggctgttttctgttcttgtttatccagcgtaggaagaaggaaaagaaaatctttgctcctctgccccattcactatttaccaattgggaattaaagaaataattaatttgaacagttatgaaattaatatttgctgtctgtgtgtataagtacatcctttggggttttttttttctcttttttttaaccaaagttgctgtctagtgcattcaaaggtcactttttgttcttcacagatctttttaatgttctttcccatgttgtattgcatttttgggggaagcaaattgactttaaagaaaaaagttgtggcaaaagatgctaagatgcgaaaatttcaccacactgagtcaaaaaggtgaaaaattatccatttcctatgcgttttactcctcagagaatgaaaaaaactgcatcccatcacccaaagttctgtgcaatagaaatttctacagatacaggtataggggctcaaggaggtatgtcggtcagtagtcaaaactatgaaatgatactggtttctccacaggaatatggttccattaggctgggagcaaaaacaatgttttttaagattgagaatacatacctgacaacgatccggaaactgctcctcaccactcccgtcatgcctgctgtcggcgtttgaccttccacgtgacagttcttcacaattcctttcatcattttttaaatattttttttactgcctatgggctgtgatgtatatagaagttgtacattaaacataccctcatttttttcttttcttttttttttttttttttagtacaaagttttagtttctttttcatgatgtggtaactacgaagtgatggtagatttaaataattttttatttttattttatatattttttcattagggccatatctccaaaaaaagaaagaaaaaatacaaaaaacaaaaacaaaaaaaaaagagggtaatgtacaagtttctgtatgtataaagtcatgctcgatttcaggagagcagctgatcacaatttgcttcatgaatcaaggtgtggaaatggttatatatggattgatttagaaaatggttaccagtacagtcaaaaaagagaaaatgaaaaaaatacaactaaaaggaagaaacacaacttcaaagatttttcagtgatgagaatccacatttgtatttcaagataatgtagtttaaaaaaaaaaaaaagaaaaaaacttgatgtaaattcctccttttcctctggcttaatgaatatcatttattcagtataaaatctttatatgttccacatgttaagaataaatgtacattaaatcttgttaagcactgtgaaaaaaaaaaaaaaaaaaaaaa

SEQ ID NO: 56174 - DNA, 6301 bp, Homo Sapiens
tatcaatggcgcaggcttcacttctgctgtggcggtgactgaggcctttctggtgacctcagcccaacacaggccgtctccggagcttcccggtagtggccccggattcccacggtctttgtcattggctgtcagctagcaggcctggccgctcccgtgcggagagaccatctcttcagggcaatgtccaggccgagcagcgtctccccgcggcagccggctcctggcggtggcggaggcggcggcccctcgccttgtggccctgggggcggcggccgggccaaggggctgaaggacattcgcattgatgaggaggtgaagatcgcagtcaatatcgcgctggagcgcttccgatacggggaccagagagaaatggaatttccttcttctttgaccagtactgaaagagcctttattcatcgactcagtcagtctcttggtttggtctctaaaagtaaaggaaagggagcaaatagatacctaactgtgaagaagaaagatggatcagaaacagctcatgcaatgatgacctgtaatttgactcataatacaaaacatgctgttaggagcctaattcaaagatttcctgtcaccaataaagagcgtacagaacttctgcctaaaacagaaagaggaaatgtgtttgcagttgaagctgaaaaccgggaaatgagcaagacaagtgggcgactcaacaatggcatacctcagattccagtgaaaagaggagaatccgaatttgattcttttaggcagtctttaccagtgtttgagaaacaggaagaaattgttaaaataattaaggaaaataaagtagttttgattgtaggagaaactgggtctggaaagaccacacagattcctcagttccttttagatgattgctttaaaaatggtatcccctgccgtatattttgtactcaaccaagacgattggcagctatcgctgtggctgaaagagttgccgcagagagacgggaaaggattggtcaaacaattggttatcagatccgattagaaagcagggtttctccaaagacacttctgacattttgtactaatggggtattgcttcgtacattgatggcaggagatagtacgttgtcgactgtgacacatgttatcgtggatgaagtgcatgaaagggatcgatttagtgattttttacttacaaagttaagagatttgttgcaaaagcacccaactttgaaactaattctttctagtgctgccttggatgtaaatctctttataagatattttggaagttgtccagtgatatatatacagggaagaccatttgaagtaaaagaaatgtttctggaagatattttaagaacaactggatatacaaacaaagaaatgttaaaatataaaaaggaaaaacagcaagaagagaaacaacaaaccacacttacagaatggtactcagctcaagaaaatagtttcaagcctgaatctcagaggcagagaactgttctaaatgtgactgatgagtatgacttactggatgatggtggtgatgctgtcttcagtcagctgactgaaaaagatgtgaattgccttgaaccatggttaataaaggaaatggatgcttgcctttctgatatatggctacataaagatattgatgcctttgctcaggtctttcatctcattttaactgaaaatgttagtgttgattacagacatagtgaaaccagtgcaacagctctgatggttgctgcaggacgtggctttgcaagtcaagtagaacagttaatcagtatgggagccaatgtccatagtaaagcatcaaatggctggatggcattggattgggctaaacactttgggcagactgaaattgtggatcttctagaatcttacagtgcttcactggaatttggaaatctagatgaaagttctctggttcaaacaaatggaagtgacctcagtgctgaagacagagagctcctgaaagcttatcatcatagtttcgatgatgaaaaagtagacttggatttgatcatgcatcttctatacaatatctgccatagttgtgatgctggtgcagtactaatttttctgcctggatatgacgaaattgttggactgagagatcgcatcctgtttgatgacaagcggtttgctgacaatacacatagataccaagtctttatgcttcattcaaatatgcaaacatccgatcaaaagaaagtattaaaaaacccacctgcaggtgttcgaaaaataattctttccaccaatattgctgaaaccagcatcacagtcaatgatgttgtctttgttattgattctggtaaggtgaaagagaaatcctttgatgctctgaattttgttacaatgttaaaaatggtatggatttccaaagctagtgccatacagcggaaaggcagggcagggcgatgtagacctggaatttgttttcgtctgttcagtagactccgattccagaatatgttggaatttcagactccggaacttttgagaatgccattacaggaactttgcttacataccaagctgttagccccagttaattgtcccattgctgattttcttatgaaagctcctgaacctccaccagctttaattgtaagaaatgctgtacaaatgcttaagacaatagatgcaatggatacatgggaagatctgactgaacttgggtatcatttggctgacttgccagtagaaccacatcttggtaaaatggtcttgtgtgctgttgttttaaagtgtctggaccccatccttacaattgcttgcacactagcttatcgagatccttttgtactacctactcaggcctctcaaaaacgtgcagctatgctttgtaggaaacgttttactgcaggagctttcagtgaccatatggcacttctcagagcattccaggcctggcaaaaagcacgaagtgatgggtgggagcgagccttttgtgaaaagaattttctttcacaggctactatggaaataatcataggcatgagaacacagttgcttggtcaacttagagcatcaggttttgttagagcacgaggtggtggtgacattcgggacgttaacacaaactctgagaattgggctgtcgttaaagctgcattggtggcaggcatgtatcctaatttagtccacgtggacagagagaatctagtgttgacagggccaaaggagaaaaaagtacgatttcatcctgcttcagttctcagtcagcctcaatataaaaagattcctccagccaatggtcaagctgcagcaattaaggcactgcccacagattggcttatttatgatgaaatgaccagagcccatagaatagctaatattagatgttgttcagcagtgacgcctgtcactatattggtattctgtggaccagctagattggcaagtaatgctcttcaggaaccttcatcctttagagtggatggcattcccaatgacagtagtgatagtgaaatggaggacaaaactacagctaatttggcagccttgaaacttgatgagtggctccatttcacactggagccagaggcagctagtttattgctgcagctcagacagaagtggcatagcttatttttacgccgaatgagagctccatctaaaccttggtctcaagttgatgaagctaccataagagcaattatagctgttttaagcactgaagaacagtctgcaggtttacaacaaccatctgggattggccaaaggccaaggcctatgtcttcagaagagcttcctttggcctcatcttggaggtcaaataatagtaggaaaagttcagcagatactgaattttctgatgagtgtactactgcagaaagagtactgatgaaatctccatctccagcattacacccacctcagaagtacaaagatagaggaattttacatcctaaacgaggtactgaggaccgatcagatcagtcttctctgaaatctacagacagcagtagttacccaagtccttgtgctagtccttctcctccatcctcaggaaagggctcaaaatctccttcgccaagaccaaacatgcctgttcgatacttcataatgaagagtagcaatttgagaaaccttgaaatttctcaacagaagggtatctggtctacaactcctagtaatgaacggaagctaaatcgagccttttgggaaagcagcatagtttacttggtattttctgttcaaggatctggacatttccagggattttctaggatgtcttctgagattggaagggaaaagagtcaggactggggctctgctggactaggaggagtatttaaggtggagtggatacgaaaagaaagccttccctttcaatttgcacaccatttactcaatccatggaatgacaacaagaaagtgcagataagcagggatgggcaggaactagaacctctggttggtgaacagttgctccagttatgggaacgtcttcccttgggagaaaaaaacacaactgattgacactcagaactcttagctgtggaagaacatcatgcctatttataaccactgaatgcactgactttcaaaaactgaggtggggtgtgtgttacgaatgggctttttaacacttttagagtgttgctttagaactaccatcttcatatacaggagaaaggaagcatttaaatttttatagtgattatagagaatgattatatgatgtttgtaatgaataaaatagtagtttcattatttggcacaatagcagtttattttaaacaaacaatttgaagttaaacatttcatttttaaaaacactgaattacagttcttattgatgactttttaatgcagagtaagttgtttaagaaaggcctgaatatatcagaacatctgagcaccattttagaagagtcaactcttaagattatcattagaaaacaaatacgtcaacacctatgaaaagaagcggggaaaacaacaacaaggacaacaacaaaaaaccagtgaaattctacaagtgtcccttttaaaaatagtgtgtgctaactaagggctattcattctgccatttttaacttgagacacatttaagaataaagttggatgttctttttctgtgattatgaaatgcaataaaatctgaataaagggcaaagtttcttcctgatcagattagattaagtgcttagttttattcctaattctgccccttttaacctgatgtgtaccttactctttcctccctctcttcctcccttcctcctctccccactcctttcctgcatttctccctccctccttccctcgtcacatctcttatatgagcacagtaattatgacctttttgttttggctacaacttgattgaaacaagttcaaaatttaaacaagttcatacaagtttttaaaaattctcaactggtagcttgcttgctgtgcgtcttccaaactaaagcctgcaagcgccacaattctaagtgccgccttccattttttttcagtatgttttcactggcttatgttttcagatatgattttcctttttcgcatatatggtttaataaatgggggataattttttttttgtaaatccgtgcttgtgccaagtctcatatttctttgccatctcagaattatctttttaccaccactgtttataaaatttccttagagactttttgaagggaaaatagagcaacagggaaaaatgaaagaaatgtcttggttactgagctctaaatagacaggtttgatggcacttctcatgatacattttagttattcttataaaagcaaacaggcaaacatgagtgtaaattaaagacaaaaagaaaactctggttttatatttgagaacacgtgaaaaatcatgggtcaacataaaatcttgagaaccttctactttctctgggaaagcattatatagtggtgcattagtttagaaagtcagctatgattttgcctatagttctagttattagctttggggttttcttgtactttaagacatacctgtaaattgaacctatttgaattatattccactgtatgtgtattatggctcttttcctattagagcaacttgtgtttccctgataatgtgtacattttttaggcatgtacttaatagttcacaatgttctaaatttggaaggacttaaaaaaaaaacttgtttaaatttccatctgttttgtaatatctagctctatatgtaaatgatgggtttgttggtatttaaaatgaatacaacttgaatgtaattaaagtgctgttttttggaagcgataaactttaaatatacttattaaaatgaaattctattaaaaaaaaaaaaaaaaa

SEQ ID NO: 56175 - DNA, 1290 bp, Homo Sapiens
gggaggcgctgcgactgacaagcggctctgcccgggaccttctcgctttcatctagcgctgcactcaatggaggggcgggcaccgcagtgcttaatgctgtcttaactagtgtaggaaaacggctcaacccaccgctgccgaaatgaagtataagaatcttatggcaagggccttatatgacaatgtcccagagtgtgccgaggaactggcctttcgcaagggagacatcctgaccgtcatagagcagaacacagggggactggaaggatggtggctgtgctcattacacggtcggcaaggcattgtcccaggcaaccgggtgaagcttctgattggtcccatgcaggagactgcctccagtcacgagcagcctgcctctggactgatgcagcagacctttggccaacagaagctctattaagtgccaaacccacaggctgctccccgagacaccatctaccaagtgccaccttcctaccaaaatcagggaatttaccaagtccccactggccacggcacccaagaacaagaggtatatcaggtgccaccatcagtgcagagaagcattgggggaaccagtgggccccacgtgggtaaaaaggtgttccagagagatgggcaagtgtcctatttcttagtgagagcctctaaacaaaccagcttgtgaacctccactgaaaagatctcatctgatgagcattttaataaagtgtcctgagtttggaggcttgccgtctttctcttggataaatatcttcatctcctagacttggaaaaacacattttctcctggggtttcccattggcgtgtcttgagctgctctggtgataaccgtaataatgccaatactgatacgaacagcagaaaacagtaaccccaagaactctacagatgatcatcaaggaccactgtctcttaccatttgctgctttggtttgaaattctcactgcctcgtagatctcattttgagcactatacattcctaaagattgatttctttctatctgacttaaatttaggaaggattaaatcttcatttctcccatgatttgatcctaaaacattttgaaaggaaacagccttgagatctgtgattactaagacatacataacattcttatcacattagaaagcaagaattgactgttgcttgtcttgttcctgttgtcttgtcccctgaattcctgtttatctttgattgtatgtgggacattgtattttcagtacatttgtagaaataatgtgaagcctataaagatgttctctgcctccaaaaaaaaaaaaaaa

SEQ ID NO: 56176 - DNA, 2133 bp, Homo Sapiens
gtattccccgctctccagcagcttcctagctgggttttcacctcagccagcgctcatgctcaacctaggcagggcggggcaggagggcctagcgggaggcggagcgagggtcggagggtgacgctccggacttctgctaggtctgagacgcgccggcctcccgctgctgctccggagaagcggcgcctcctccccgccaggaccccgaggcggggggttcccgccttctcttctgagcgcctcttcccgctgcgcccgcatcagtctgggcctggcccagggtccccggtggagacgtgtttttttctccaaccaccgtgcccctctgtttaaaagcagccagtcaacctttgtgtcctttctccagaaggaaaagcatctcagctgttgtggaaaagggccccagcgtcctcttgtcaccgacagggcgattgcagtgcgttccggtcattttttccaggacactttctgtcttcatgacaggaacatcgagaagccaaggctagtggctgggttactgatggattactgatggattcttctcagcacttagtgacctttgaggatgtggctgtggactttacccaggaggagtggactttgttggatcaagcccagagagatctctacagagatgtgatgttggagaactacaagaatctcattatactagcagggtctgaattattcaaacgtagtctcatgtctggattggaacaaatggaagagctgaggacaggagtgacaggagttctgcaggaattggatttgcaactcaaaaccaaaggctccccactgctgcaagatatttctgcagaaagatcaccaaatggagtacaattggagagaagcaatactgcagagaaactgtatgactctaaccattctggaaaagtcttcaatgaacacccatttcttatgactcacatgataactcacattggagagaaaacttctgaggataatcagagtggaaaagccttaagaaagaactttcctcatagtttttacaagaaaagtcatgctgaggggaaaatgcctaagtgtgttaaacatgaaaaagccttcaaccagtttccaaatcttactaggcagaataaaactcacacacaagagaaattgtgtgaatgcaaagactgttggagaacttttcttaatcagtcatcccttaagttacatataagatctcacaatggagacaaacactatgtatgtaaggaatgtgggaaagccttcagtaattcctcacaccttataggacatggaagaattcacagtggagagaagccctatgtctgtaaagaatgtggtaaagctttcactcaatccacaggacttaaattacacatcagaactcacagtggagaaaaaccatataaatgtaaagagtgtgggaaagccttcacccattcttcataccttactgatcatacaagaatccacagtggaaagaagccctatgtatgtatggaatgtggaaaagccttcactagatccacaggacttattttacacatgcgaattcacactggagaaaagccatatgaatgtaaggagtgtggaaaagcttttattcattcctcataccttacaaaacatgtaaggattcacagtggagagaagctgtatttatgtaaggcatgtgggaaagcttttactcgttcctcaggacttgttttacacatgagaacacatactggagaaaagccctatgaatgtaaagaatgtgggaaagcctttaataattcctcaatgcttagtcaacatgtaaggattcacactggagagaagccatatgaatgcaaagaatgtgggaaagctttcactcaatcctcgggccttagtacccatttaagaactcacactggagaaaaggcctgtgaatgtaaggaatgcggtaaagcatttgctcgttccacaaatcttaatatgcacatgcgaacgcacacaggagaaaagccttatgcatgtaaagaatgtgggaaagccttcaggtattccacataccttaacgttcacacacgaactcacactggagcaaaaccatatgaatgtaagaaatgtgggaaaaacttcactcaatcttcagcacttgctaaacatctaagaactaaggcatgtgaaaaaacctga

SEQ ID NO: 56177 - DNA, 762 bp, Homo Sapiens
caggggctggagggcaggggaggggatgatgtcattcctgctcggcgcaatcctgaccctgctctgggcgcccacggctcaggctgaggttctgctgcagcctgacttcaatgctgaaaagttctcaggcctctggtacgtggtctccatggcatctgactgcagggtcttcctgggcaagaaggaccacctgtccatgtccaccagggccatcaggcccacagaggagggcggcctccacgtccacatggagttcccgggggcggacggctgtaaccaggtggatgccgagtacctgaaggtgggctccgagggacacttcagagtcccggccttgggctacctggacgtgcgcatcgtggacacagactacagctccttcgccgtcctttacatctacaaggagctggagggggccctcagcaccatggtgcagctctacagccggacccaggatgtgagtccccaggctctgaagtccttccaggacttctacccgaccctggggctccccaaggacatgatggtcatgctgccccagtcagatgcatgcaaccctgagagcaaggaggcgccctgacacctccggagccccacccccgcccttcccaggtggagccaaagcagcaggcgcctttgcccctggagtcaagacccacagccctcggggaccacctggagtctctccatcctccaccccccgcctgtgggatgccttgtgggacgtctctttctattcaataaacagatgctgcagcctca

SEQ ID NO: 56178 - DNA, 4136 bp, Homo Sapiens; identical to SEQ ID NO: 29534

SEQ ID NO: 56179 - DNA, 2986 bp, Homo Sapiens
gggaggacccgcgacacagctcgggatccgcgcgcgctgggccttcggcgccgctcgtggggttcgggaggccgggaccctgcccgggagatgtggacgccgggcggacccccggggtccgcgggctgggaccgccgtaggttgggcgcgaggttgcgcgcggcgttcgcggggctgcaggagctgcaggggctgcgagccacgcagcaggagcgggtacggggcgccctggccctgcagcccccgcccgcgcccgccgcgccctgcggcccccacggcctccacggccccgagcagcagctggaggcggcgctggccgcgctgcaggagcagctgtcccggctgagacaacaggacatcggcctgaagacccacctggaccagctggacctgcagattagcaagctgcagctggatgtgggcacagcctcaggggaggccctggacagcgacagcaggcccagctcaggcttttacgagatgagcgacggtggatcctgctccctgtccacgtcctgtgcctccgtctgcagtgaccacatctctccctcgctgggcagtttgttgcctgtggcccaggcccacaaggccaggcccagcatgggggactggaggccccggtcggttgatgagactactgtgccagcgtggagaccccaggctaccgaggagggcgccaggcccccagggagcgtggaggatgcaggccagccgtggggcacattctggcccaggcctgtgtctacaggtgatcttgacagagccctgccggcggacacggggctccagaaagccagcgcggacgccgagctcctcgggctcctctgcagggggtggatatcccgctgcacgtgccggaccccaagtatcggcaggacctggtgtcccagggcggcagggaggtgtacccgtaccccagccccctgcacgccgtggctctacagagccccctgtttgtcctgactaaggaaaccccacagagaggtggcccctcgttccctagggagagccccaggggccccgcaggtctgaacaccatccagactgggccggtcctcgaggctggcccggccagggccagagcttatatcgacaggttgctgcatctgtggggccgggagaccccagcaaagggtagcgagggagaacagggacctctaaggcatgcagcgtccccatctccacagaggcagggtggctggagtacagacggtggagggcgactgctggtcttcgccccagggagggaggacgagggagggccagctcagagcaggggtgccggcaggggcgggccccagcagcagggatacatgccccttgagggtccccagcagtctggcagccttccagaggagggctccaagccctcaaacagctgtgtcctcagggagaccatggtgcaggcttctcccagctcaaaggcccagcagacaccctcagctcaggactatggacgaggcaacatcatatccccatccaggatgctggacaagagcccctcaccggcctctgggcactttgcccacccatcctttgctgccagcctgaaaatgggtccccccaagagcaaggctgaaaaaatcaagagaagtcccatggacaaggtgctgaggtttgcaaggcagccgctgcttctactggacaggcctgagggagcccatgcagccccccagccatccctggagtgggaccctgcccactggcccacagggaggggcgggctccagcggaggccagccctggcctgggaggcacccgggcgctcctgttctgagtccaccctctaccccatgcctgtcctcgtccccttggcagtggccccgcaggagagccaccggacctcagcccaagccctgttcccctttgaggcgtcactgctcacctcagtggccaggaggaagcatcgccgctggcagtccaccgtggagatctcggcccgggcccgcctggccagctgtcctgagtctaacctggggccccccaggcccgtggccaggagagcaggtggcccactggcccggggccgtccctcactggtccgccaggacgcctacaccaggagcgactcagagccctccaagcactcggccgagtgtgacccgcggttcccgtcagtcatcccggagaccagcgagggagagtccagtgaccacaccaccaaccgattcggagaccgtgagtccagcagcagcgacgaggagggcggcgcccagagcagggactgtgacctggcactgggctatgtggcggccgggcatgaggagctggcctggacccaggaggccccggtcagctcggggccactcctgtcccccgtgcccaagctgtgccgtattaaggcctccaaggccctgaagaagaagatccgcaggttccagccgacggccctgaaggtcatgaccatggtgtgaggtgcagtgactgcgtcaagagaagcctgctgcacacaggggccctttccatgcagtgtcctgtgcatgtctgggtttcagtgtcgtcttgccaagtcgctttatcttccgaggccaccgtttaacaggagtccccgcagatgggttctgccctgtggagtatggccgtgagtccccgccccagcaaagacttccatgcggagctctggtttcagatgccagcagcctccccggccgacctagtgtctcttttcaaggtctgcccaggatgctgcttcccggcatgcaccttgtttccatgttgtcatcctcccatggcttcccctgccctcactcccctctggctggggaagtgtttcccaatcctttgaccattcctccccaaaagcattttaaaaaggcggttgcaggactttgagctggaaattgaatttgagtttaaactccacgttaagctgtcagcatacacaaacacccaaattatgccatgatctcaaataaaaggaacattttttttccctcttttaaaaaaaaaaaaaaaaaaaaaaaaaaaaaaaaaaaaaaaaaaaaaa

SEQ ID NO: 56180 - DNA, 1650 bp, Homo Sapiens
ataagcaccatgttaaagatgcaaaggaggttgaacatgctgtgtctgaattcatcaaatatgagatctccttcaatgtatatatgttccatggtggaaccaactttggtttcatgaacggggccacatatttcgggaagcactcgggcattgtcaccagctatgactatgatgcagtgctcacggaggctggagattacacagaaaaatatctgaagcttcaaaaactctttcaatctgtctcagcaactcccctgccccgagtacccaaacttcctcccaaggctgtgtatccccccgtgagaccgtcgctgtacctcccgctgtgggacgccctatcctacttaaatgagccagtcaggtcgcgtcagcccgtcaacatggagaaccttcccataaacaatgggagcggccagtcctacgggcttgtcctgtatgagaagtccatctgctccggaggccgcctccgtgcccacgctcatgacatggcacaggtgtttttggatgagacaatgatagggattctgaatgagaataataaggacctgcacattcctgaactcagggactgccgatacctgaggatcctggtggagaatcaaggacgagtcaatttttcatggcaaatacagaatgagcagaaaggaataactggatctgtcagcatcaataactcttccctggagggctttaccatctattccctggagatgaaaatgagcttctttgagaggctccgctctgccacctggaagcctgtcccagacagccaccagggcccggccttctactgtgggaccttgaaggctggcccttctcccaaggacaccttcctgagcctgctgaactggaattatggattcgtgttcatcaatggacgtaaccttgggcgatattggaatattgggcctcagaaaacactgtaccttcctggagtttggcttcatccagaagacaatgaggtcatcttgtttgagaagatgatgagtggctcagatatcaaatctacagacaagcccacgctgtaaaactgtgtctgaacattttttttttttttttgagatggagtctcactttgtcgcccaggctggagtgcagtggcacaatctctgctcactgcaagctcagcctctcgggttcacgccattctcctgcctcagcctccccagcagctgggactacaggtgcacgccaccacgcctggctaattttttgtatttttagtagagatggggtttcaccaagttagccaggatggtcccaatctcctgaccttgtgatctgctctcctcagcctcccaaagtactgggattacaggcgtgagccaccactcccggccgtgaacatattttttgggttgctggagttcatctataagtcatttttgaggaataagatttatgttaagactatcaaacacagtgttgcctacaatagcaaaaatgtgaaaataacaacaacaacaaaacagcagaggaattgttatgtattttgtagtctatctatatgatgcctatttttaggctttaaaaagtcttcaaaatctttaatgactgatttatctagttaaatgcttaatccttagcaggctcttattctttaattaaacgtgcctttgagtagatgtgaataaaataaaaacaagtttc

SEQ ID NO: 56181 - DNA, 4629 bp, Homo Sapiens; identical to SEQ ID NO: 30172

SEQ ID NO: 56182 - DNA, 2194 bp, Homo Sapiens
ccggccagcctccgcctcccgacatcctgggagccggaaggggcgttgcccccacagggcaaaccttcccccggcctcctggtcggctgtttagagctgagcaaggccaagtgggtgcagctgccccaaccctccggatcctcgtctcccggaggcctgcagacccgttggctttccctgtaacccaaaacaaggagagagtgggaggtctctcgggcgttctccagatgtggttgagactttcccagtgctggggtggcgggtgacatttgtaaataaatgccagttggtccgggtacaaggagaacactatttaaaccccaaagacatcttttctccctgccccacctgaaggcgatattttagatcgccggggccaggattgaagcggggatgatggcagcaaatttgttctgcacaggtgacccggcctgtacgggcgccaagtcccagatcccgcaatcagagcggccagagagcagagaagagacctagaggatctgcaagctgacctatccacccgagactctccgctctgagcgaccccagggtgcaggcgccctccacgcgccacctcctctagcggtcccccagggtcccttcccagtcctcgcactgccctagggcttgcttggttcccagaccagcgtggaaggccgctgggccccggaacccaaggtccctctgcttctgctccactccccagtgcccagcgcctgggaatttgggaggggaagctctggcgctccacagccctgcttcccacccaaacacgcactcagaacccctcgactgagatcctatggagcctgcgcccccagcccggcggggagccagtccggccctccgctctgggaccagccgccccgcctccctgccctgctctccggactctcaacttacccgctccaggaggcgggagtactgcttcaggccagagccgaaaggcgctggcggcggctggaccgcgaggtgggctcggtgggcggcgccgagctcggctctgctgggaggcgcggacagcccggggctgccacctgccccaccgggtcctggcgcacaaagctacacgcctctctgcagccctctgccctgcttcgcgttccggaaccgcggtcgccacccaagcaggcggggtgcggcagggcggcagggcggcaggcgctggggcagaggctggggggcgggggtgtcgccagagtctcagccccacttgcctcagttctccctgagtggcgatggttttttatttcagcgctttcggcagagcccgcagcacctgcccagcctccctccggggctggccgggcagtggcagggagaggccaggtcgccaccacccggaggcgggggtttcggggacggggaggggactgaccgggttcacccgcccgcccggcgcctgggtccccggctccgggggatgcagtttcggggtcacgagctgctttcaaaaagttgaacacaatattcggaaacccacccgtaggaattctccccccacacgcggcacaatacccactcccctcccctttttcattccttcctcccccgcttcctcctcctgccccttccccctcccacccttcagcctataatccttcccctacgagagaaagggatcgggaagaaaacatgaagtgtctgtttttgtgtcccaacctttgggctctttctgggccctcagtgaatgaccgcccagagctttcagctgcgtggagaaggactcatggccaggaggagaggaaatatatatggagtggagagagcactgaaatggggcttggcaggtcttccctttggaggaatatttttctgccccagtcgtcgtgttgaagacctgctaccccacggctgtctctggctaagtgagccagtattggcccctcgccggacccagggcctccctgccgcccggaatcctccaaggaggcttgcacttgtcggcttgctcttctccccggccctcagaggcctggcactgcgggagtcaaggcctaagcagggctccagctcggggtttaggggctgggacactcacagccccagtcacgttaggtttcccatttaaattctctctcaacctctctttctctcttccctcattgagatcaccaaagtggtgtggacacggcgccttgcccccagatctgcatcggaatgcagaaaagatctttaaaaaaaaaaaaaaaaa

SEQ ID NO: 56183 - DNA, 4124 bp, Homo Sapiens
atgagcggcgagcggcggagctcccccctcccgcgctgccgaccccggagctgtcaggagctctgccgagccccaccccggagcccgggccctgtcgcgccatccccgtgccgggggcgtgggcgcatccgcttgctccctccaggcccggccggctcctgccggcgcggcggatccgggagccgagatccccgagggcgtgcggactgccccgggcagccggcggtccccggcgcgccgagctggacgagcgggcgccaagaccaccaggggcggaccgacgaggaggaggccaaggagctgggccggggaccgcgggcaaccgggagcctgcgcggagaggacgcgggctgttggcctgtgaatttaaggagcccgaagctcgcctggcagctcgggaactgctgggagacatctggagccggtcccaaaaaacccgcgcacaggagagatcccccttttgaattgcagagggggaccgacactcctggagcacgcacacggcccttttcactcatggtcgggagtctaacccatcctttctctgataccctacctgcttgtcccctccccctcaaaagtcccaggttacagattcttggaagactgtatccgagtcgctgcagccagcggacagatgcagtggaactatggttatgtgctgctctgcctgggagaagcgacgggaaagccgaggttctttccaaagctaatgggcggggaagaaagactgctcggaattactgggacaagctatttgacagaaagcttttaagaaaggctttgcaagaaaactctgcaacagagatggcacgtatgaattgctgtgatctggagttgaagacaagaacaaaagtaactctagagcagaattctttgaccaaagtcatcttactggttggcggaggctctcagtctacttgcatccggtgcttgagagttcagacaggcaaagatgagagaggtgttcgaagccgggtggtgcgtgggctaccccaacctgtgtggctgggccgcggtctcccctcaagggcctggggccgtgcctcgggtgtacgcgtaggggtctgtgtgctgggggtggctcaccgggcagcgtgggtgagcggcgcagcggcggcagcggagagcgagagaggggagcaggtaagtgaacgctcgccttccggggcctgggtcttggggtcggggccgcgcgaggcgagcggagagcgccccaccgggggaggagcgcggacgagcttccgccgcctgcagcccgcctgctgcggcctcgcccttggctgtcgcagcgaccaggagtcagggggcgtgaccaacctcctgcgggaacggagccagctcccgggggtgggagtgcccactcgttcctgcgctcgccggtgggtaccggtatctgcacgtcccagaatcgagtgttttcgaaagtctacgcccacgaacacgtgattattgtgtcaccgaagcgcctaccgaacggagaccttgattcttgcttagattacacagaacgcgcctggtttatgtatccccttttactttgccaagtacattggggtaaaagctctacagcgtctgccagccacatttccttagagtttcttgggccacatgttgcaataaaagtggcatttcagggtcaaggcaggagccagtaactttgccaagtggtgaggtatccttcgtccccgttagcacgcctccctttcccaacaataaagatattttctccatctgcgcgtgtcgcctactgcggaggaaagctttggacatgaaacctatttttggcttcactttaaggagtggaactctattaaaagctgcgctggtgtttttttggtaggatgatgttgctgctgctactctcacttgcttccttgatgagagttggggcagagctcgatttcctggagggtaaagtcttggccacaattttaggtgactcagcggccccttatgaattctgactctttccttccctcccctctcagctgtgcggatactgatgccacctttctctccaaatattaatccgggtgggagttggatgatggtttttggaagcagtttgcatgttgcgtggtggagttattggagtgggctgacattttacttcacaatttaaggcaacccttcccccccccacaatatttagttgggtggggtgacagggactgacaacaaattcgctgttgtgttccctgctgtcggagagttctacacttaatgatcacctgattgccctctgctacaatttctattgcgttgaggggattggttatactgtctgtacctattaggtaaatgtagtaagggtcatgccaggcagagtgcacctgcatggtgttggctaaccagtaaactgtgtggtagagaattgccctggttacgaagtttggtatcctccaggctgcctaggagggtgttctgtgggctgggaaatcttatgaactggtttcctagcaacagtataagcccaatggaataaacataaagaaaacaaagtgatgaaagttacaacttacctcttaacttttattaaatggaaaaatgtagcttcttattggagtgatccactcaaaacttctgagacatttttgtttattttgatcatcttagtacttaataacacacaaaagaaactgcagaaaatcattccagagggacatcactttggttttgggtggcattaaaatagagaaaaaagacgtttaaaaatgagcttgtctggagcttaaatggacaaacaggaatttggtgtaataggcattttatgttgtactcttatctatatgtgtcagatgtatgcattacatatgattgttatgaatgaagatagtagaagacggagtgggagtggagtagagtggatgggtggataagactggttccattaagtaaaatggaaggggaatgttttagataagttgttcccaaactgtaggtcataattacagcactcctttgtcaacctgttccttgtgatttttaatcttccttgaaagtttatcaaattttcttattttctgtccaaacaatgagaacttaattgaaaaaggcatctctctttggattaactcttggtgtttatgtatatctgtttcttatttactaacgataaattaatattttagatttccagtattttaaggatttttggtctccttactgttcctccctgccctattcccatacccagtaagtttggtttagctcatttaaactgatgcatatttttaaaaagggcatatgttgctttttttaaaaaaaatcaagttttattgaggtatgatttataagtaaaaaagtaatttttattatattgctgtataaagtctgacaaatgcatataatggaaccactgccacaatccagacaaataatattcccatcattctaaagtttcctcccctcactcataggtcctagcaaccactgatctgttctctgtccctgtctatagctttgtcttttctggtatgttatgtaaatggaatcatacagtatgtagccttatgtttcaggtttctttcacttaatgctttgattcatccatgttgatgcatgtttgttgatgcttggttgttttttacagctgagtagtatttcattgtgtgaatatatcatagtatgtttattcgccatttgatgaacaatttttggcatttaggaatgaaggtactgtaaacattcatgtgctgttctttgtacattaaggtgcaagtctttgtgtagacatatgttttcatttcttttggttacacatctaggaatggaattcttgggccgtgtgcaagtgcatgtttaaccttaaaagaaattaccagctgggcgcagtggctcagacttgtaatcccagcactttgggaggccgaggtgggcagctcacgaggtcaggagattgagaccatcctggtcaacatggtgaaactccgtctctactaaaaatacaaaaattagctgggcgtggttgcgggtgcctgtaatcccagctactcaggaggctgaggcaggagaactgcttgaaccagggagtcggaggttacagtgagctaagatcgtgccactgcactccagactggtgacagagtgaaactccgtctcaaaaacaaaaaaaaaaaaaa

SEQ ID NO: 56184 - DNA, 2018 bp, Homo Sapiens
atgggccagctccctgaagcaggctttgggaagtcttgccctgggccagcccgggaatgcccagccgttggaaaggagagtggccacaagaacctggacacgattgggggtctgaagaacaaagacgccgccgcgcgtggggctagagtgcgcccggcgcaggtggggaggggggtccgacccagcgcggacctcgccggagacaccccgcccgccccggcccggtccgcgggggcatgcgaggcaggggagggggcgcgcccggggctcccaccgacctcgcccgggcgcaagggccggagcccccgggttcccgagcctcggagccgccgcggctgtgctgccgccctgtggccgccgcccgcactgcgcctcgggcccggccgcgctccagcgcgtgcaccccgcactccgccctgccccggacctccgcgggccccgagtcttcctgccagcccctcggccccagggaggcggggcgggcgccggggtagacggcggggccatgtgggctttgctagctcgggagcggggcggggtgggaggctgcggggagccgggccccaatgcccggaggtcaggggcgccctggggcagaggaagcggcaggtaccccttagcgactcgtggcttctgcagcccctagaaggacccccagacgagggtctggaaaagtgaccccttcatagtcctaaacaagcagttggcaatggtgtgccgttctccacgcggtccgatgggaaagggaggccctgagccgcaacgagtaagtagatagtcagcaggaccacgtggacgcgaccaaccacaggtcacacttcggacgggagcaggacccggcgcccatccctcaggaccgccgagagccgggccctctgggccgcaggtgccgctaccttagccatggagccgcagcagaggaggccggcgctggaattgcaggctcgtcctggctgccccgccgcactcctctcacggaagtggctgtgccggaggcgcgagaacagaactctgttcagacgctcgcgtgctcggagaatggagcctggagacctggttcacacccgctatgtgtttaaatggataaaacgctcctcaggtctgtgagcctgcaaacaaggtccccactgccatctgctggccccacagacaagaacccacacaggaatgaagcccaaaatatcccataaactttccaaagagaaatgacaaaactgaaatagtagtggtgtcaaaacacagtgtacttctcagcccaatgaagctgggatgggtggcccagggagccccagacttcatggataggcttttcgttcacatggctcaaaatggcaccccagatccagccatcacatctgcactccagccagcagaaaggaggcagggccctcttcttcaaggatgcctcccaaaagttgtgttgccacagctgctcacatcccattggctagaacgtagtcatacgacccacctcactgcaagggaggctgggaaatgtagtctttaatctgtgaaatgtgcccgcttaaaacggagccatggaggaagaaggactagcgatctggggggtaggggttgggtgggcgaaaggctgtgcctccctcggtggcgtcaacatcctggccatgttgtcacatgcacttgctggcaaaattcccaagccatgcgctcacagtttgtgcagtgatgagtgtggcaaacacagctcagttaaaaataaacatcattttatagattagctgaagaatacaatgtcccacgagactatgtggccatcaggaaattaacttttctgacctaatggcccaggaagcactgcgggcagcgtctcgccccgtgtaacgcagcacccgcagaagtgcccgggatcagcctttgcctcggcgggatcctggttcctggttcttccaagggcatggcgaggtccccgctcccttatcttgaggaaagtaataagtaacccagctctttcaactcccaaggttactttgtcaataaagtgcgccttctcaagtctt

SEQ ID NO: 56185 - DNA, 6448 bp, Homo Sapiens; identical to SEQ ID NO: 29912

SEQ ID NO: 56186 - DNA, 13172 bp, Homo Sapiens
gggttcctcgcggcgatcccgactctcctcccgcggctgcagcagctgccggttgcacacggcctcggcggcggcgcggcgagcgcgggcctgtggagcggcggccgggcgcgcggccccggcgggcacccctcagagggcggccgaggaagctccgggaggaggagcaggaccacgaggaggtgggaggcggcggccgcctggggaccagctccgcgcctcggcctctccgccccctccccagcctttctctcgccctcttctcccacactcccggccggcgcctcggctttgtgcgaggagatggtgtagccccctggccgccgaaggaggagccggacacttgtctcccgtctccgagctgctccccacccctggaggagagacccccccctcggctcggcgccttctgcgtctcccggctggtggggaagcctctgcgccgccggcaccatgagtgaacagagtatctgtcaggcaagagctgctgtgatggtttatgatgatgccaataagaagtgggtgccagctggtggctcaactggattcagcagagttcatatctatcaccatacaggcaacaacacattcagagtggtgggcaggaagattcaggaccatcaggtcgtgataaactgtgccattcctaaagggttgaagtacaatcaagctacacagaccttccaccagtggcgagatgctagacaggtgtatggtctcaactttggcagcaaagaggatgccaatgtcttcgcaagtgccatgatgcatgccttagaagtgttaaattcacaggaaacagggccaacattgcctagacaaaactcacaactacctgctcaagttcaaaatggcccatcccaagaagaattggaaattcaaagaagacaactacaagaacagcaacggcaaaaggagctggagcgggaaaggctggagcgagaaagaatggaaagagaaaggttggagagagagaggttagaaagggaaaggctggagagggagcgactggaacaagaacagctggagagagagagacaagaacgggaacggcaggaacgcctggagcggcaggaacgcctggagcggcaggaacgcctggagcggcaggaacgcctggatcgggagaggcaagaaagacaagaacgagagaggctggagagactggaacgggagaggcaagaaagggagcgacaagagcagttagaaagggaacagctggaatgggagagagagcgcagaatatcaagtgctgctgcccctgcctctgttgagactcctctaaactctgtgctgggagactcttctgcttctgagccaggcttgcaggcagcctctcagccggccgagactccatcccaacagggcattgtcttgggaccacttgcacctccacctcctccaccactcccaccagggcctgcacaggcttcagtagccctccctcctcccccagggccccctccacctcctccactcccatccaccgggcctccaccgccccctcctccccctcctctccctaatcaagtaccccctcctcctccaccacctcctgccccacccctccctgcatctggattctttttggcatccatgtcagaagacaatcgccctttaactggacttgcagctgcaattgccggagcaaaacttaggaaagtgtcacggatggaggatacctctttcccaagtggagggaatgctattggtgtgaactccgcctcatctaaaacagatacaggccgtggaaatggaccccttcctttagggggtagtggtttaatggaagaaatgagtgccctgctggccaggaggagaagaattgctgaaaagggatcaacaatagaaacagaacaaaaagaggacaaaggtgaagattcagagcctgtaacttctaaggcctcttcaacaagtacacctgaaccaacaagaaaaccttgggaaagaacaaatacaatgaatggcagcaagtcacctgttatctccagacgggattctccaaggaaaaatcagattgtttttgacaacaggtcctatgattcattacacagaccaaaatccacacccttatcacagcccagtgccaatggagtccagacggaaggacttgactatgacaggctgaagcaggacattttagatgaaatgagaaaagaattaacaaagctaaaagaagagctcattgatgcaatcaggcaggaactgagcaagtcaaatactgcatagaggaacagactaaggagagataggactttaatctggaggaaaaatatcctacaaacaacaactgttcacaacagcaaacccctacatttatgagctgtaagaagaaaatggagacaaacagaaggagggaaaaaccaacctactctgaaagccttcagacattatgactctggtgataagctctttccctctccgtttgctgcttttttctggcctttacaacagaatggaagagaatcatttaagagttcctgtaacagttatgcagaaaatactaaaacccatcaggcaagatcaccacgcattgaaatattttcatatcaagataaagtcgcacattttccacaatacattgctaaaataaagaggagaaaggcttaggaagtttttttgcagagagtgctggtaaagaattgagcaagtttgctattgtattgtaatgtttctctcaggtttgttcttcctatcatgtttgatattccatgaataattgagatcagccctatgtaagttaagatcataatatgtggaacaaatggaattgtaagtgctttcaaagggtaatatttataagaaagtgtccgaaaaatgtttcttcagcttgagaaattttagaatgataggaagtttctcgagttagccttcatgcaattttgtagattaaaacataaaatttgtccagaacttaaagatttagatgccttcctaaattgttacaatgctttaccaaatctatgacttctacataacacaaaccagtggtcaaatgtaaacactatattgtagatttactgtaggttttcaaccttttttagatttatgcatgtggacatttttataatgtaattacaatcaccacaaggttagcttttttaattgcagacagtaatgcatgtcacactaatatgtagtggccttttcaaggcctagtcccagggaaaacattttgtagagtataggggagtgggaggaaggggaggaataattttttatttaaagttgatttctgcactatctttttctcagttacctgcatgaataaataatgagaaatattttgtgactttaattggtaaatatgttacaaaaccaagtacttaatcttttacatcatgtcttcagctatttgtattttaaccagtaatttcaatggtctgaaacatgattctgagcttcacataatatcttaactgtggaactcaaaagtttgatcactgaatttggcagttattattacctaggtacccccgctgttacacaggtgtttagatacgtgttcctgaatgaagctgcttttgaattttgttatgttgaaatgcaagaaataacaatgatggcagcaattaaggtcacagaaatcattaggtaaaggaaaaccaatgaggagttctgcagttttcttttaataagtaaagtgagacttgggtggtgggaagaaggaaggtgggaagaaggaattagacactctgcctgccactctgcgtgtgtgtgctctcgcgcacgtgctgtctatatggaagccactcccttttctttcctttgaaactggtaaggttaaaataggggagaaatcctacatgttggaatgatagctttttggaaaatttaagaaactctccaggctctccatcttgatttatgcttgagttgttatgtgccatatttgctttgaactctgattatcagaagttttactaaaactttgaaataattcactttcatctgctttctagattttgtacatctcagtccataaagcaaagcttgttgatagtgtagttttctaaacgctgcaaatttgcagcctttaccactacaaagaagtttggatgagggattttttttttctttgtcaaaatagttcctgtttctgtagaaatttcatttttagattaaactgtgatggatgagctatcataattcaagtatacatttcttttttctatcagatattcattgtcatgcagtagtagtaaaaacatcaaagatgcagcaagcttattaagtattattttctaaaagaaataggaggcattttcatctttattattgtacttttggttatgcaaacactttgataatataaacagttatgtcccctataaatctggtcagcaacctcttttgattttgttgggtaagttaaatagtctgtagtaggtagagtactgggtacaagtggtccaaactaagataagagactaaaataaaatgctaaatcttaaaagaaactgggtttatgcactaaacgttttgtgccttggtctaatattaacatgatgtatgtgtaaactgacaaaaaaaaaaaaaaaaaaaaaccagtgttgaatcatgctatatttcccatcatcccagattgctaaatgttctttccaagaagtctgaatgaattattatatacatttgctatcatacatgacagttgtgtcattattagagatttcagtaattaaaatgggaaacagaagcctaagttatttaccttatcaaaaccacgttccttggaaccacattattatgatggtttttgtgctcttgtacgttggatgtcttaagctgagtacagtttaggggatcctttctaatgacaggaaggcactgctttcctcaacactgtgatctgacctgtgacaagtctgtactatccactatgtaaatggctcacaagtcaattgcaaacaaactgaatgtacaaatcttagtgctggtgctgaaatctcttcagaatagtcatcatgatttaaaagtttgtttaaaaatttgcaagcatcaagtgtcaatcaaaactgaagatgaaacactaatgaatgttgaattctcatgcttttaggtgtacttcctttttagaattttcagttttctgctatttttaccgtaactatttcgtttaaatttgtttcatttaagtttcctacacgctaacttcgtttgtgcgattgaaataaaattgcagtatatatatgttgcttgtttgtgacacttagataatcttctgaaataatttgttttaaagtaagttatattggatgtgaaaaacaccttttaaagtccaagactttactacttaaaagtttacatgtcacgtcactattctttacagatttcatagaagtcgtgaatactaagtaatgtatacaaaagaaatatgtgatgatgtgtctactttttgtttgaaataactgttgggtgttccctcttcttattttctctctgcccaccttgacacagtaacttcctcttatagtcaagatgatgattaagtgtttaatttttattccattttgttctgcaacacgttcaggtacttaaaactcattcatgcagttagaattatcctttatgtagtttgcatggtaaaggacattgtgtggtaaagggcattattgagtaatgaattttaagtatagcaaaatatgtatagtgtttatacatgatgctgatttcttaaaacctacatataagcagtagtactttttctctattataaagtattaattttgagttccattttataattctgatgtcttcattagaaatacaaaaatacaatccttgtattttttctttgaccagacccaaattttccccttcccccctccattctcctctccacttctcgtggaccgcgtgttcccaatattcattaacatttgcagccattacagagttacagttgtaaaattttcagctgtttttttttttttttttttgctctagcctgtctcatgttcttgcttctcttcatatgtaagtcagtatttttgtctacaaattaaaagtcacttgtcattcaaaaatgagttaagtaacatgataatcttttaaatttacctagctacaacttttatgtctcttgtaaatttatatatactttcagtgccattgtgaagaattggccttttaattctaagtagtattaccctatgaagcacagtgtgcaaaggtatgctacaaggtctctttaattcctgtgtggccattataattttataacaccattaccctttaaattctaccgattataagcagcgtaaaagtaactatataaagcaaacatcgcaaaggaactctgcaggagctcttaattcctttatgtagctatcataaaattcactttcctgaagacatttactctcattcacttccaaactccaaacctttttctggtagcaccacttttgtttttaatagaaagatgagttcatatctgtacatctctccaaagctctaaggaatgagaaaaggatcctagtatattgaaattactgatgtttaatacctctgccttttcactaaaagccatttaatatttttaaagtcaaaacttgacatacaggtatttataaggaatctccatgactctgaaggaatgaaattgatgtaggtagctttggctatgtaaagacatagtagaggacaattacttaaagaagagttttcttttgaggatttgtagatttgactaagcagctgaagtcagtaacccctcaagaaagtccgtttatagaagccaagaactgttggaggtctgtgatgcaggtttttctgttcccaacatcaaaagctgtggattatttggtgtgttcccctttatgttatctctcgataatttttgagacatcaagattttttaaaatatcaatactggaaagatgaaaccttcaaattaaaacctaaaattgattagaaagaaaagtaaaatattaatgcagtaaatttaggatggttacagatactcaccatcaacataaataaatggagttctaggataaattatttgtggaatactaatggtcaagtcacataagagtaaaatcttttggtgaggagacacatttgacaactgctaaagaattaactaaatttgtctttctaaatagttttctttataaagtaacagaaacattgtaaaaggataaatgactgtcataatgacttaggatgttgtaagaatgtctgccacatttattggttatttctgttgaaatctgaaggaatcgatacatctgaaaattgagaaagggaaataggactgtccccgttacagatactctgtgatgcacacaaccttctaaacggaagtgttagtatcatttaaagcacatagtaggccttgagtatttgcagattaacatgcagaaaaaatcaaagatgaagccccaattaagtgtttgaaccaaagaatcacagtcactgagctgcacccccgttctgtgaagcatgttaaatactcataaagagcagagagcagggcccgtagacgcttctggtgtaggacacaggaattctaggcagagggagaaaattaggggccccagttggtggctgagagtaaaaagaatataccatttgagtagtgctgttctttttcctcagtttttaaagacatataattcctagtagttaggacatctaaatagctcggtaaactggtcagaggcgggaggattgcttgaggccagaagttttgagatcagcctgggtaacagggagactcatttctacaaaaaaatttaaaaatttaggccaggcatggtggtgcacacctgtaatcccagctactcaggagactgaagcgggaggatcacctgagcccagggaggacgcggctgcagtgagccgttatcatgccactgtactccagcctgggtgacagagcgagaacctgtctctaaaaaaaaaaaaaaaaaattctaagagaatatagcttttcatagaaattattagaaaagcttacatatttcattagagagcccagtttgttagactacatttattccgtaaaagttctatatacaaatgacaacccatagtttatcatgtaaatctgatttaactgttcccttcaattccaagaaagatttcttcagcagtagatgacaattctaaaagcataaagaaataactaataaaggagatggatgatgttataggttggtttggttgggttttagtaaatagttattcttctaagaaggcttagaaaatcgagaattgaatagttggtactttgaattccataggaaaaagcactcagaagaaaaagtctacattggctagtgtttagattgagagttaattttcccatcaagtccaaaagtttccatccaagtctatagaaactgagagaaaaggttcttggcttacacttaaaatacacattgttgcaaccatataagagagatacattacagaacgcttttaaaaatttggtctcttaagcgcctaacagtccatgctttagtcacatctgtgaaacctcttttctttttttctttttcttttatttttttttttaaagattaaaggcattttaaaaataaatgtttcatggccgggcatggtggctcacgcctgtaatcccagcactttgggaggctgaggtgggcagatcacctgaggtcaggagtttgagaccagcctggccaacatgatgaaaccccatctctactaaaaatacaaaaaaattggctgggcatagtggtgggcacctgtaatcccagctcttcgggaggctgagacagaagagtcgcttgaatccaggaggtggaggttgcagtgagctaagaccgcgccactgtactccagcctgggcgacagagcgagattccatctctaaataaataaatgtttttcaacgtgttttatgtgagaaataccagcttttcattattactaccagttgatctcaggtgtcacttggttggttctgctgaccgaggcactgggcattttaaatatggagtttccctccacccattgatcaagtctgaggtttgtccatccttggtggcaggctagcttaaccatggattcacaaaccccatttgattgtcgtaagtcataaggccaccccagtgccagtggttgggcatcacagtgagtctgaggtgatgaatttgagttagctgtaggctagttccgcaactcagcaatagcccatggatggttggtaaaagacgttgactttgccacttaaatttccaggagaagaatagcttatagtttatctgaggaaagtaattgggaaggcttagatattgagaagaaagccctgttaaaatctaggtagcatttcctttcttctttattactagagggatgggaggttcaggcctgagtcaggactttacaatttggtgtccttcccagaggtactttgggcttgatcattttaagtttcaattgcaaaaaaaaatttttgacggagtgttgctctgtcactcaggttggagtgcagtggtgcgatctcggctcactgcaacttcccccccctgggttcaaagggattttcctgcctcagcctcccaagtagctgggactacaggcgcgtgccaccatgcccgactaatttttgtatttttagtagagatggggtttcaccatgttgcccaggctggtcttgaactcctgagctcaggtgatctgcccgcctcggccttcaattgcagaagtttttgaagggagaatatttgatcctcacataaaatgtccttgtttctgaaagaaaacatggtaaaaattgttattgagtccatgtctttgccaccttgttggacttgatttccctttctctgtgttcctcccgccctcagtctctctcagtctgtccttttttgtgtgtggagttgtgggcaggtcattggactgggactgactttaccagttttcaggctgtggggctagtcagtcattctctctgagccttctacctctaaagttgagttctttttttaaattctttttgttttgtttttattttttccttgccactatacaagcaaggatagataaagctttttattattattgttattattattatttcgagacagtctcgctctgtcatccaggctggagtgcagtggtgtgatttcagctcactgcaacctctgcctcccgggttcaagcgattctcctacctcagcctccttagtagctgggactacaggcatgcgccaccacacccggctaatttttgtatttttagtagagacagggtttcaccgtattggccaggctggtctcgaactcctgacctcaggtgatccacccaccttggcctcccaaagtgttgggattacaggcataagcgaccgtgcccatccccgataaagttgagttctgaatttcctctttcactgtattctcggcagctactggttggtttattctttttttttaatcttttttggtttattcttcttttgatctttgaagagaaggagaaaaaagatctgagtttggctctcccatcttaagtgcagcttttagttgttttatagtcatagacgctattgcactggacagcatgcatcctggatgtaaacaatgcggaaaaatcaatggagtgaccatcttggggtcagtggtgttgcataaagcaccagtggtgtgctgttctgtgtcagtttcctctgcgccacgtgctttcacagtttgaattaccagcatctctgtggtggcttcagtacattctccattgtgcttcaacctggaagcacattctgccgttcagaaagactgattccaatcatgtaatgggaccacacgagatccatgctccaattatatgaatagcagaaggtccatttgactcttgtagttcaagagctgtttctaagtaaacagactttccagagctcgatgaagtgaagaagcccttctttcaattcctgggcagaattcagtggttttcatatcatctgaacctgctgtgctgctgtttattctatcactgtcagccttgaaaggaaaaaaggaataatcttaccctcctgcccttcttattttatatcttccatcttatccatctatatccatgtagtcattccttccgagttccctggttttaatccaaaagactctgtttaacagcaatgtcttggcagaccaggtgccgcttccgtgccatttgagggctctgagtctttgcttcgtcttaggaagataaagataatttggcagaaagtcagagatggaaatagcagtttgggatgataaaagatgggtcctgttttgctgacattcttttactttggttcttggtgcgtgtcctttgggattcatttcttgctagcatgaataggacatgcttttcgttaggtgcttttcttttttggagaacatgaagtgtttctaacaaaactgaatgagctagaaagaattctattttgagacatctgtagttgatgcaaagtatttctgtaatcctcaatgacagtacttacatatttgcatagaattttttttttaatttttgaggaaacctctctggagtctgtatttataggagcatcctgaaagtccctattatgtagctggtgggagcgagagagggacagccacactcgtgctgtgagcagagcacaacttcaggcagagtgaatgccttctgagttctcattggaagctttctgttgctcagcctctggcagatttcagaaccttctacttaagccaggtgtggtggtgcgtgctcctaggcacagcgactcggggggctgaggcagaaggatcacttgagcccaaagttggaggccagcctgggcaacatagcgaggcctgtctccttaaaaaataaataaataaataataaataaataaataaataaaaaccttgtccttgactattgtgctgtctgctgcccctttgtagggatggggttggggtcagaataagcatgtgcatgaatggcggaaagctttggtggtgtttgtttgtttgtttgttttttgagaggtgggggagtcagcagtgaacctttctggttaaagaacaacgtacataatttctattatgagatttagaaggttaaatacttttttttttcaggcctaccaagttgatagaccaaaagtatatagtagaacagcacagtagaaaaaatttaaaagtgaatttcttatggtccaaaaggatggatagtcacagtccataacctttcataatatatgctggaattggaatctcttgtcatcttgctttgctctgaattttagaactagaagtgtgcatgtatgtcaaaagattatgcagagctattttctttgctaacaatgtaaacatttgcaccccatgaatgggactttataatctggaagtgagcctaaggttgcgtatactgaagtcatgttttaaaagttaaggttgacttaaacatatacaaggctgtattttaattgtaactagaaatcatttactatgcatacagaacctcatgtatcttatcatggaatttgtgaattaatgggccttgccgaattcaagggtaagggaaactggtaacaacttgttttaaatcaacatactataagctcctgcttgcttgactcaagttgtttgaaaatctgaattaaacaggatctcattgtcaggaaacatcttctaagcttgacatctacgtttaagaagggaacgtggaagagaaggtgagacatgaaactaaaacagctgggagggtaggatcagactgcacctgatttttggaccaaagtttcatataggaataaataaaaaggaggaccacttgtgagccaacctaggaaggacttgccagaaagtagcagctcctgctgcaaaatacagtgccttcaaaatgattctctgtgtgaattgcatgcaatttcatgtaaccataaagtgtaacctgtatgtgcatgacatgtgtctagaatgtgtaaagttaggattcagcaggaaggggcctggccctgtcactgtggtggatcagtggacctgctgaagtcactggactcatgtgacttaggtttgcagcatcagacccctgtgtttgcattaagtggccacatcgttgaaatcggatcaatctctccctcagctttctttcctactttgcagctttgctggttttaactgcttcattcttctgcttcttggtatccttttttcttttgaaataaaaacatgaaatacttaattc

SEQ ID NO: 56187 - DNA, 7691 bp, Homo Sapiens
cgggagcggcgggagcggtggcggcggcagaggcggcggctccagcttcggctccggctcgggctcgggctccggctccggctccggctccggctccagctcgggtggcggtggcgggagcgggaccaggtggaggcggcggcggcagaggagtgggagcagcggccctagcggcttgcggggggacatgcggaccgacggcccctggataggcggaaggagtggaggccctggtgcccggcccttggtgctgagtatccagcaagagtgaccggggtgaagaagcaaagactcggttgattgtcctgggctgtggctggctgtggagctagagccctggatggcccctgagccagccccagggaggacgatggtgccccttgtgcctgcactggtgatgcttggtttggtggcaggcgcccatggtgacagcaaacctgtcttcattaaagtccctgaggaccagactgggctgtcaggaggggtagcctccttcgtgtgccaagctacaggagaacccaagccgcgcatcacatggatgaagaaggggaagaaagtcagctcccagcgcttcgaggtcattgagtttgatgatggggcagggtcagtgcttcggatccagccattgcgggtgcagcgagatgaagccatctatgagtgtacagctactaacagcctgggtgagatcaacactagtgccaagctctcagtgctcgaagaggaacagctgccccctgggttcccttccatcgacatggggcctcagctgaaggtggtggagaaggcacgcacagccaccatgctatgtgccgcaggcggaaatccagaccctgagatttcttggttcaaggacttccttcctgtagaccctgccacgagcaacggccgcatcaagcagctgcgttcaggtgccttgcagatagagagcagtgaggaatccgaccaaggcaagtacgagtgtgtggcgaccaactcggcaggcacacgttactcagcccctgcgaacctgtatgtgcgagtgcgccgcgtggctcctcgtttctccatccctcccagcagccaggaggtgatgccaggcggcagcgtgaacctgacatgcgtggcagtgggtgcacccatgccctacgtgaagtggatgatgggggccgaggagctcaccaaggaggatgagatgccagttggccgcaacgtcctggagctcagcaatgtcgtacgctctgccaactacacctgtgtggccatctcctcgctgggcatgatcgaggccacagcccaggtcacagtgaaagctcttccaaagcctccgattgatcttgtggtgacagagacaactgccaccagtgtcaccctcacctgggactctgggaactcggagcctgtaacctactatggcatccagtaccgcgcagcgggcacggagggcccctttcaggaggtggatggtgtggccaccacccgctacagcattggcggcctcagccctttctcggaatatgccttccgcgtgctggcggtgaacagcatcgggcgagggccgcccagcgaggcagtgcgggcacgcacgggagaacaggcgccctccagcccaccgcgccgcgtgcaggcacgcatgctgagcgccagcaccatgctggtgcagtgggagcctcccgaggagcccaacggcctggtgcggggataccgcgtctactatactccggactcccgccgccccccgaacgcctggcacaagcacaacaccgacgcggggctcctcacgaccgtgggcagcctgctgcctggcatcacctacagcctgcgcgtgcttgccttcaccgccgtgggcgatggccctcccagccccaccatccaggtcaagacgcagcagggagtgcctgcccagcccgcggacttccaggccgaggtggagtcggacaccaggatccagctctcgtggctgctgccccctcaggagcggatcatcatgtatgaactggtgtactgggcggcagaggacgaagaccaacagcacaaggtcaccttcgacccaacctcctcctacacactagaggacctgaagcctgacacactctaccgcttccagctggctgcacgctcggatatgggggtgggcgtcttcacccccaccattgaggcccgcacagcccagtccaccccctccgcccctccccagaaggtgatgtgtgtgagcatgggctccaccacggtccgggtaagttgggtcccgccgcctgccgacagccgcaacggcgttatcacccagtactccgtggcccacgaggcggtggacggcgaggaccgcgggcggcatgtggtggatggcatcagccgtgagcactccagctgggacctggtgggcctggagaagtggacggagtaccgggtgtgggtgcgggcacacacagacgtgggccccggccccgagagcagcccggtgctggtgcgcaccgatgaggacgtgcccagcgggcctccgcggaaggtggaggtggagccactgaactccactgctgtgcatgtctactggaagctgcctgtccccagcaagcagcatggccagatccgcggctaccaggtcacctacgtgcggctggagaatggcgagccccgtggactccccatcatccaagacgtcatgctagccgaggcccaggaaaccactatcagcggcctgaccccggagaccacctactccgttactgttgctgcctataccaccaagggggatggtgcccgcagcaagcccaaaattgtcactacaacaggtgcagtcccaggccggcccaccatgatgatcagcaccacggccatgaacactgcgctgctccagtggcacccacccaaggaactgcctggcgagctgctgggctaccggctgcagtactgccgggccgacgaggcgcggcccaacaccatagatttcggcaaggatgaccagcacttcacagtcaccggcctgcacaaggggaccacctacatcttccggcttgctgccaagaaccgggctggcttgggtgaggagttcgagaaggagatcaggacccccgaggacctgcccagcggcttcccccaaaacctgcatgtgacaggactgaccacgtctaccacagaactggcctgggacccgccagtgctggcggagaggaacgggcgcatcatcagctacaccgtggtgttccgagacatcaacagccaacaggagctgcagaacatcacgacagacacccgctttacccttactggcctcaagccagacaccacttacgacatcaaggtccgcgcatggaccagcaaaggctctggcccactcagccccagcatccagtcccggaccatgccggtggagcaagtgtttgccaagaacttccgggtggcggctgcaatgaagacgtctgtgctgctcagctgggaggttcccgactcctataagtcagctgtgccctttaagattctgtacaatgggcagagtgtggaggtggacgggcactcgatgcggaagctgatcgcagacctgcagcccaacacagagtactcgtttgtgctgatgaaccgtggcagcagcgcagggggcctgcagcacctggtgtccatccgcacagcccccgacctcctgcctcacaagccgctgcctgcctctgcctacatagaggacggccgcttcgatctctccatgccccatgtgcaagacccctcgcttgtcaggtggttctacattgttgtggtacccattgaccgtgtgggcgggagcatgctgacgccaaggtggagcacacccgaggaactggagctggacgagcttctagaagccatcgagcaaggcggagaggagcagcggcggcggcggcggcaggcagaacgtctgaagccatatgtggctgctcaactggatgtgctcccggagacctttaccttgggggacaagaagaactaccggggcttctacaaccggcccctgtctccggacttgagctaccagtgctttgtgcttgcctccttgaaggaacccatggaccagaagcgctatgcctccagcccctactcggatgagatcgtggtccaggtgacaccagcccagcagcaggaggagccggagatgctgtgggtgacgggtcccgtgctggcagtcatcctcatcatcctcattgtcatcgccatcctcttgttcaaaaggaaaaggacccactctccgtcctctaaggatgagcagtcgatcggactgaaggactccttgctggcccactcctctgaccctgtggagatgcggaggctcaactaccagaccccaggtatgcgagaccacccacccatccccatcaccgacctggcggacaacatcgagcgcctcaaagccaacgatggcctcaagttctcccaggagtatgagtccatcgaccctggacagcagttcacgtgggagaattcaaacctggaggtgaacaagcccaagaaccgctatgcgaatgtcatcgcctacgaccactctcgagtcatccttacctctatcgatggcgtccccgggagtgactacatcaatgccaactacatcgatggctaccgcaagcagaatgcctacatcgccacgcagggccccctgcccgagaccatgggcgatttctggagaatggtgtgggaacagcgcacggccactgtggtcatgatgacacggctggaggagaagtcccgggtaaaatgtgatcagtactggccagcccgtggcaccgagacctgtggccttattcaggtgaccctgttggacacagtggagctggccacatacactgtgcgcaccttcgcactccacaagagtggctccagtgagaagcgtgagctgcgtcagtttcagttcatggcctggccagaccatggagttcctgagtacccaactcccatcctggccttcctacgacgggtcaaggcctgcaaccccctagacgcagggcccatggtggtgcactgcagcgcgggcgtgggccgcaccggctgcttcatcgtgattgatgccatgttggagcggatgaagcacgagaagacggtggacatctatggccacgtgacctgcatgcgatcacagaggaactacatggtgcagacggaggaccagtacgtgttcatccatgaggcgctgctggaggctgccacgtgcggccacacagaggtgcctgcccgcaacctgtatgcccacatccagaagctgggccaagtgcctccaggggagagtgtgaccgccatggagctcgagttcaagttgctggccagctccaaggcccacacgtcccgcttcatcagcgccaacctgccctgcaacaagttcaagaaccggctggtgaacatcatgccctacgaattgacccgtgtgtgtctgcagcccatccgtggtgtggagggctctgactacatcaatgccagcttcctggatggttatagacagcagaaggcctacatagctacacaggggcctctggcagagagcaccgaggacttctggcgcatgctatgggagcacaattccaccatcatcgtcatgctgaccaagcttcgggagatgggcagggagaaatgccaccagtactggccagcagagcgctctgctcgctaccagtactttgttgttgacccgatggctgagtacaacatgccccagtatatcctgcgtgagttcaaggtcacggatgcccgggatgggcagtcaaggacaatccggcagttccagttcacagactggccagagcagggcgtgcccaagacaggcgagggattcattgacttcatcgggcaggtgcataagaccaaggagcagtttggacaggatgggcctatcacggtgcactgcagtgctggcgtgggccgcaccggggtgttcatcactctgagcatcgtcctggagcgcatgcgctatgagggcgtggtcgacatgtttcagaccgtgaagaccctgcgtacacagcgtcctgccatggtgcagacagaggaccagtatcagctgtgctaccgtgcggccctggagtacctcggcagctttgaccactatgcaacgtaactaccgctcccctctcctccgccacccccgccgtggggctccggaggggacccagctcctctgagccataccgaccatcgtccagccctcctacgcagatgctgtcactggcagagcacagcccacggggatcacagcgtttcaggaacgttgccacaccaatcagagagcctagaacatccctgggcaagtggatggcccagcaggcaggcactgtggcccttctgtccaccagacccacctggagcccgcttcaagctctctgttgcgctcccgcatttctcatgcttcttctcatggggtggggttggggcaaagcctcctttttaatacattaagtggggtagactgagggattttagcctcttccctctgatttttcctttcgcgaatccgtatctgcagaatgggccactgtaggggttggggtttattttgttttgttttttttttttttttgtatgacttctgctgaaggacagaacattgccttcctcgtgcagagctggggctgccagcctgagcggaggctcggccgtgggccgggaggcagtgctgatccggctgctcctccagcccttcagacgagatcctgtttcagctaaatgcagggaaactcaatgtttttttaagttttgttttccctttaaagcctttttttaggccacattgacagtggtgggcggggagaagatagggaacactcatccctggtcgtctatcccagtgtgtgtttaacattcacagcccagaaccacagatgtgtctgggagagcctggcaaggcattcctcatcaccatcgtgtttgcaaaggttaaaacaaaaacaaaaaaccacaaaaataaaaaacaaaaaaaacaaaaaacccaaaaaaaaaaaaaaaaagagtcagcccttggcttctgcttcaaaccctcaagaggggaagcaactccgtgtgcctggggttcccgagggagctgctggctgacctgggcccacagagcctggctttggtccccagcattgcagtatggtgtggtgtttgtaggctgtggggtctggctgtgtggccaaggtgaatagcacaggttagggtgtgtgccacaccccatgcacctcagggccaagcgggggcgtggctggcctttcaggtccaggccagtgggcctggtagcacatgtctgtcctcagagcaggggccagatgattttcctccctggtttgcagctgttttcaaagcccccgataatcgctcttttccactccaagatgccctcataaaccaatgtggcaagactactggacttctatcaatggtactctaatcagtccttattatcccagcttgctgaggggcagggagagcgcctcttcctctgggcagcgctatctagataggtaagtgggggcggggaagggtgcatagctgttttagctgagggacgtggtgccgacgtccccaaacctagctaggctaagtcaagatcaacattccagggttggtaatgttggatgatgaaacattcatttttaccttgtggatgctagtgctgtagagttcactgttgtacacagtctgttttctatttgttaagaaaaactacagcatcattgcataattcttgatggtaataaatttgaataatcagatttcttacaaaaaaaaaaaaa

SEQ ID NO: 56188 - DNA, 3256 bp, Homo Sapiens
cggcggcggcggcggcggcggcggcggcggagcccggagcgcaggccggaggctcccggcccgccggccccggagcggagcggagcggaggatgcagcagccgcagccgcaggggcagcagcagccggggccggggcagcagctggggggccagggggcggcgccgggggccgggggcggcccaggggggggcccggggccggggccctgcctgaggcgagagctgaagctgctcgagtccatcttccaccgcggccacgagcgcttccgcattgccagcgcctgcctggacgagctgagctgcgagttcctgctggctggggccggaggggccggggcgggggccgcgcccggaccgcatctccccccacgggggtcggtgcctggggatcctgtccgcatccactgcaacatcacggagtcataccctgctgtgccccccatctggtcggtggagtctgatgaccctaacttggctgctgtcttggagaggctggtggacataaagaaagggaatactctgctattgcagcatctgaagaggatcatctccgacctgtgtaaactctataacctccctcagcatccagatgtggagatgctggatcaacccttgccagcagagcagtgcacacaggaagacgtgtcttcagaagatgaagatgaggagatgcctgaggacacagaagacttagatcactatgaaatgaaagaggaagagccagctgagggcaagaaatctgaagatgatggcattggaaaagaaaacttggccatcctagagaaaattaaaaagaaccagaggcaagattacttaaatggtgcagtgtctggctcggtgcaggccactgaccggctgatgaaggagctcagggatatataccgatcacagagtttcaaaggcggaaactatgcagtcgaactcgtgaatgacagtctgtatgattggaatgtcaaactcctcaaagttgaccaggacagcgctttgcacaacgatctccagatcctcaaagagaaagaaggagccgacttcattctacttaacttttcctttaaagataactttccctttgacccaccatttgtcagggttgtgtctccagtcctctctggagggtatgttctgggcggaggggccatctgcatggaacttctcaccaaacagggctggagcagtgcctactccatagagtcagtgatcatgcagatcagtgccacactggtgaaggggaaagcacgagtgcagtttggagccaacaaatctcaatacagtctgacaagagcacagcagtcctacaagtccttggtgcagatccacgaaaaaaacggctggtacacacccccaaaagaagacggctaaccctggagtatcacccttcctccctccccaggcaccactggaccaattacctttgaatgctgtatttggatctcacgctgcctctgtggttccctccctcatttttcctggacgtgatagctctgcctattgcaggacaatgatggctattctaaacgctaaggaaaaaaaacaaacacagaactgtttcaagtactcaagactgacttacagaccaaccaaccaccttgctggaacccttgctagcaggcattcttataaaagaaactttcgagcctccttatattgctggaaactcagctgtgctccagactagagcctccttacctatgctatggatttttaatttattttctcttatttcatgtacactgctttttttggttacagtgtatgatggatgtgtatgaaaaaaatgtatctttgggaaaacaattacagtttgttaatttgaagatgctggtcttgactcatctttatttttattcgcacatcccaccccatcccctgaactacttgggaggtggggaggggtacgagtccactgttgctttggtagagatgagaggccgcattttgctgctaaagcaagagaaacttggagctgaagcacacacctggtctgcccctagatttctcctcaaggcctctggagcaaccagcacttgcccccttggaatgcagagcctggcctgccaaactacaatgtggtaggctgaaacgatggtgttaattcttaggactacttttctagtcacagatgttttcaaatttctaagaaaaagaaaatgaggctcaagaggctgcttcgtagaattccttttgaatgaattgagtggggatggggacacagtctccaagtgtgtatgtggtcttttctgatctcagctgtgtggctgcaactcttcgctgttcattggttcctctcctggaaagtggcttctaaccagcactggatggtgatcattggtaagctttgctcacctccctctctcttgcttcatttggctttatcaaaaagaacagacctagctctgaatttgtttggcttgggaaattatggattctttcaagccactcccacaaggtgggtcctactagaaagggttagcattttaaggggggttgttctatacacctgtgtccttaccccaggctcaggaactgccagggagggaagatgaggtggggagtctgtactgagatggaactgtcagtgctgtgttgtatgtacttgctgttgtaaaagtttgggcatgactttgcatctagcgggtgctgcctgcatctctttgtctgtaagcttgctctgggactcagcctcttaggacctacgatgccagcagctctcattaacagtgaaatgacagaggccaaagatggccaagtgaagacccaagtctcagaaaacccagacttgggacaactgcctgggaactaggatgctagagcagttctgtaatgctttgagacacagcaattttcacattggccattctttcccctcccctaccccttttcttttgagggacttttaatgtttgctgctttaggtggatggagagtccaccagtcccactcaatgctgctctaactctacccacacccacctaattaggggtgctaataaaacatgctgaggttgagataaagacgggacataaggggaaaattcattccatagagctgaaatctggttttcaaggcctctgtggctttcttctgaacttaccaccagccctggctggaatgtagattgtgtttttagtaatgtgtactgtgagctgtcttctgtataatgtattttgtaatgtatttttctcatctaccaaaggatgaaacaaataaaattatttaaatagtaaagaaaaaaaaaaaaaaaaaaaaaaaaaaaaa

SEQ ID NO: 56189 - DNA, 7478 bp, Homo Sapiens
actggcagctggccgggcgctcgcagtgggagctgctgcaggctccgcggcggcggcaacggaggctgcgggggcggcggcgcgagcggccgggcttggtaggggagccgagcccggcccgggatcccgagcagcgagagtgtggggtacctaggcccctcacgctggacttcacagtctccgggccgcctgacctccgcacgggtatatgggatggaagcgggaccctcgggagcagctgcgggcgcttacctgccccccctgcagcaggtgttccaggcacctcgccggcctggcattggcactgtggggaaaccaatcaagctcctggccaattactttgaggtggacatccctaagatcgacgtgtaccactacgaggtggacatcaagccggataagtgtccccgtagagtcaaccgggaagtggtggaatacatggtccagcatttcaagcctcagatctttggtgatcgcaagcctgtgtatgatggaaagaagaacatttacactgtcacagcactgcccattggcaacgaacgggtcgactttgaggtgacaatccctggggaagggaaggatcgaatctttaaggtctccatcaagtggctagccattgtgagctggcgaatgctgcatgaggccctggtcagcggccagatccctgttcccttggagtctgtgcaagccctggatgtggccatgaggcacctggcatccatgaggtacacccctgtgggccgctccttcttctcaccgcctgagggctactaccacccgctggggggtgggcgcgaggtctggttcggctttcaccagtctgtgcgccctgccatgtggaagatgatgctcaacattgatgtctcagccactgccttttataaggcacagccagtgattgagttcatgtgtgaggtgctggacatcaggaacatagatgagcagcccaagcccctcacggactctcagcgcgttcgcttcaccaaggagatcaagggcctgaaggtggaagtcacccactgtggacagatgaagaggaagtaccgcgtgtgtaatgttacccgtcgccctgctagccatcagacattccccttacagctggagagtggacagactgtggagtgcacagtggcacagtatttcaagcagaaatataaccttcagctcaagtatccccatctgccctgcctacaagttggccaggaacaaaagcatacctaccttcccctagaggtctgtaacattgtggctgggcagcgctgtattaaaaagctgaccgacaaccagacctcgaccatgataaaggccacagctagatccgctccagacagacaggaggagatcagtcgcctgatgaagaatgccagctacaacttagatccctacatccaggaatttgggatcaaagtgaaggatgacatgacggaggtgacagggcgagtgctgccggcgcccatcttgcagtacggcggccggaaccgggccattgccacacccaatcagggtgtctgggacatgcgggggaaacagttctacaatgggattgagatcaaagtctgggccatcgcctgcttcgcaccccaaaaacagtgtcgagaagaggtgctcaagaacttcacagaccagctgcggaagatttccaaggatgcggggatgcctatccagggtcaaccttgtttctgcaaatatgcacagggggcagacagcgtggagcctatgttccggcatctcaagaacacctactcagggctgcagctcattattgtcatcctgccagggaagacgccggtgtatgctgaggtgaaacgtgtcggagatacactcttgggaatggctacgcagtgtgtgcaggtgaagaacgtggtcaagacctcacctcagactctgtccaacctctgcctcaagatcaatgtcaaacttggtggcattaacaacatcctagtcccacaccagcgctctgccgtttttcaacagccagtgatattcctgggagcagatgttacacaccccccagcaggggatgggaaaaaaccttctatcacagcagtggtaggcagtatggatgcccaccccagccgatactgtgctactgtgcgggtacagcgaccacggcaagagatcattgaagacttgtcctacatggtgcgtgagctcctcatccaattctacaagtccacccgtttcaagcctacccgcatcatcttctaccgagatggggtgcctgaaggccagctaccccagatactccactatgagctactggccattcgtgatgcctgcatcaaactggaaaaggactaccagcctgggatcacttatattgtggtgcagaaacgccatcacacccgccttttctgtgctgacaagaatgagcgaattgggaagagtggtaacatcccagctgggaccacagtggacaccaacatcacccacccatttgagtttgacttctatctgtgcagccacgcaggcatccagggcaccagccgaccatcccattactatgttctttgggatgacaaccgtttcacagcagatgagctccagatcctgacgtaccagctgtgccacacttacgtacgatgcacacgctctgtctctatcccagcacctgcctactatgcccgcctggtggctttccgggcacgataccacctggtggacaaggagcatgacagtggagaggggagccacatatcggggcagagcaatgggcgggacccccaggccctggccaaagccgtgcaggttcaccaggatactctgcgcaccatgtacttcgcttgaaggcagaacgctgttacctcactggatagaagaaagctttccaagccccaggagctgtgccacccaaatccagaggaagcaaggaggagggaggtggggtagggaggagtgtaggatgccttgtttccttctatagaggtggtgtaagagtggggaacagggccagcaagacagaccaccagccagaaatctctgatatcaacctcatgtcccccacccctcaccccatcttgtcacatctggccctgaccccactggaccaaaaggggcagcactggtgcccaccatacacacaggtgtctcatgtgactcacagtgctaaagactcatgcttgacagcttggtaaggtcaactctgtagccctgcagacaaaagctggttaggtttgggtttgatactttagatgggaaagtgaggggcttgagaaagtgggtgggaggagggaaggattttttaggagccttaatcagaaaaggactagatttgtttaagaagaaaaatgaaaccagacccagatcaatattttaggatactagatgttttaatgggttcagaatccagtttgtaggaagattttttaatggttttggttgctcctcccccagctgccaccccccaccttacccttattcctctctgtccacattttctgccccaccttacttctcctccctgacagacatccagcccctagtaatacttaaggcactatggcacttagctttgaagtgacacgaccctgtcttccttccgcccgctggtgggtaaccagtgccttccctgtaacggtaatgctgcagaactgcaaccttttgtacctttctttggggaatggggtgggggtgggagaggaggtagatggggaagaaataccccagacccaacaaacctccagccagaaagccagctattttgcatttgaaggaattgacttcctcattcattgagctttttaaaagatcacaacctcaagatggttaaaatccattgacatttgcactttcaaacatgacaagtctcggagctgctgagatgacaggcccctggcctttccacttatgcctccttttctccttattcctcctacctcccgccccgcccaggtctggagttactttcatagcatttttcactcttggcttcttttctcccttgatggtcaagtctcttatgtttcaatatttcttaactggggtgtcttataacaaaaaactcttaggtctaaaatgagaaaaaagagagaaaacaaaatgttatttttataccataacttgagtgtattgccaaaatttggaaatccttcccatgcctgatgagtttatatcccagaaacattgagccatcagaatgaactgtgtacctgatttgttctctgacctggctaggtagggagggggtggttatcgccccaagatggggtccaggctccatccttcctctgtgcagataatacctttttcttgctatagcctccctcctctgcactgtcctgcactctttcttgcaagtgcatctttttccttcccctggactgtcctctgaccctttggctcatcctagattgcagtgtgtcctgtggacaggctggggaattttgctgctccctattgcttctgtttacaaaaatgaatttttcctggtttcccactagggcatgtgggtgggtggcatggacttttttttttttttttttttgtcttgagacatggggtttggctgtcttgcaggactggagaaggtggtggttctagcttggtctctgttggccttgaagcaagcatcccccctgccctttttccttgactgttcatttttttcctgccccactgcttgggatggggagttgcaacttcagtgtggaatttcctctttgaggagcctgggcttggatctatcctgatctggtgatgaagccatgattactttagacctagcccaggcttggaggccagctggaggaagaagggtctaaatcctggcctgtagagttagaactaccatttcctccccttagctgcccttgtatgacccggatttgctatgcaaaacaatctatcccaggttctgttctggttggctacattgttcagcaactcacaaaacgtagcacaaacattcattatggagaaagcatcaggactgttgagtaactcctcctttacttttttcctgctggctacagcatggggtgccctataggcacaagcccagctgaagaacagaatggagggctctgggaggaggcagctcactggagagcctacattccttacacaagtgcctaaagagagtgatgctaacactccatctgccctgtccattgccttcatatacagtctacttcgtgttctgtcaccctttggggaggggagttctcctgggacagtgggctctgcatgttctccacttggatacattttggggctaggatcagggcactattcctggagggtccagtcattcaccagcatttgcaaatgtccatagggagcaggtggcagcctctactcccagcaacaagtttgtgttctctccttttctctctttgcctcactctctccagttggttttcagctggggcttgaaatgcatttttagccctttgacgtggcttatgccattcaagaaataaaaagcaagagaatcagctttgggcaatgacaagaaatgagttcttactctgatttttttgtaaaaagataatttttgagacttgaaaaataccccgaccttgagattattcctgtttgaaaggtggtgcatgcagatggagaagtggtgttggcagcaagctttggctcatgtggatttggtttaagtggtgcttcttacccaagcttcaaggaagtgcttgggggacccccagcctcatcctcttagttgggtctcttgttccctttgtaccactgttttgccttccttttcctcttctctctttgcctggcttcctttcccttttcttctattcactctgcttgcttgctggccggcctgcctgcctgcctgcctgcctgcctgcctgtctgcctatgtgatgatgaaatctctgcatggctgcaatgatcccactgttagctggcagggtcaggcttagctccttgactgcagaagaccaagaacctgttccccaagcccagagatgtccacctgggctggactgccctcaagcttatactagagaagagcaactgacctgcccaacttgtgtgaagtcaggagggtttctggcattttccacacctgtccactccttggagctggtttctctcattgctttttctaaatctggttctttttctctttacctggggcctggcttttctgagattgtcttagggttgagctatttgggtatcctgggtttgagtgttaggggatggacataaaggaaaaagagtgatgagaagagaatggagagaatttgaataaaaggtgggaaaggagagcactgttctttgattgtttatccagtccaacctgatccattagggatcgaggtgctacactggcctccagggataagcctggggctactgttgctgggaacttaggcttaacataaagccgaagaaggtacctagaaatttgaaacttccctaaaaagctcctaatgcccacctgctagatagcttctctgtggcctcctatttagctaagcagcagtgtttttggatactttttttttctgtttgtgaataaggccagcactcaagatgggcagccaagggtgcactgactattagctggcccataggatatctgtaaggctggtgggacagttttggacctggaatcatgtgtaactaacaaggttggacgtttcttccccatcagggtagaaaaatcatctcaaactagccaaaaggcagttttggaaactacattgggggacgttatttttatttatatatggggcctaggccaatccaggatggtagctggaataccttccttcttaaaatctgatcatggcagggatatgcagggcactttttactatttggccttctaagcagattgggaaggaggtattttctggttttcgctttcctccgacttaataggacttgccttctccctgggcagggagagaggctgggttggtgctctcccttactctactcatactgacttagagcctctggctgctgtttgggcatccaagaaagggaggggaaggaatgagctaaaaacaaaacagaatgaggtgggaaagggagattttcttctttacagaggaaaataggaaaccctccaagaattgtgcaagtaaagacatttgttgaatgcactgagtcccttggtgtagtagcaataaggaaaaatgaaattactttcctgtgcacacagtccagcctaattggtatgtgatgttgcacttagcagccatgtggtgggcatgtgtgactactctggttttcactttagtttctaaactttttatccctctcaagtccagcatggatggggaaatgtctctggatccccacagctgtgtacttgtttgcatttgtttccctttgagatttgtgtttgtgtcctgctttgagctgtaccttgtccagtccattgtgaaattatcccagcagctgtaatgtacagttccttctgaagcaagcaacatcagcagcagcagcagcagcagcacaattctgtgttttataaagacaacagtggcttctatttctaa

SEQ ID NO: 56190 - DNA, 4083 bp, Homo Sapiens; identical to SEQ ID NO: 30372

SEQ ID NO: 56191 - DNA, 7320 bp, Homo Sapiens; identical to SEQ ID NO: 23604

SEQ ID NO: 56192 - DNA, 3830 bp, Homo Sapiens; identical to SEQ ID NO: 30484

SEQ ID NO: 56193 - DNA, 3525 bp, Homo Sapiens
atcccggcagtcgtggctgcagcgctgaggcgagaggttggtgggtgtctccggccataatgacccaggctgagaagggtgatacggagaacggaaaggagaagggcggcgagaaggagaaggagcagcgcggcgtgaagcggcccatcgtgcccgcgctggtgccggagtcgctgcaagagcaaatccagagcaacttcatcattgtcatacatccaggttcaacaactttaaggattggtcgagccacagacactcttcctgccagcattcctcacgtcattgcccgaagacacaaacaacaagggcagcccctatacaaggacagttggctcctaagggagggactaaataaaccagaaagtaatgaacaaagacaaaatggccttaaaatggtggatcaagcaatatggtctaaaaagatgtccaatggtacaagacgcattcctgtgtcccctgaacaggcacgctcctacaataagcagatgcgacctgcaattttagatcactgttcgggaaataagtggacaaacacatctcatcaccctgagtatttagtaggagaagaggccttgtatgttaatccactggactgttacaatattcactggcctatcagaagaggtcagttaaatattcacccaggccctgggggctctcttacagctgttctggcagatattgaagtaatatggtctcatgcgatacaaaaatacttggaaatcccactgaaagatttaaagtattatagatgtatcttgttaattcctgatatctataataagcagcatgtgaaagaactagtgaatatgatactaatgaagatgggtttttcagggattgtggtccatcaggagtctgtgtgtgccacctatggaagtggcttaagcagcacgtgtattgtagacgttggggaccagaagacaagtgtatgctgtgtggaggatggggtgtctcatcggaatactcggctttgtctggcatacggaggatctgatgtgtcaagatgtttttactggctaatgcagcgagctgggttcccttacagagaatgccagttaacaaataaaatggattgtcttcttctgcaacaccttaaagaaactttttgtcatttagatcaggacatctctgggcttcaggaccatgagtttcagattcgacatcctgattctcctgccctgctttaccagtttcgattaggagatgaaaaactgcaggctccaatggctttgttttaccccgcaacttttggaatcgttggacagaaaatgacgactttgcagcacagatctcagggcgatcctgaggatcctcacgatgaacattacctgctggccacacagagcaaacaagaacagtctgcaaaagctactgctgaccgaaagtctgcatccaaacctattggatttgaaggggatcttcgtggccagtcctctgatcttccagaaagactccattcccaggaggtagatttggggtctgcacagggagatggcctgatggccggcaacgattccgaggaggccctcactgcactgatgtccaggaagactgccatctcgctgtttgaaggaaaagccctgggcctggataaagccatcctccatagcatagactgctgttcatctgacgacaccaaaaagaagatgtacagctccatcctagtggtgggaggtggtttgatgtttcataaagctcaagaatttctgcagcacagaattctcaacaaaatgccaccatccttcaggcgaattattgaaaatgtggatgtgatcacaaggcctaaggacatggacccccggctgattgcatggaaaggaggggcagtgttggcttgtttggatacaacacaggaactgtggatttatcagcgagagtggcagcgctttggtgtccgcatgttacgagagcgggctgcgtttgtgtggtgaatggggaggaaatgtcactgccgaagaccaaaaacaagcttcttggtataaaagactcttacagaatatgtgtattgtaatttattgatctggatgcttaagtgtcatggacagtaaatgaatttgaactttatgttgaggacatgacattggtttgaaaatataaactgcttttgagcagtttagtcagggcatttgagaataaataggaactttctcttcagttgtaaactctcttgccctctctcagggtctcataaactccccagtgatgtaaacgttgctattgaaggttctcatgtggtgaagcccttcatttaagttggcttgaatctcatcagcaggcagcctcatgcaaccatgagggatagtatgtgacgagggagaactgtccactcatgccattttctctcttgtctagtatttcattaggatctaaagttgtctgagttaaatgcacttatgtgactcatgtgtcctcttagaatcccaaatagggggaaaaagttttggtggtttttgttttttttttcattttctgttggattacagaaaaagaatgggacccattcaggtctcgatttccaaaggtaaagatggaaggctgggcagactggcttttgttacctgacatgccgtagggtgagcttagaggaagaaagaaaacaatttttatttggccaaaacagaacaaatgctgaaaaggaaatcttgtttttttcctaaagccaaatagaaatgatttgggtataatttaagagtccttgtgttgtacagatatggtgactgatgtagttattaatactaccaacttagtcatcaagcctcaattttcctttacctgaaggattaagtgaaagcttttggagttcatgatgttcagtatgatcagttaaccttaacctctgagcatcctgaagcaaaatctaaataatgcagctattaccactggtggtccaggctctggtgaagccctctgagcccaggaggaagagaaagcattgtccagaggtaggaacacagtctgggagcccagagctctgggaggagtgggaaaatgctgcttcctgctgcttgcttctaggcacctgcttccgccatctcacttaccatggctagagatgggggtgagactggggaaggacaaaagcagggaacagataagggatggaaatcagaagggaatatagaaagaactctggatgtggagaaatgccggtacctgagcattttgtatcaatgggagtaccctctgtaactgctcagtaggttacaaatgaagagtccaccagtattagaaacaatttaaacttgccagtaccaactgggatgtgtgccttcaatttgaaaattgtatgttttattttttaaatttgttaacagcattaatttatagagtattgatgtcatttatgtttctgaggtgtttcaacacaattttggatcagctgcctgtttgcaaaaacataatatatttctgttaaacagttcttcacctaacagcatattgctcttataactggtagagctgtttcaaaggaagttggtttctggtccaagttttgacctaaaccatgtccatcttctatta

SEQ ID NO: 56194 - DNA, 5078 bp, Homo Sapiens
gataaggtggcggcggcgaaggcagcggcaggtcgggagcaagatggcgctgcggccaggagctggttctggtggcggcggggccgcgggagctggcgcggggtccgccgggggaggcggcttcatgtttcctgttgcaggtgggataagaccccctcaagcaggcctgatgccgatgcagcaacaaggatttcctatggtctctgtcatgcagcctaatatgcaaggcattatgggaatgaattacagctctcagatgtcccaaggacctattgctatgcaggcaggaataccaatgggaccaatgccagcagcgggaatgccttacctaggacaagcacccttcctgggcatgcgtcctccaggcccacagtacactccagacatgcagaagcagtttgccgaagagcagcagaaacgatttgaacagcagcaaaaactcttagaagaagaaagaaaaagacgccagtttgaagagcagaagcaaaagctcagacttttgagcagtgtgaaacccaagacaggagagaagagtagagatgatgctttggaagccataaaaggaaatttagatgggttttccagagatgcaaaaatgcaccctactccagcatcgcaccccaagaaaccaggcccttccttggaggagaagttcctagtatcttgtgatataagtacatctgggcaggaacaaattaaattaaatacttctgaagttggccacaaagccctaggcccaggttccagtaagaagtatcccagtttaatggccagtaacggggttgctgtagatggatgtgtaagtggtaccaccactgcagaggcagaaaatacttcagatcaaaacctgtcaattgaagagagtggtgtgggagtatttccctcacaggatcctgctcagcccagaatgcctccttggatttacaatgagagtttggttccagatgcctataagaaaatcttagaaaccacaatgactccaactggaatagatactgccaaactgtatcccattctgatgtcatctgggcttcccagggaaactcttggacagatatgggccttagctaatcgaactacacctggcaaacttacaaaagaagaactttataccgttctagccatgatagcggtaacacagaggggcgttcctgcaatgagtcctgatgctttaaaccagttcccagcagctcctattccaactttaagtggcttttctatgactctgcctacaccggtgagtcagccaactgtgataccttcaggtcctgcgggctccatgcccctcagccttggacagccagtcatgggcattaaccttgttggaccagtgggtggagctgcagcccaggcttctagtggtttcataccaacctaccctgcaaatcaggtagtaaagccagaagaagatgacttccaggattttcaagatgcttctaagtcaggatcccttgatgactcattcagtgatttccaagagttgcctgcttcttcaaaaacaagtaactcccagcatggaaacagtgccccttctttgttgatgccacttcctggaactaaagcattgccttcaatggacaaatatgctgtgtttaaaggaattgcagctgacaagtcctctgaaaatactgttccacctggagatcctggtgataaatatagtgctttcagagaacttgaacagacagcagagaataaacctttaggagaaagctttgcagaattcagatctgcaggaactgatgatggtttcaccgattttaaaacagccgatagtgtatcaccactagagccaccaacaaaagacaaaacttttccaccatccttcccctcaggaactatacaacagaaacaacaaacacaagtgaaaaaccctctgaacttagcagacctagatatgttttcctcagttaattgcagcagcgagaaaccattgtctttttcagctgtgtttagcacatcaaaatcagtttctacaccacagtcaacaggttctgctgctactatgacagcattggcagcaacaaaaacttctagtttggctgatgattttggagaattcagcctttttggggaatattctggtctagcacctgttggggagcaggatgactttgcagattttatggctttcagtaatagctctatttcatctgagcaaaagccggatgacaaatatgatgcccttaaagaggaagccagtcctgttcctctaaccagcaacgtgggcagcacagtgaagggtggacaaaactcgactgctgcgtctaccaagtacgatgtcttcagacaactttctctggaagggtctggactaggtgttgaagacctgaaagataacactccttcaggaaaaagtgatgatgattttgctgacttccactccagtaaattttcttccataaactcggacaaatccctgggagagaaagcagtggctttcagacacaccaaagaagactctgcatcagtgaagtccttagatctcccttccattggtggcagcagtgttggcaaggaggactctgaagatgcactctctgttcagtttgacatgaaattggctgatgtgggaggagatcttaagcatgtcatgtctgatagctctttggatttaccaacagttagtggccagcatcctcctgctgcagatatagaggacttaaaatatgctgcttttggaagctacagtagcaattttgcagtgagcacacttacaagctatgactggtcagacagggatgatgcaactcagggcagaaaactctctccatttgtcctctcagcaggaagtggatccccctcagccacctcaattcttcaaaagaaagagacttcatttggcagttctgaaaacatcaccatgacatctctctccaaagtaacgacctttgtaagtgaagatgctcttccagagaccaccttcccagctcttgccagttttaaagacacgattcctcagaccagtgagcaaaaggaatatgaaaacagagactataaagatttcacaaaacaggacctgcctacggctgaacggagccaggaggccacgtgtcccagcccagcgtccagtggtgcctctcaagaaaccccgaacgaatgttcggatgactttggagagtttcaaagtgaaaagcccaaaatcagcaaatttgacttcttagtagccacttcacaaagcaaaatgaaatccagtgaagaaatgatcaaaagtgagctggcaacctttgacctttctgttcaaggatcacacaagaggagtttgagccttggtgataaagaaataagccgttcttctccttctccagctttggagcagcctttcagagaccgttccaatactctgaatgagaagcccgccctgcccgtcatccgagacaagtacaaagacctgacgggagaggtggaggaaaatgagagatatgcatatgaatggcagagatgcctggggagtgccctgaatgtcattaagaaggcaaatgataccttaaatggaatcagtagtagttctgtttgcacagaagtaattcagtcagctcaaggcatggaatatttattaggtgttgttgaagtgtacagggtaaccaagcgtgtggagctggggataaaagccactgcagtgtgcagtgagaaactccagcagttgctgaaggacatcgataaagtatggaataacctaatcggcttcatgtcactcgccacactcacaccagatgaaaactcgctggatttttcctcctgtatgttacggcctgggattaaaaatgctcaggagcttgcctgtggagtgtgcctcttgaatgtggactcgaggagccgggcattcaactcagaaacagacagtttcaagctggcctatggagggcaccagtatcacgccagctgtgccaacttctggatcaactgtgtcgaaccaaagcctcctggcctcgtcctgcctgacctgctctgaacaactcctctgtgaagcattgacttttttttttctgtgacaccccacggggtgacagggaccaataaatagaatgcgagcactgcacagttcgcttccctgaatcgatatgaagaacaccgcaagggacggggcccccgtcatccccacggccagtctgcaggacttcaggtaaaattgtcccacccaaactgcacgtggcaccagaagcttgctcacttatctctacttaagattttctgaaatacggaccacggctttcttgatctaaggaagaacttgctgctgcagtattgaaactgtgaagaactgacatttgaagaaaaatagattaccgttgcgggactagaatgggcgactgcttggagccagtgcttgtttttatctaggacacttactgtcctgtgaagtagaatacatttatctgcatttagtttgttaatgtctgaaatgaataaaaagaggaaattgcgattaaactgatgttctgctttttatggagaagattctgcccatctcccctggacagtagcaggcaggtgagggcagattttacccacttggttgtcacaactgaaccagttctctactccttcccttcacttctgtccactctcaagactttttcccaaaacatgcctgggcactctgcagccgtgaagaatgctcattttgacagaggcccaaatcctgtgtattaggataatatccttccccccgggagccttcgctgcaaacctgttctgccgcatgcaaagactgtgaccatggagttttctcagacaagatttggaaaggcagtggaatgaaatctctttgcagtggcctctctccaaatttccaaagatgactgcatagggaccaacactgcctgactttgcagtatctgtgagaaaaacctgaaaattaattcagggtgaaaatgtggagctctcggcctagtgtaaagtatcaagatgtatatttatgggatagatacatgacttagaagaagtagaagaaaattgtccagaaacagtactgaattttagatagaaaaggctcatgcttcctggagtagggaattgtctttgccatttaatgtgaatgcataaaattaggggaaaaaccaaaaaaaaaaaaaaaa

SEQ ID NO: 56195 - DNA, 2984 bp, Homo Sapiens
ggaggcgggcgcaggaggcgcgtgctcagtgtgctgggtaccaggcgactccgggacagggggtctcggccgtcggcgtcatggtttcgcgcgtgcagctcccgcctgagatccagctggctcagcgcctggcggggaatgagcaggtgacccgggaccgggcggtgaggaagctccggaaatacatcgtcgccaggactcagcgggccgcaggtggttttacgcacgacgagctgctgaaggtgtggaaaggactgttttattgcatgtggatgcaggacaagccactcctccaggaagaattaggaaggactatttcccagctcgttcatgcttttcagaccacggaggcgcagcacctgttccttcaggccttctggcagaccatgaatcgcgagtggacgggcattgacaggctgcgcctggataaattctacatgctcatgcggatggtcctgaacgagtccttgaaggttctgaagatgcaaggctgggaagaaagacagatcgaggagctgctagagctgctgatgactgagatcctgcaccccagcagccaggcccccaacggtgtgaagagccacttcatcgagatcttcctggaggagctgaccaaagtgggcgccgaggagcttacggcagaccagaacctgaagttcatcgaccccttctgcagaattgctgcccggaccaaggattccttggttttgaacaacatcactcgaggcatctttgagacgattgtggagcaggccccgcttgccattgaagacctcctgaatgaactggacacacaggatgaggaggtggcgtcggacagtgatgagtcctctgagggtggtgagcgtggagacgcgctgtcccagaagaggtctgagaagccgcccgcaggctccatctgcagggctgaacctgaggctggtgaggagcaggcaggtgacgacagggacagtggcggccccgttctccagtttgactacgaggcagttgctaacagactgtttgaaatggccagccgccagagcaccccttctcagaacagaaagcgtctctacaaagtgatccggaagctgcaggacctggcaggaggcattttccctgaagatgagatcccagagaaggcctgcaggcgcctgcttgaagggaggcggcagaagaagacgaagaagcagaagcgtctgctcaggttgcagcaggagagagggaaaggtgagaaggagcccccgagcccgggcatggagaggaagaggagcaggaggaggggtgtaggggccgaccccgaggcgcgggcagaggctggtgagcagccaggcacagctgagcgggccctgctccgagatcagcccaggggccgtggccagagaggggctcgccagagaaggaggacacctcggcccctgaccagtgcccgagcaaaggcggccaatgtccaggagccggagaagaagaagaaacgcagggagtgatgtggccgggccaaggacaggcagggagggaggccaggcctcgcttgcaccgcgggacgaggctgaccgggctgttctgtagactcaggaccgtggctccagaactcctgtgccaggcgggagggaagggcggcactggagagatgggcccatcattaggggccagcatcccaggaactggacctttccccagagcctccgcctgtggctgtgatgaccttgggccagaaggtcaaactccgaagactgaaactctgcctgcagcaggactggccgcccctgctgtggggggttcagaaaataaaatgccgcgcagcccttgccagggaagtgtcgcttcgggtgtgtcctacggacgtgtgggaggtggcaggcgccagcctccgagcagtgtggtggtttatattcatgtttgtggaaaaatcttgcaagacatttctcctttcacagaactgcccaggtgttaacagggctgtctggacggggctcttttgcttccccctcaatctggggtctagagttgtgcagggaattcagctccagtaaggcctggattgcccggggtgagcgtgtgtgtggtgggaagacctggcttccgcgagagccttgttcctggaggcaggagcgccccgccatcctgggtacccgcgggtccgcaggctgcgcacctctttccctcagccaggtcaccctcagcgtcctccctgcccctctccccttcacacctgctggagcctgtgagggaggtggcgggtccccactgtggcgacggagagctgacagtagcccagggctttccacctgcatggaacaagggcctgtctgccgccagcgctgtggccacagcctgcataggtgacaaggggccgctgcgttgggttttgcccgcatcttctgttccatgggtgcccagccagccaggccgtgtgggatccagcgagaggccagggcttggagtgggcctgggaccaggaaggacctctaggctgtggctggccttgtgcagaccctggactgcatccggttccccaaagccctgctgcattcgagtgtcccccaaccccgggcaggtggcacctggtgacacctccttcagtcccactcagctgggcggccggggcaggcttagggcacagttaggggccaaggagagggaaggccagggcccctgttctaggggttagggttctttccccaaaggaacttaaaaagacaagcgtggccaggcacagtggctcacacctgtaatcccagcactttgggaggccgaggtggccagatcacctgaggtcaggagtttgagaccagactgaccaacatggagaaaccccatctctactaaaatacaaaattagccaggcgtggtggcacatgcctgtaatcccagctactcgggaggctgaggcaggagaattgcttgaacctgggaggcagaggttgtggtgagctaagatcacgccattgcactccagcctgggcaacgagagggaaactctgtttcaaaaaaaaaaaaaaaaa

SEQ ID NO: 56196 - DNA, 2264 bp, Homo Sapiens
cgcgtggcggcggtggcggctgcggcaacagcggggccgatgtgtagttggtgactgcctctccagatgctgaggtgcctgtatcattggcacaggccagtgctgaaccgtaggtggagtaggctgtgccttctgaagcagtatctattcacaatgaagttgcagtctcccgaattccagtcacttttcacagaaggactgaagagtctgacagaattatttgtcaaagagaatcacgaattaagaatagcaggaggagcagtgagggatttattaaatggagtaaagcctcaggatatagattttgccaccactgctacccctactcaaatgaaggagatgtttcagtcggctgggattcggatgataaacaacagaggagaaaagcacggaacaattactgccaggcttcatgaagaaaattttgagattactacactacggattgatgtcaccactgatggaagacatgctgaggtagaatttacaactgactggcagaaagatgcggaacgcagagatctcactataaattctatgtttttaggttttgatggcactttatttgactactttaatggttatgaagatttaaaaaataagaaagttagatttgttggacatgctaaacagagaatacaagaggattatcttagaattttaagatacttcaggttttatgggagaattgtagacaaacctggtgaccatgatcctgagactttggaagcaattgcagaaaatgcaaaaggcttggctggaatatcaggagaaaggatttgggtggaactgaaaaaaattcttgttggtttacctgctaatgcaagtttagaagaatttgacaaagtcagtaaaaatgttgatggtttttcaccaaagccagtgactcttttggcctcattattcaaagtacaagatgatgtcacaaaattggatttgaggttgaagatcgcgaaagaggagaaaaaccttggcttatttatagttaaaaataggaaagatttaattaaagcaacagatagttcagacccattgaaaccctatcaagacttcattatagattctagggaacctgatgcaactactcgtgtatgtgaactactgaagtaccaaggagagcactgtctcctaaaggaaatgcagcagtggtccattcctccatttcctgtaagtggccatgacatcagaaaagtgggcatttcttcaggaaaagaaattggggctctattacaacagttgcgagaacagtggaaaaaaagtggttaccaaatggaaaaagatgaacttctgagttacataaagaagacctaaaactgatggctactaaaaagcagagcatttctggtaagactaaattttctcccctccctcttaatgaggttttagagactacaccagaataaaagacagtttaggggacctctgtagaacaacaagggtcttattttgtgaattatatatttcaagaactaaacagagatccacctttctggatctgatttatatcactgaaatgtacagttcttttggaatagtttcacctgagaaaacatagttggctattatctatcttaacctgttcaggcttttaaaaaaaactgtttttgcatagggtagtactaagatcttaaaaagtggtaactgtcttgaagaaaaaacgtttattgtttgtttgcaattgaaataacagggttaccttaacaatgactgtctatgatgtgtcagttcttatctgaattccaaaataaacctgtgcttaaaaaagaaataattgaccaagtaagtttgcataaaatgtgaatactaaatgtgtccccagttgctggcattcatatgtacaggatttgttctagcaagctatgcttcagtatgtggttgatatttttctgtcacaatgatttctttatgcatgcagagcctgggaaagtcatgggattaacttgagggtcactattgagcctattaattaattaattattgttttaataaaacaaacattggtattggaagataaatatgtttatgtggtatctgacaatgtgtattaggtgtcatatacaatggtaatatgcctgtctttaaagtgttattttattaattaaaaggatatggctattattatatattctctaaagatttattctctaaagatttgagtcctaaatgctttcatcaggtaaataaaatgtataatacaaaaaaaaaaaaaaaaaaaaaaaaaaaaaaaaaaaaaaaaaaaaaaaaaaaaaaaaaaaaaaaaaaaa

SEQ ID NO: 56197 - DNA, 3228 bp, Homo Sapiens
ggcgtgagcggcgaaagccgggagggcgagcgagagagcaagcaggcagcaggctgccggcgggcgggcggacggcacagagggagggagcgagcgagcagtgagtaagccagcaagggcggtcgggtcccgaggtcagccgagatttctcaggtccctccggccccctccctggagtccacagcgcctccggtgtccagaggatcggacacggcccggcccggccatggcctcgttgctgaaggtggatcaggaagtgaagctcaaggttgattctttcagggagcggatcacaagtgaggcagaagacttggtggcaaattttttcccaaagaagttattagaacttgatagttttctgaaggaaccaatcttaaacatccatgacctaactcagatccactctgacatgaatctcccagtccctgaccccattcttctcaccaatagccatgatggactggatggtcccacttataagaagcgaaggttggatgagtgtgaagaagccttccaaggaaccaaggtgtttgtgatgcccaatgggatgctgaaaagcaaccagcagctggtggacattattgagaaagtgaaacctgagatccggctgttgattgagaaatgtaacacgccttcaggcaaaggtcctcatatatgttttgacctccaggtcaaaatgtgggtacagctcctgattcccaggatagaagatggaaacaactttggggtgtccattcaggaggaaacagttgcagagctaagaactgttgagagtgaagctgcatcttatctggaccagatttctagatattatattacaagagccaaattggtttctaaaatagctaaatatccccatgtggaggactatcgccgcaccgtgacagagattgatgagaaagaatatatcagccttcggctcatcatatcagagctgaggaatcaatatgtcactctacatgacatgatcctgaaaaatatcgagaagatcaaacggccccggagcagcaatgcagagactctgtactgaggccagggccagggccaggggactctgtgagtctggctcaagaccgacattgccttggtttgttacatgactatcgtgatggggaaactggctggaaatagtaatcacacctctctgtttttagttagagtctaatgaaactctcatctagttctgtgatgtgtttacctcttttttcaggcctcaggaactcttctatttccttccctaataccccacacccaacctgtcgtaatttctggagaactccaggtttgtgtgtgcaggatgttggcacaaaaatacctgtgttttcattctccccctctctccctcctgtgtcttgcgctttatgttttcttccgtttgataattagttggttaaaagctgagggaaccggaaggaaagtgctaggtgttttttaggaactagggtggcggggggacgaacttctcttcctcacatgaggttactgtttctttcctctgtggggcattggatcctcccacagttgccctggtgatgacttagggcttcccatctgtgtacatcccactttgaatcttgatcgtgacaagaaataccttaggccttcagtcaattccgaagctccttcagttgtttttataatgggcgttttcacatgcacatatgtgtatgcatgtatacgcccatacagacatgcacacacagactcctactccattagctaacataccctccctctccacaacccctgtcacatacctttcaggaggtgacagttgtcttagttgtcatctacccagacaaacgtcctgggcccgtcctccctcctgatactgtagcctcttggtacccagggtgagttggtggagaacagagagatgagaagcagagggcttggggaaagcctgttcctctctgactcagccctttttggcattattgcaagagcttgactcctggttgccttttcccagccagttttcagttggggtgaaggtttctgcaagtgtgaggtccagatgctgctgctcatgttgggctttccttttgggaactatttctctttatttatagtgtcgggcttccggggaaagcaatcattggtgtgtatgtgtatgtgcatgcacacacgtgcatatacacatttgtgtatgtggaaatgtgctgggcaagtcaaaactatagaagagttgcctcctgtctctcgaatcttccagagatatcacttaattgttaacagcttttgtgttaatccccttcagcccctagctcttttattctaccacggctggagagttgatacctgcagtcagcctgccagtgactcttagtgtctgtttctgacttatttttcctgtctctgtcttccaacccccaataatatttccaccggggatgcatcatttttactcccaatattctgtagagagggagtcaggatgctgtcttcccacgaatagtactcagtaacaaaccaattgcattttagttgggcagtgctcccacccaccctccagatcccttccagctaaaacccttcccccttccctccatgtgtttctcagtttcccgtttcgtttgttggactgttccactgcccctcctcctcaccctatcacccatggatcgtaatgtaaaattcttttaccatgtcaagaaattattaaaaatacaggtactttgacctctttctaaagccgcagaccctggtgcaatgctctggtggctagggatgtactcatgctcatatgtgtgcacgcttggacacccacctccatggacacctagccaccctgttgtgtgtccttatgccagttgagctgaatcttttccccagtatagtggaaagactgaggcttctgcctactgagcaaggttgggtgcttcatttgtgttcagtctgaattatgggaaagttagctcttcccagacctaagctgccttctctccctactttcagaagatcctagttccttccttcccgagtgatacccatgaactgccagtagaggctgctatcgttccatgtgtaaggaatgaactggttcaaggcgcgtcctacccagtcattttctttaccttatactaattcttcctgaataatgtcttcagtttcttgaggagactcctagttttggttttcaaattacttggagggctgcctaggaatctatctccctctgaaataaagtttcctcatcttccaccttgcaaaaaaaaaaaaaaaaaa

SEQ ID NO: 56198 - DNA, 3828 bp, Homo Sapiens; identical to SEQ ID NO: 30728

SEQ ID NO: 56199 - DNA, 2477 bp, Homo Sapiens
gcagaggtgcggccggggaggcgcgcggaggctggagctggaggcgcggcgccggtgagctgagaaccatgtgtgctcagtattgcatctcctttgctgatgttgaaaaagctcatatcaacattcgagattctatccacctcacaccagtgctaacaagctccattttgaatcaactaacagggcgcaatcttttcttcaaatgtgaactcttccagaaaacaggatcttttaagattcgtggtgctctcaatgccgtcagaagcttggttcctgatgctttagaaaggaagccgaaagctgttgttactcacagcagtggaaaccatggccaggctctcacctatgctgccaaattggaaggaattcctgcttatattgtggtgccccagacagctccagactgtaaaaaacttgcaatacaagcctacggagcgtcaattgtatactgtgaacctagtgatgagtccagagaaaatgttgcaaaaagagttacagaagaaacagaaggcatcatggtacatcccaaccaggagcctgcagtgatagctggacaagggacaattgccctggaagtgctgaaccaggttcctttggtggatgcactggtggtacctgtaggtggaggaggaatgcttgctggaatagcaattacagttaaggctctgaaacctagtgtgaaggtatatgctgctgaaccctcaaatgcagatgactgctaccagtccaagctgaaggggaaactgatgcccaatctttatcctccagaaaccatagcagatggtgtcaaatccagcattggcttgaacacctggcctattatcagggaccttgtggatgatatcttcactgtcacagaggatgaaattaagtgtgcaacccagctggtgtgggagaggatgaaactactcattgaacctacagctggtgttggagtggctgctgtgctgtctcaacattttcaaactgtttccccagaagtaaagaacatttgtattgtgctcagtggtggaaatgtagacttaacctcctccataacttgggtgaagcaggctgaaaggccagcttcttatcagtctgtttctgtttaatttacagaaaaggaaatggtgggaattcagtgtctttagatactgaagacattttgtttcctagtattgtcaactcttagttatcagattcttaatggagagtggctatttcattaagatttaatagttttttttggactaagtagtggaaaaacttttatacttaactgagacattttgtcaaggctaaaaaaaagtcttgcaaaatggggcagtggactgacaggctgacatagaaaataaactttgcccaatcacaacttgtgcctcccatccctggagtactgactggcaccggtaagacagaatctctctgaatccattactccatgcccccttgaggcactgttgaagaaatctcacttttcagccagggtactggttctggtacatatggatcataagtccatttggggaagactcgtttatacaggttcatcagtactgtgtcttgagattttagcttcccatcaaagctgcatttcatgtggccatgggtacctagaaagacatcagaacaagtcggtcaaattaaaagtagaaaattttaaagcaatgacttccaacccaacagtcatttagcaacactgcagaaatgcagacatggtctcaaatcccgtgtttccttacctaaaggttccttgatatgtcctctccggccccacttcgttctcagttccactggtttaaaccacagcacatcctcttagaatcaaacacattaaagaccaagatgaaacatttacccacaaaatgtaaacccaacctttataccacaaaggcaatcagatcccatcctcctccttcatacccacctctgttgaagaacatgtaacgtactactgccatcttagtaaaaattttgaaaggatgaccactcagaacaactctcttgatgaccattctgtctggatctactgacataagatggcctgtagcaatgaggctgtgcattcctaaaggacaaaagcaaagaagctatttaggaatttacaggccaaagtcttcatttattgcccagtccatttaaagacccatgcaagagcctggtttgtcatccctgccctagcccaatctgaggctaagattggtaaactgtaagcccacacttaaccttgtcaataggttcttgaaaacttgtacttcaagagaaatgatgtataacaaaaccatactttttctcatcagttgttacaaggaaaggatgttgaacaaaaggcagttatttgaggactggctatacactgtttcacgtaaaagttggagttttcattgttctattaacaatgttaaatgaagacttactgtattttgaaaaccatcattaccttctccataccatttggctcccaaatttaaataaacaagagaaaacggtgttcatct

SEQ ID NO: 56200 - DNA, 3977 bp, Homo Sapiens
gaggtgggctgtgtgcagtaaactggaatgctctccctcgctcactcctcagtgtaggagtgatctgaagcaggacaagctcagcctgcagctgccgtgggctttgtgtggactggacgcagagcttgggagacgggggagggctattactccaattcactgtcaatggaattacagctatagcggcagtgtatataggattgctttttctcgtcttcctggagatgctcagtcccagtatattttaaggaagagaaatataaaggaaatttagtatgcctccttttctttaaatgaagaatttagtttcctttacttcttaaaagagaatacctgttcttgtataacgtgactgcaccagacattctgaaaaatcagcaagaagcaaaagctggaaatagctatttcacagcagggttctgaagtaacggaagctaccttgtataaagacctcaacactgctgaccatgatcagcgcagcctggagcatcttcctcatcgggactaaaattgggctgttccttcaagtagcacctctatcagttatggctaaatcctgtccatctgtgtgtcgctgcgatgcgggtttcatttactgtaatgatcgctttctgacatccattccaacaggaataccagaggatgctacaactctctaccttcagaacaaccaaataaataatgctgggattccttcagatttgaaaaacttgctgaaagtagaaagaatatacctataccacaacagtttagatgaatttcctaccaacctcccaaagtatgtaaaagagttacatttgcaagaaaataacataaggactatcacttatgattcactttcaaaaattccctatctggaagaattacatttagatgacaactctgtctctgcagttagcatagaagagggagcattccgagacagcaactatctccgactgcttttcctgtcccgtaatcaccttagcacaattccctggggtttgcccaggactatagaagaactacgcttggatgataatcgcatatccactatttcatcaccatctcttcaaggtctcactagtctaaaacgcctggttctagatggaaacctgttgaacaatcatggtttaggtgacaaagttttcttcaacctagttaatttgacagagctgtccctggtgcggaattccctgactgctgcaccagtaaaccttccaggcacaaacctgaggaagctttatcttcaagataaccacatcaatcgggtgcccccaaatgctttttcttatctaaggcagctctatcgactggatatgtccaataataacctaagtaatttacctcagggtatctttgatgatttggacaatataacacaactgattcttcgcaacaatccctggtattgcgggtgcaagatgaaatgggtacgtgactggttacaatcactacctgtgaaggtcaacgtgcgtgggctcatgtgccaagccccagaaaaggttcgtgggatggctattaaggatctcaatgcagaactgtttgattgtaaggacagtgggattgtaagcaccattcagataaccactgcaatacccaacacagtgtatcctgcccaaggacagtggccagctccagtgaccaaacagccagatattaagaaccccaagctcactaaggatcaccaaaccacagggagtccctcaagaaaaacaattacaattactgtgaagtctgtcacctctgataccattcatatctcttggaaacttgctctacctatgactgctttgagactcagctggcttaaactgggccatagcccggcatttggatctataacagaaacaattgtaacaggggaacgcagtgagtacttggtcacagccctggagcctgattcaccctataaagtatgcatggttcccatggaaaccagcaacctctacctatttgatgaaactcctgtttgtattgagactgaaactgcaccccttcgaatgtacaaccctacaaccaccctcaatcgagagcaagagaaagaaccttacaaaaaccccaatttacctttggctgccatcattggtggggctgtggccctggttaccattgcccttcttgctttagtgtgttggtatgttcataggaatggatcgctcttctcaaggaactgtgcatatagcaaagggaggagaagaaaggatgactatgcagaagctggcactaagaaggacaactctatcctggaaatcagggaaacttcttttcagatgttaccaataagcaatgaacccatctcgaaggaggagtttgtaatacacaccatatttcctcctaatggaatgaatctgtacaaaaacaatcacagtgaaagcagtagtaaccgaagctacagagacagtggtattccagactcagatcactcacactcatgatgctgaaggactcacagcagacttgtgttttgggttttttaaacctaagggaggtgatggtaggaaccctgttctactgcaaaacactggaaaaagagactgaaaaaaagcaatgtactgtacatttgccatataatttatatttaagaactttttattaaaagtttcaaatttcaggttactgctgcgattgatgtagtggagatgcctgaacacaattctatattttagtattttttagtaatttgtactgtattttccttgcaaatattggagttataaaccatttactttgtgttctactgagtaagatgacttgttgactgtgaaagtgaattttcttgctgtgtcgaacaatcaggactgcattcatatgagatccttgtagtataagcacaggccatttttcactttggtattaataaaatgtaaaaaaaaaaaactggctgaatggctgaatgagataaaatttaattttaaaaaatggttatgaaataatgttccaattattaaatttgtattatcccagtggtattcaataaatcaaaatgtgtgaagtaatgggcaatatcaaacttcctgcatatctccatttttgctctaggcaaattaattatccttaaaaaagttaagcatatcttctgaactgaatacatcagctggcataaaaggagcatgaagtctgttaaagccattgtcagcaaagctttgaaaataaaggacttcacaaaaacggtaatgtaaatgtgcttccaagttggggggaaaatgtgtacttaggaaaacatggaaacttagacttgtatagtgtaatgaacacaaataccaaaactgcattttggttttgcctataccatcctgatttttgaaaagtgaattataaacacaaaattgttagtgtttatgatgtttttatcataaaggatgtcagagaaactttatgcatattaaaaatgtaatgtaattataagcgattcccctcaacaatccagagaaagtagttctttaaataagagataatttaaagaaaaataaatactagacatcaaatttagatctggtttatgtcaaaggttttaacactgtacataaatgttcaatttacttttacaaagatcaagaatactgcccattactgtcacaattttccagatattatataatgaactcgtaatgtaacatttccttctagcttcctactgaattgtgagctgttacttgttgaaaaaccatatcacttttctgttgccatgattttttttttttcaacaaaaaaccaaagtgcattgtacgccctttggccagtcttgtatgtgccttgatccaacgctacatgtattcagcttttaaaactccacaaatttttcatactccttaaatatgaaaaattatggtcttattgctgaataaaacttttaaaaagtacagaataattgtgcttgctttttcaggattgtgttactatcactaagtagcaaattgcccagcacattagtcctaaacgtcccatgtatttttctaggcataaaaataaaagttggctaaaaattttaaaaaatc

SEQ ID NO: 56201 - DNA, 1756 bp, Homo Sapiens
aggaagtgctctcggtgtatttcctgtggtgggttcacacgcagctagacacagctaacttgagtcttggagctcctagagggaagcttctggaaaggaaggctcttcaggacctcttaggagccagagaagaggacgttgtcacagataaagagccaggctcaccagctcctgacgcatgcatcatgaccatgagacacaactggacaccagacctcagccctttgtgggtcctgctcctgtgtgcccacgtcgtcactctcctggtcagagccacacctgtctcgcagaccaccacagctgccactgcctcagttagaagcacaaaggacccctgcccctcccagcccccagtgttcccagcagctaagcagtgtccagcattggaagtgacctggccagaggtggaagtgccactgaatggaacgctgagcttatcctgtgtggcctgcagccgcttccccaacttcagcatcctctactggctgggcaatggttccttcattgagcacctcccaggccgactgtgggaggggagcaccagccgggaacgtgggagcacaggctgggctgagggcaaccttgccccccacccaagaagccctgccctccagccacagcagtccacagcagcagggttaagactcagcacagggccagcagcagcacaaccttgaccagagcttgggtcctacctgtctacctggagtgaacagtccctgactgcctgtaggctgcgtggatgcgcaacacaccccctccttctctgctttgggtcccttctctcaccaaattcaaactccattcccacctacctagaaaatcacagcctccttataatgcctcctcctcctgccattctctctccacctatccattagccttcctaacgtcctactcctcacactgctctactgctcagaaaccaccaagactgttgatgccttagccttgcactccagggccctacctgcatttcccacatgactttctggaagcctcccaactattcttgcttttcccagacagctcccactcccatgtctctgctcatttagtcccgtcttcctcaccgccccagcaggggaacgctcaagcctggttgaaatgctgcctcttcagtgaagtcatcctctttcagctctggccgcattctgcagacttcctatcttcgtgctgtatgttttttttttcccccttcactctaatggactgttccagggaagggatgggggcagcagctgcttcggatccacactgtatctgtgtcatccccacatgggtcctcataaaggattattcaatggaggcatcctgacatctgttcatttaggcttcagttccactcccaggaactttgcctgtcccacgagggagtatgggagagagggactgccacacagaagctgaagacaacacctgcttcaggggaacacaggcgcttgaaaaagaaaagagagaacagcccataatgctccccgggagcagaggccactaatggagagtgggaagagcctggaaagatgtggcctcaggaaaagggatgagagaaaggaggtggtatggaagactcagcaggaacaaggggcttgctcaccaccttctccctggagagggcagaagaggtcacacgcagagactgctactacatcttactcacctgccaaggcttggtggccaacacccagaggaacaaattaaggaccgggaattaattcccaggggctccctggtgcccaaaggacaagagcttcca

SEQ ID NO: 56202 - DNA, 3069 bp, Homo Sapiens
tgtttccgctgcatccagacttcctcaggcggtggctggaggctgcgcatctggggctttaaacatacaaagggattgccaggacctgcggcggcggcggcggcggcgggggctggggcgcgggggccggaccatgagccgctgagccgggcaaaccccaggccaccgagccagcggaccctcggagcgcagccctgcgccgcggaccaggctccaaccaggcggcgaggcggccacacgcaccgagccagcgacccccgggcgacgcgcggggccagggagcgctacgatggaggcgctaatggcccggggcgcgctcacgggtcccctgagggcgctctgtctcctgggctgcctgctgagccacgccgccgccgcgccgtcgcccatcatcaagttccccggcgatgtcgcccccaaaacggacaaagagttggcagtgcaatacctgaacaccttctatggctgccccaaggagagctgcaacctgtttgtgctgaaggacacactaaagaagatgcagaagttctttggactgccccagacaggtgatcttgaccagaataccatcgagaccatgcggaagccacgctgcggcaacccagatgtggccaactacaacttcttccctcgcaagcccaagtgggacaagaaccagatcacatacaggatcattggctacacacctgatctggacccagagacagtggatgatgcctttgctcgtgccttccaagtctggagcgatgtgaccccactgcggttttctcgaatccatgatggagaggcagacatcatgatcaactttggccgctgggagcatggcgatggatacccctttgacggtaaggacggactcctggctcatgccttcgccccaggcactggtgttgggggagactcccattttgatgacgatgagctatggaccttgggagaaggccaagtggtccgtgtgaagtatggcaacgccgatggggagtactgcaagttccccttcttgttcaatggcaaggagtacaacagctgcactgatactggccgcagcgatggcttcctctggtgctccaccacctacaactttgagaaggatggcaagtacggcttctgtccccatgaagccctgttcaccatgggcggcaacgctgaaggacagccctgcaagtttccattccgcttccagggcacatcctatgacagctgcaccactgagggccgcacggatggctaccgctggtgcggcaccactgaggactacgaccgcgacaagaagtatggcttctgccctgagaccgccatgtccactgttggtgggaactcagaaggtgccccctgtgtcttccccttcactttcctgggcaacaaatatgagagctgcaccagcgccggccgcagtgacggaaagatgtggtgtgcgaccacagccaactacgatgacgaccgcaagtggggcttctgccctgaccaagggtacagcctgttcctcgtggcagcccacgagtttggccacgccatggggctggagcactcccaagaccctggggccctgatggcacccatttacacctacaccaagaacttccgtctgtcccaggatgacatcaagggcattcaggagctctatggggcctctcctgacattgaccttggcaccggccccacccccacactgggccctgtcactcctgagatctgcaaacaggacattgtatttgatggcatcgctcagatccgtggtgagatcttcttcttcaaggaccggttcatttggcggactgtgacgccacgtgacaagcccatggggcccctgctggtggccacattctggcctgagctcccggaaaagattgatgcggtatacgaggccccacaggaggagaaggctgtgttctttgcagggaatgaatactggatctactcagccagcaccctggagcgagggtaccccaagccactgaccagcctgggactgccccctgatgtccagcgagtggatgccgcctttaactggagcaaaaacaagaagacatacatctttgctggagacaaattctggagatacaatgaggtgaagaagaaaatggatcctggctttcccaagctcatcgcagatgcctggaatgccatccccgataacctggatgccgtcgtggacctgcagggcggcggtcacagctacttcttcaagggtgcctattacctgaagctggagaaccaaagtctgaagagcgtgaagtttggaagcatcaaatccgactggctaggctgctgagctggccctggctcccacaggcccttcctctccactgccttcgatacaccgggcctggagaactagagaaggacccggaggggcctggcagccgtgccttcagctctacagctaatcagcattctcactcctacctggtaatttaagattccagagagtggctcctcccggtgcccaagaatagatgctgactgtactcctcccaggcgccccttccccctccaatcccaccaaccctcagagccacccctaaagagatcctttgatattttcaacgcagccctgctttgggctgccctggtgctgccacacttcaggctcttctcctttcacaaccttctgtggctcacagaacccttggagccaatggagactgtctcaagagggcactggtggcccgacagcctggcacagggcagtgggacagggcatggccaggtggccactccagacccctggcttttcactgctggctgccttagaacctttcttacattagcagtttgctttgtatgcactttgtttttttctttgggtcttgttttttttttccacttagaaattgcatttcctgacagaaggactcaggttgtctgaagtcactgcacagtgcatctcagcccacatagtgatggttcccctgttcactctacttagcatgtccctaccgagtctcttctccactggatggaggaaaaccaagccgtggcttcccgctcagccctccctgcccctcccttcaaccattccccatgggaaatgtcaacaagtatgaataaagacacctactgagtggc

SEQ ID NO: 56203 - DNA, 5963 bp, Homo Sapiens
ttttttttttttttttgcttaaaaaaaagccatgacggctctcccacaattcatcttccctgcgccatctttgtattatttctaatttattttggatgtcaaaaggcactgatgaagatattttctctggagtctccttctttctaacccggctctcccgatgtgaaccgagccgtcgtccgcccgccgccgccgccgccgccgccgccgcccgccccgcagcccaccatgtctcgccgcaagcaaggcaaaccccagcacttaagcaaacgggaattctcgcccgagcctcttgaagccattcttacagatgatgaaccagaccacggcccgttgggagctccagaaggggatcatgacctcctcacctgtgggcagtgccagatgaacttcccattgggggacattcttatttttatcgagcacaaacggaaacaatgcaatggcagcctctgcttagaaaaagctgtggataagccaccttccccttcaccaatcgagatgaaaaaagcatccaatcccgtggaggttggcatccaggtcacgccagaggatgacgattgtttatcaacgtcatctagaggaatttgccccaaacaggaacacatagcagataaacttctgcactggaggggcctctcctcccctcgttctgcacatggagctctaatccccacgcctgggatgagtgcagaatatgccccgcagggtatttgtaaagatgagcccagcagctacacatgtacaacttgcaaacagccattcaccagtgcatggtttctcttgcaacacgcacagaacactcatggattaagaatctacttagaaagcgaacacggaagtcccctgaccccgcgggttggtatcccttcaggactaggtgcagaatgtccttcccagccacctctccatgggattcatattgcagacaataacccctttaacctgctaagaataccaggatcagtatcgagagaggcttccggcctggcagaagggcgctttccacccactccccccctgtttagtccaccaccgagacatcacttggacccccaccgcatagagcgcctgggggcggaagagatggccctggccacccatcacccgagtgcctttgacagggtgctgcggttgaatccaatggctatggagcctcccgccatggatttctctaggagacttagagagctggcagggaacacgtctagcccaccgctgtccccaggccggcccagccctatgcaaaggttactgcaaccattccagccaggtagcaagccgcccttcctggcgacgccccccctccctcctctgcaatccgcccctcctccctcccagcccccggtcaagtccaagtcatgcgagttctgcggcaagacgttcaaatttcagagcaacctggtggtgcaccggcgcagccacacgggcgagaagccctacaagtgcaacctgtgcgaccacgcgtgcacccaggccagcaagctgaagcgccacatgaagacgcacatgcacaaatcgtcccccatgacggtcaagtccgacgacggtctctccaccgccagctccccggaacccggcaccagcgacttggtgggcagcgccagcagcgcgctcaagtccgtggtggccaagttcaagagcgagaacgaccccaacctgatcccggagaacggggacgaggaggaagaggaggacgacgaggaagaggaagaagaggaggaagaggaggaggaggagctgacggagagcgagagggtggactacggcttcgggctgagcctggaggcggcgcgccaccacgagaacagctcgcggggcgcggtcgtgggcgtgggcgacgagagccgcgccctgcccgacgtcatgcagggcatggtgctcagctccatgcagcacttcagcgaggccttccaccaggtcctgggcgagaagcataagcgcggccacctggccgaggccgagggccacagggacacttgcgacgaagactcggtggccggcgagtcggaccgcatagacgatggcactgttaatggccgcggctgctccccgggcgagtcggcctcggggggcctgtccaaaaagctgctgctgggcagccccagctcgctgagccccttctctaagcgcatcaagctcgagaaggagttcgacctgcccccggccgcgatgcccaacacggagaacgtgtactcgcagtggctcgccggctacgcggcctccaggcagctcaaagatcccttccttagcttcggagactccagacaatcgccttttgcctcctcgtcggagcactcctcggagaacgggagcttgcgcttctccacaccgcccggggagctggacggagggatctcggggcgcagcggcacgggaagtggagggagcacgccccatattagtggtccgggcccgggcaggcccagctcaaaagagggcagacgcagcgacacttgtgagtactgtgggaaagtcttcaagaactgtagcaatctcactgtccacaggagaagccacacgggcgaaaggccttataaatgcgagctgtgcaactatgcctgtgcccagagtagcaagctcaccaggcacatgaaaacgcatggccaggtggggaaggacgtttacaaatgtgaaatttgtaagatgccttttagcgtgtacagtaccctggagaaacacatgaaaaaatggcacagtgatcgagtgttgaataatgatataaaaactgaatagaggtatattaatacccctccctcactcccacctgacaccccctttttcaccactccccttccccatcgccctccagccccactccctgtaggatttttttctagtcccatgtgatttaaacaaacaaacaaacaaacagaagtaacgaagctaagaatatgagagtgcttgtcaccagcacacctgttttttttctttttctttttcttttttctttttccttttttttttttttcctttatgttctcaccgtttgaatgcatgatctgtatggggcaatactattgcattttacgcaaactttgagcctttctcttgtgcaataatttacatgttgtgtatgtttttttttaaacttagacagcatgtatggtatgttatggctattttaaattgtccctaattcgttgctgagcaaacatgttgctgtttccagttccgttctgagagaaaaagagagagagagagaaaaagaccatgctgcatacattctgtaatacatatcatgtacagttttattttataacgtgaggaggaaaaacagtctttggattaaccctctatagacagaatagatagcactgaaaaaaaatctctatgagctaaatgtctgtctctaaagggttaaatgtatcaattggaaaggaagaaaaaaggccttgaattgacaaattaacagaaaaacagaacaagtttattctatcatttggttttaaaatatgagtgccttggatctattaaaaccacatcgatggttctttctacttgttataaacttgtagcttaattcagcattgggtgaggtaataaaccttaggaactagcatataattctatattgtatttctcacaacaatggctacctaaaaagatgacccattatgtcctagttaatcatcatttttcctttagtttaattttataaacaaaactgattataccagtataaaagctactttgctcctggtgagagcttaaaagaaatgggctgttttgcccaaagttttattttttttaaacaatgattaaattgaatgtgtaatgtgcaaaagccctggaacgcaattaaatacactagtaaggagttcattttatgaagatatttgctttaataatgtctttttaaaaatactggcaccaaaagaaatagatccagatctacttggttgtcaagtggacaatcaaatgataaactttaagaccttgtataccatattgaaaggaagaggctgacaataaggtttgacagaggggaacagaagaaaataatatgatttattagcacaacgtggtactatttgccatttaaaactagaacaggtatataagctaatattgatacaatgatgattaactatgaattcttaagacttgcatttaaatgtgacattcttaaaaaaagaagagaaagaattttaagagtagcagtatatatgtctgtgctccctaaaagttgtacttcatttcttttccatacactgtgtgctatttgtgttaacatggaagaggattcattgtttttatttttatttttttaattttttcttttttattaagctagcatctgccccagttggtgttcaaatagcacttgactctgcctgtgatatctgtatcttttctctaatcagagatacagaggttgagtataaaataaacctgctcagataggacaattaagtgcactgtacaattttcccagtttacaggtctatacttaagggaaaagttgcaagaatgctgaaaaaaaattgaacacaatctcattgaggagcattttttaaaaactaaaaaaaaaaaaactttgccagccatttacttgactattgagcttacttacttggacgcaacattgcaagcgctgtgaatggaaacagaatacacttaacatagaaatgaatgattgctttcgcttctacagtgcaaggatttttttgtacaaaacttttttaaatataaatgttaagaaaaattttttttaaaaaacacttcattatgtttaggggggaactgcattttagggttccattgtcttggtggtgttacaagacttgttatccatttaaaaatggtagtggaaattctatgccttggatacacaccgctcttcaggttgtaaaaaaaaaaaacatacattggggaaaggtttaagattatatagtacttaaatataggaaaatgcacactcatgttgattcctatgctaaaatacatttatggtcttttttctgtatttctagaatggtatttgaattaaatgttcatctagtgttaggcactatagtatttatattgaagcttgtatttttaactgttgcttgttctcttaaaaggtatcaatgtaccttttttggtagtggaaaaaaaaaagacaggctgccacagtatatttttttaatttggcaggataatatagtgcaaattatttgtatgcttcaaaaaaaaaaaaaagagagaaacaaaaaagtgtgacattacagatgagaagccatataatggcggtttgggggagcctgctagaatgtcacatggatggctgtcataggggttgtacatatccttttttgttcctttttcctgctgccatactgtatgcagtactgcaagctaataacgttggtttgttatgtagtgtgctttttgtccctttccttctatcaccctacattccagcatcttaccttcatatgcagtaaaagaaagaaagaaaaaaaaaggaaaaaaaaaaaaaaaccaatgttttgcagtttttttcattgccaaaaactaaatggtgctttatatttagattggaaagaatttcatatgcaaagcatattaaagagaaagcccgctttagtcaatacttttttgtaaatggcaatgcagaatattttgttattggccttttctattcctgtaatgaaagctgtttgtcgtaacttgaaattttatcttttactatgggagtcactatttattattgcttatgtgccctgttcaaaacagaggcacttaatttgatcttttatttttctttgtttttatttttttttttatttagatgaccaaaggtcattacaacctggctttttattgtatttgtttctggtctttgttaagttctattggaaaaaccactgtctgtgtttttttggcagttgtctgcattaacctgttcatacacccattttgtccctttattgaaaaaataaaaaaaattaaaagtacaaaaaaaaaaaaaaaaa

SEQ ID NO: 56204 - DNA, 5005 bp, Homo Sapiens
gcaggcgccgcgccgaggaggctgccgctctggcttgccgccccccgccgccgctgcacaccggacccagccgccgtgccgcgggccatggacctgcccaggggcctggtggtggcctgggcgctcagcctgtggccagggttcacggacaccttcaacatggacaccaggaagccccgggtcatccctggctccaggaccgccttctttggctacacagtgcagcagcacgacatcagtggcaataagtggctggtcgtgggcgccccactggaaaccaatggctaccagaagacgggagacgtgtacaagtgtccagtgatccacgggaactgcaccaaactcaacctgggaagggtcaccctgtccaacgtgtccgagcggaaagacaacatgcgcctcggccttagtctcgccaccaaccccaaggacaacagcttcctggcctgcagccccctctggtctcatgagtgtgggagctcctactacaccacagggatgtgttcaagagtcaactccaacttcaggttctccaagaccgtggccccagctctccaaaggtgccagacctacatggacatcgtcattgtcctggatggctccaacagcatctacccctgggtggaggttcagcacttcctcatcaacatcctgaaaaagttttacattggcccagggcagatccaggttggagttgtgcagtatggcgaagatgtggtgcatgagtttcacctcaacgactacaggtctgtaaaagatgtggtggaagctgccagccacattgagcagagaggaggaacagagacccggacggcatttggcattgaatttgcacgctcagaggctttccagaagggtggaaggaaaggagccaagaaggtgatgattgtcatcacagatggggagtcccacgacagcccagacctggagaaggtgatccagcaaagcgaaagagacaacgtaacaagatatgcggtggccgtcctgggctactacaaccgcagggggatcaatccagaaacttttctaaatgaaatcaaatacatcgccagtgaccctgatgacaagcacttcttcaatgtcactgatgaggctgccttgaaggacattgtcgatgccctgggggacagaatcttcagcctggaaggcaccaacaagaacgagacctcctttgggctggagatgtcacagacgggcttttcctcgcacgtggtggaggatggggttctgctgggagccgtcggtgcctatgactggaatggagctgtgctaaaggagacgagtgccgggaaggtcattcctctccgcgagtcctacctgaaagagttccccgaggagctcaagaaccatggtgcatacctggggtacacagtcacatcggtcgtgtcctccaggcaggggcgggtgtacgtggccggagccccccggttcaaccacacgggcaaggtcatcctgttcaccatgcacaacaaccggagcctcaccatccaccaggctatgcggggccagcagataggctcttactttgggagtgaaatcacctcggtggacatcgacggcgacggcgtgactgatgtcctgctggtgggcgcacccatgtacttcaacgagggccgtgagcgaggcaaggtgtacgtctatgagctgagacagaacctgtttgtttataacggaacgctaaaggattcacacagttaccagaatgcccgatttgggtcctccattgcctcagttcgagacctcaaccaggattcctacaatgacgtggtggtgggagcccccctggaggacaaccacgcaggagccatctacatcttccacggcttccgaggcagcatcctgaagacacctaagcagagaatcacagcctcagagctggctaccggcctccagtattttggctgcagcatccacgggcaattggacctcaatgaggatgggctcatcgacctggcagtgggagcccttggcaacgctgtgattctgtggtcccgcccagtggttcagatcaatgccagcctccactttgagccatccaagatcaacatcttccacagagactgcaagcgcagtggcagggatgccacctgcctggccgccttcctctgcttcacgcccatcttcctggcaccccatttccaaacaacaactgttggcatcagatacaacgccaccatggatgagaggcggtatacaccgagggcccacctggacgagggcggggaccgattcaccaacagagccgtactgctctcctccggccaggagctctgtgagcggatcaacttccatgtcctggacactgctgactacgtgaagccagtgaccttctcagtcgagtattccctggaggaccctgaccatggccccatgctggacgacggctggcccaccactctcagagtctcggtgcccttctggaacggctgcaatgaggatgagcactgtgtccctgaccttgtgttggatgcccggagtgacctgcccacggccatggagtactgccagagggtgctgaggaagcctgcgcaggactgctccgcatacacgctgtccttcgacaccacagtcttcatcatagagagcacacgccagcgagtggcggtggaggccacactggagaacaggggcgagaacgcctacagcacggtcctaaatatctcgcagtcagcaaacctgcagtttgccagcttgatccagaaggaggactcagacggtagcattgagtgtgtgaacgaggagaggaggctccagaagcaagtctgcaacgtcagctatcccttcttccgggccaaggccaaggtggctttccgtcttgattttgagttcagcaaatccatcttcctacaccacctggagatcgagctcgctgcaggcagtgacagtaatgagcgggacagcaccaaggaagacaacgtggcccccttacgcttccacctcaaatacgaggctgacgtcctcttcaccaggagcagcagcctgagccactacgaggtcaagcccaacagctcgctggagagatacgatggtatcgggcctcccttcagctgcatcttcaggatccagaacttgggcttgttccccatccacgggatgatgatgaagatcaccattcccatcgccaccaggagcggcaaccgcctactgaagctgagggacttcctcacggacgaggcgaacacgtcctgtaacatctggggcaatagcactgagtaccggcccaccccagtggaggaagacttgcgtcgtgctccacagctgaatcacagcaactctgatgtcgtctccatcaactgcaatatacggctggtccccaaccaggaaatcaatttccatctactggggaacctgtggttgaggtccctaaaagcactcaagtacaaatccatgaaaatcatggtcaacgcagccttgcagaggcagttccacagccccttcatcttccgtgaggaggatcccagccgccagatcgtgtttgagatctccaagcaagaggactggcaggtccccatctggatcattgtaggcagcaccctggggggcctcctactgctggccctgctggtcctggcactgtggaagctcggcttctttagaagtgccaggcgcaggagggagcctggtctggaccccacccccaaagtgctggagtgaggctccagaggagactttgagttgatgggggccaggacaccagtccaggtagtgttgagacccaggcctgtggccccaccgagctggagcggagaggaagccagctggctttgcacttgacctcatctcccgagcaatggcgcctgctccctccagaatggaactcaagctggttttaagtggaactgccctactgggagactgggacacctttaacacagacccctagggatttaaagggacacccctacacacacccaggcccatgccaaggcctccctcaggctctgtggagggcatttgctgccccagctactaaggtgctaggaattcgtaatcatccccatcctccagagaaacccagggaggaagactgtaaatacgaacccaatctgcacactccaggcctctagttccagaaggatccaagacaaaacagatctgaattctgcccttttctctcacccatcccacccctccattggctcccaagtcacacccactcccttccccatagataggcccctggggctcccgaagaatgaacccaagagcaagggcttgatggtgacagctgcaagccagggatgaagaaagactctgagatgtggagactgatggccaggcaagtgggaccaggatactggacgctgtcctgagatgagaggtagccgggctctgcacccacgtgcattcacattgaccgcaactcacacattcccccaccagctgcagccccttgctctcagctgccaaccctcccgggtcacttttgttcccaggtacctcatgggaagcatgtggatgacacaatccctggggctgtgcattcccacgtcttcttgctgcagcctgcccctagacatggacgcaccggcctggctgcagctgggcagcaggggtaggggtagggagcctcccctccctgtatcaccccctccctacacacacacacacacacacacacacacactgcctcccatccttccctcatgcccgccagtgcacagggaagggcttggccagcgctgttgaggggtcccctctggaatgcactgaataaagcacgtgcaaggactcccggagcctgtgcagccttggtggcaaatatctcatctgccggcccccaggacaagtggtatgaccagtgataatgccccaaggacaaggggcgtgcctggcgcccagtggagtaatttatgccttagtcttgttttgaggtagaaatgcaagggggacacatgaaaggcatcagtccccctgtgcatagtacgacctttactgtcgtatttttgaaaaattaaaaatacagtgtttaaaaacaaaaaaaaaaaaaaaaaaaaaaaaaaaa

SEQ ID NO: 56205 - DNA, 3239 bp, Homo Sapiens
ccgcagcctccgcgggtggcaagcgggctggggagagccgagggccaaaggaagagaaaatcgcggggagtctctggccgggagagtccaggtagcgctcggcgggcagcagtgcgcaggcccctcggcttcaaccgccacaatgctgccagcagcgccaggcaaggggcttgggagcccggaccccgccccctgcggcccagcgcccccaggaaatacaaaagatataataatgatatatgaagaagatgctgaggaatgggctctgtacttgacagaagtatttttacatgttgtgaaaagggaagccatcctgttatatcgcttggagaatttctcttttcggcatttggagttgctgaacttaacgtcttacaaatgtaaacttttgatattatcaaatagcctgcttagagacctaactccaaagaaatgtcagtttctggaaaagatacttcattcaccaaaaagtgtagttactttgctttgtggagtgaagagttcagatcagctctatgaattactaaatatctctcaaagcagatgggagatctcaactgaacaggaacctgaagactacatctctgtaatccagagtatcatattcaaagattctgaagactactttgaggtcaacattccaacagacctacgagcaaaacattctggggaaataagtgagagaaaggaaattgaagaactatcagaagcttcaagaaacaccataccactagcagtggtgcttcccactgaaattccatgtgagaatcctggtgaaatattcataattttgagagatgaagtaattggtgatactgtagaggttgaatttacatcaagtaataagcgcattagaacacggccagccctttggaataagaaagtctggtgcatgaaagctttagagtttcctgctggttcagtccatgtcaatgtctactgtgatggaatcgttaaagctacaaccaaaattaagtactacccaacagcaaaggcaaaggaatgcctattcagaatggcagattcaggagagagtttgtgccagaatagcattgaagaacttgatggtgtccttacatccatattcaaacatgagataccatattatgagttccagtctcttcaaactgaaatttgttctcaaaacaaatatactcatttcaaagaacttccaactcttctccactgtgcagcaaaatttggcttaaagaacctggctattcatttgcttcaatgttcaggagcaacctgggcatctaagatgaaaaatatggagggttcagaccccgcacatattgctgaaaggcatggtcacaaagaactcaagaaaatcttcgaagacttttcaatccaagaaattgacataaataatgagcaagaaaatgattatgaagaggatattgcctcattttccacatatattccttccacacagaacccagcatttcatcatgaaagcaggaagacatacgggcagagtgcagatggagctgaggcaaatgaaatggaaggggaaggaaaacagaatggatcaggcatggagaccaaacacagcccactagaggttggcagtgagagttctgaagaccagtatgatgacttgtatgtgttcattcctggtgctgatccagaaaataattcacaagagccactcatgagcagcagacctcctctccccccgccgcgacctgtagctaatgccttccaactggaaagacctcacttcaccttaccagggacaatggtggaaggccaaatggaaagaagtcaaaactggggtcatcctggtgttagacaagaaacaggagatgaacccaaaggagaaaaagagaagaaagaagaggaaaaagagcaggaggaggaagaagacccatatacttttgctgagattgatgacagtgaatatgacatgatattggccaatctgagtataaagaaaaaaactgggagtcggtctttcattataaatagacctcctgcccccacaccccgacccacaagtatacctccaaaagaggaaactacaccttacatagctcaagtgtttcaacaaaagacagccagaagacaatctgatgatgacaagttccgtggtcttcctaagaaacaagacagagctcggatagagagtccagccttttctactctcaggggctgtctaactgatggtcaggaagaactcatcctcctgcaggagaaagtaaagaatgggaaaatgtctatggatgaagctctggagaaatttaaacactggcagatgggaaaaagtggcctggaaatgattcagcaggagaaattacgacaactacgagactgcattattgggaaaaggccagaagaagaaaatgtctataataaactcaccattgtgcaccatccaggtggtaaggaaactgcccacaatgaaaataagttttataatgtacacttcagcaataagcttcctgctcgaccccaagttgaaaaggaatttggtttctgttgcaagaaagatcattaaagaaggttattataatgaaactcacgaatctacggacattttgctttcagggtgaagcaagcttgaatttggattgcctgctctctttaaagcgaattcatactatgacagcagaaacaaaacttcagatttcagaatttgttattggcaaaatttattctcattatacctgcttcatatgggtatattactattaaaacagaataccatagagtaattgcattatttgaaaattctctcattttacaatgcacttcaccaatgaaacagctaatttccattttgaaaattaaaagaaaacagcacagagaagttaaatgcggtgtagcaaagttatggggtctgcttgagggcactaacctcaacagattattcctcctctccttagaataaccatgaaaatacaaatttacttagcacatttttgctttttaagtagctggttcattttctgaatttctcacattcagagttccagtcattattgttacatcatgtttgcagaaaccttgtcttatttagtgtctatttgcatataaccctgaaaacattattatttgaaaacttttctatatctcaaattaatatacattttcataacctacctttgtattaagacttgcaattttatcaatctattatttcttagaaacaatttactagcttagaatagaaagcaatgttatcgtcatataattttcatgtacaaatgccacaaataaattgaatgtttaaagct

SEQ ID NO: 56206 - DNA, 2061 bp, Homo Sapiens
atgaggcggacaggccccgaggaggaggcctgcggcgtgtggctggacgcggcggcgctgaagaggcggaaagtgcagacacatttaatcaaaccaggcaccaaaatgctaacactccttcctggagaaagaaaggctaatatttattttactcaaagaagagctccatctacaggcattcaccagagaagcattgcttccttcttcaccttgcagccaggaaagacaaatggcagtgaccagaagagtgtttcatctcatacagaaagtcagatcaacaaagagtccaagaaaaatgcgacccagctagaccatttgatcccaggcttagcacacgattgcatggcatcccctttagccacttcaaccactgcggacatccaggaagctggactctctcctcagtccctccagacttctggccaccacagaatgaaaaccccattttcaactgagctatctttgctccagcctgatactccagactgtgctggagatagtcataccccactggctttttccttcaccgaggacttggaaagttcttgtttgctagaccgaaaggaagaaaaaggggattctgccaggaaatgggaatggcttcatgagtctaagaagaactatcagagtatggagaaacacaccaaactacctggggacaaatgctgtcagcccttaggcaagactaaattggaaagaaaggtgtctgccaaagaaaacaggcaggcccctgtcctccttcaaacatacagggaatcctggaatggagaaaacatagaatcggtgaaacaaagccgtagtccagtttctgtgttttcctgggacaatgaaaagaatgacaaggactcctggagtcaacttttcactgaagattctcaaggccagcgggtcattgcccacaacactagagctccttttcaagatgtaaccaataactggaattgggacttagggccgtttcctaacagtccttgggctcagtgccaggaggatgggccaactcaaaatctgaagcctgatttgctctttacccaggactctgaaggtaatcaagttatcagacaccaattctaaatgtttgaagctttgtttctaaaagtaccttgaaatgatagagatgtaggaaaatatagttgtgggtggagagaggagtgagtttgtttaggtgggaaggtggcatgggatgaagttgtcattactgagcatcttctctgtgtaaataaagggcagtaccattgttaagacagtgggattggcatcatggctttccctcaggaaggtggtggctggtaaattccctgaatgagtctatgatgaacactgaggcagcacagtgggtatttatctctatgaaagtgccttttactcagcctgcacagagccatctctttgcccttccagatgtctgactgggaccttgcttatggatgtgtttttttttttttttttttgagatggagtctcgctctgtcgccaggctggagtgcagtggtgcgacctcagctcactgcaccctctgtgtcccggattcaagcgattctcctgcctcagcctcccgaatagcagggactacaggcatgcgccaccacgcccagctaattttttttggatttttagtagagacgaggtttcaccatattagccaggatggtctccatctcctgacctcctgatccgcccacctcagcctcccaaagtgctgagattacaggcataagccaccgcgcccagccagatgtgtgagcttttaatctctggctgatcttaacccacatcagcctaagcttgggatgattactcttgacccttttttttcagtgattagcaaatctccccacaacccaggtgtggagagaagagaggtagaatggtgctagtttcctattttatttttgtggtaactgtacagcactttaaagttatatactctatgtttaaatatctcccttaaaaagcctgagctgtacaacaatctggatgtgactctgttacccttttcccacaagataggagggaatcccctttgtaaaactatgaatccaaataaatgtttacaaagtg

SEQ ID NO: 56207 - DNA, 3418 bp, Homo Sapiens
actccagatataggatcactccatgccatcaagaaagttgatgctattgggcccatctcaagctgatcttggcacctctcatgctctgctctcttcaaccagacctctacattccattttggaagaagactaaaaatggtgtttccaatgtggacactgaagagacaaattcttatcctttttaacataatcctaatttccaaactccttggggctagatggtttcctaaaactctgccctgtgatgtcactctggatgttccaaagaaccatgtgatcgtggactgcacagacaagcatttgacagaaattcctggaggtattcccacgaacaccacgaacctcaccctcaccattaaccacataccagacatctccccagcgtcctttcacagactggaccatctggtagagatcgatttcagatgcaactgtgtacctattccactggggtcaaaaaacaacatgtgcatcaagaggctgcagattaaacccagaagctttagtggactcacttatttaaaatccctttacctggatggaaaccagctactagagataccgcagggcctcccgcctagcttacagcttctcagccttgaggccaacaacatcttttccatcagaaaagagaatctaacagaactggccaacatagaaatactctacctgggccaaaactgttattatcgaaatccttgttatgtttcatattcaatagagaaagatgccttcctaaacttgacaaagttaaaagtgctctccctgaaagataacaatgtcacagccgtccctactgttttgccatctactttaacagaactatatctctacaacaacatgattgcaaaaatccaagaagatgattttaataacctcaaccaattacaaattcttgacctaagtggaaattgccctcgttgttataatgccccatttccttgtgcgccgtgtaaaaataattctcccctacagatccctgtaaatgcttttgatgcgctgacagaattaaaagttttacgtctacacagtaactctcttcagcatgtgcccccaagatggtttaagaacatcaacaaactccaggaactggatctgtcccaaaacttcttggccaaagaaattggggatgctaaatttctgcattttctccccagcctcatccaattggatctgtctttcaattttgaacttcaggtctatcgtgcatctatgaatctatcacaagcattttcttcactgaaaagcctgaaaattctgcggatcagaggatatgtctttaaagagttgaaaagctttaacctctcgccattacataatcttcaaaatcttgaagttcttgatcttggcactaactttataaaaattgctaacctcagcatgtttaaacaatttaaaagactgaaagtcatagatctttcagtgaataaaatatcaccttcaggagattcaagtgaagttggcttctgctcaaatgccagaacttctgtagaaagttatgaaccccaggtcctggaacaattacattatttcagatatgataagtatgcaaggagttgcagattcaaaaacaaagaggcttctttcatgtctgttaatgaaagctgctacaagtatgggcagaccttggatctaagtaaaaatagtatattttttgtcaagtcctctgattttcagcatctttctttcctcaaatgcctgaatctgtcaggaaatctcattagccaaactcttaatggcagtgaattccaacctttagcagagctgagatatttggacttctccaacaaccggcttgatttactccattcaacagcatttgaagagcttcacaaactggaagttctggatataagcagtaatagccattattttcaatcagaaggaattactcatatgctaaactttaccaagaacctaaaggttctgcagaaactgatgatgaacgacaatgacatctcttcctccaccagcaggaccatggagagtgagtctcttagaactctggaattcagaggaaatcacttagatgttttatggagagaaggtgataacagatacttacaattattcaagaatctgctaaaattagaggaattagacatctctaaaaattccctaagtttcttgccttctggagtttttgatggtatgcctccaaatctaaagaatctctctttggccaaaaatgggctcaaatctttcagttggaagaaactccagtgtctaaagaacctggaaactttggacctcagccacaaccaactgaccactgtccctgagagattatccaactgttccagaagcctcaagaatctgattcttaagaataatcaaatcaggagtctgacgaagtattttctacaagatgccttccagttgcgatatctggatctcagctcaaataaaatccagatgatccaaaagaccagcttcccagaaaatgtcctcaacaatctgaagatgttgcttttgcatcataatcggtttctgtgcacctgtgatgctgtgtggtttgtctggtgggttaaccatacggaggtgactattccttacctggccacagatgtgacttgtgtggggccaggagcacacaagggccaaagtgtgatctccctggatctgtacacctgtgagttagatctgactaacctgattctgttctcactttccatatctgtatctctctttctcatggtgatgatgacagcaagtcacctctatttctgggatgtgtggtatatttaccatttctgtaaggccaagataaaggggtatcagcgtctaatatcaccagactgttgctatgatgcttttattgtgtatgacactaaagacccagctgtgaccgagtgggttttggctgagctggtggccaaactggaagacccaagagagaaacattttaatttatgtctcgaggaaagggactggttaccagggcagccagttctggaaaacctttcccagagcatacagcttagcaaaaagacagtgtttgtgatgacagacaagtatgcaaagactgaaaattttaagatagcattttacttgtcccatcagaggctcatggatgaaaaagttgatgtgattatcttgatatttcttgagaagccctttcagaagtccaagttcctccagctccggaaaaggctctgtgggagttctgtccttgagtggccaacaaacccgcaagctcacccatacttctggcagtgtctaaagaacgccctggccacagacaatcatgtggcctatagtcaggtgttcaaggaaacggtctagcccttctttgcaaaacacaactgcctagtttaccaaggagaggcctggctgtttaaattgttttcatatatatcacaccaaaagcgtgttttgaaattcttcaagaaatgagattgcccatatttcaggggag

SEQ ID NO: 56208 - DNA, 4535 bp, Homo Sapiens
gaacgaagaaggcgtcccggcatcggccaagattctacattgctcatctgggcatctgagcctccttcgaagtttcctgtcacaactgtcctcttgacagcatggatgaggaggaagacaatctgtctctgctgaccgcactgctggaagaaaatgagtcagccttggattgtaattcagaagaaaataacttcttgacgcgggaaaatggcgagcccgacgcatttgatgagctctttgatgccgacggcgacggtgaatcttatacagaagaggctgatgatggagaaacaggagagacaagagacgaaaaggaaaatctggccactctctttggagatatggaggacttaacagatgaagaagaagttcccgcatcacagtcaactgaaaatagggtcctccctgctcctgcccccaggcgagagaaaacgaatgaagagttgcaagaggaattaaggaatttgcaagagcaaatgaaggccttacaagagcagctaaaagtaacaacaattaaacagacagcaagcccagcccgtctgcaaaaatcccctgtagagaagtctccccggccacctcttaaggagaggagagttcagagaattcaggagtcaacatgcttttctgcggagcttgatgtccctgcgctaccaagaaccaagagggtggctcgaacaccaaaggcttcacctccagatcccaaaagctcatcttcaaggatgacaagtgcaccctcccaacccctacagacgatttctcggaacaaacctagtgggataactagaggtcaaattgtggggaccccaggaagttctggggaaacgactcaacccatctgtgtggaagccttctctggtctgcggctcaggcggcctcgagtatcctccacagaaatgaacaagaaaatgaccggccgaaaactgatcagactgtctcagatcaaggaaaagatggccagagagaagctggaagaaatagattgggtgacatttggggttatattgaagaaggttacgccacagagtgtgaatagtggaaaaaccttcagcatatggaaactgaatgatcttcgtgacctgacacaatgtgtgtccttgttcttatttggagaagttcacaaagcgctctggaagacggagcaggggactgtcgtagggatcctcaatgccaaccccatgaagcccaaggatggttcagaggaggtgtgtttatctatcgatcatcctcagaaggtcttaattatgggtgaagctcttgacctgggaacctgtaaagccaagaagaagaatggagagccgtgcacgcagactgtgaatttgcgtgactgtgagtactgtcagtaccatgtccaggctcagtacaagaagctcagcgcaaagcgtgcggatctgcagtccaccttctctggaggacgaattccaaagaagtttgcccgcagaggcaccagcctcaaagaacggctgtgccaagatggcttttactacggaggggtttcttctgcctcgtatgcagcttcaattgcagcagctgtggctcctaagaagaagattcaaaccactctgagtaatctggttgttaagggcacaaacttgatcatccaggaaacacggcaaaaactcggaataccccagaagagcctgtcttgctctgaggagttcaaggaactgatggacctgccgacgtgtggagccaggaacttaaaacaacatttagccaaagccacagcttcagggattatggggagcccaaaaccagccatcaagtccatctcggcctcagcactcttgaagcaacagaagcagcggatgttggagatgaggagaaggaaatcagaagaaatacagaagcgatttctgcagagctcaagtgaagttgagagcccagctgtgccatcttcatcaagacagccccctgctcagcctccacggacaggatccgagttccccaggctggagggagccccggccacaatgacgcccaagctggggcgaggtgtcttggaaggagatgatgttctcttttatgatgagtcaccaccaccaagaccaaaactgagtgctttagcagaagccaaaaagttagctgctatcaccaaattaagggcaaaaggccaggttcttacaaaaacaaacccaaacagcattaagaagaaacaaaaggaccctcaggacatcctggaggtgaaggaacgtgtagaaaaaaacaccatgttttcttctcaagctgaggatgaattggagcctgccaggaaaaaaaggagagaacaacttgcctatctggaatctgaggaatttcagaaaatcctaaaagcaaaatcaaaacacacaggcatcctgaaagaggccgaggctgagatgcaggagcgctactttgagccactggtgaaaaaagaacaaatggaagaaaagatgagaaacatcagagaagtgaagtgccgtgtcgtgacatgcaagacgtgcgcctatacccacttcaagctgctggagacctgcgtcagtgagcagcatgaataccactggcatgatggtgtgaagaggtttttcaaatgtccctgtggaaacagaagcatctccttggacagactcccgaacaagcactgcagtaactgtggcctctacaaatgggaacgggacggaatgctaaaggaaaagactggtccaaagataggaggagaaactctgttaccaagaggagaagaacatgctaaatttctgaacagccttaaataacccgaacttcagacattttcccacagacttcctggcctcctgtgactctggaaagcaaaggattggctgtgtattgtccattgattcctgattgacgccgtcaaaaacaaatgcttgttaagcccataagctttgcctgcttactttctgccattgggttggtttgataccacatttaacattgacatttaagtggaaaaccaagttatcattgtcttttctaagctcagtgtggatgattgcattacttcattcactgaagtttttgcccaaaaattggaaggtaaacagagagctatgtttctgtatcttttggttatagagtgttcacttctttatcataacaaaattctagtgtttatacgaacacccagaggcaaaagaatttggcttaattctcactccaggtaagtagcttaacttctgggcttcagttttctcatctgtaaaatcaggaagattggactaagtgatcctgaaatgtattttttagcactggatttctacaaataataaaactttcccatctagataatgatgatcacatagtcttgatgtacggacattaaaagccagatttcttcattcaattctgttatctctgttttactctttgaaattgatcaagccactgaatcactttgcatttcagtttatatatatagagagaaagaaggtgtctgctcttacattattgtggagccctgtgatagaaatatgtaaaatctcatattattttttttttaatttttttattttttatgacagggtctcactatgtcaccctggctggagtgcagtagtgcgatcgcggcacactgcagccttggcttccctgggctcaagcagtcctcccacctcagtctcccaaatagctaggactacaggcgtgcgtgaccaagcccagctaatttttgcattttttgtagagatggggttttgccatgttgctcaggctggtctcaaactcctgagcactagcaatccacccacctctgtttccaaaaaaaaaaaaaaaatgaaaggtcaacccctatgcaaattaccacagcaaaggtttcattcaggagattcttccatctgggcaacctggttttccaaatatcatttgacctaagtgaatgttgatactagctaaagattgggtaaattggttgaattattgtattgaagcttgagctgtagctaaaagtaatttaggtttcccctaagatgttattatgttagggacataacacttttgggaggttgttgtgggagatggttgatttaggttttcaaaagctagaaataaaatttacatgccttagatttcataaaattctgctctaattgggtggaaggtgctgtatctaacttgtgttcctcctaaggttatgtcctaataactattcttttaggagtatacttctactttatagaaggttgcttttctttttaattttttctaacaaagaaaagaataaagtatttattaataagaaccagaaagcacttgaaactgatgtttttaatggctcatttagggtagatttatttatctcattaacttaaaacagctatgtgtatgaaataggtcacaacagaacttgaacaccaggttggtgtctgagcaatccctttcttatgggaaaaacaatgttcttgtttgaacagagggtatcattgcagtcagtattcacgtgtatattgttatataagttgtataatatgcttgtaaaggctgagggtgagctgtatctggatgcctttttacaatttgattttaacttttaaaataaatttaaaacataaaaaaaaaaaaaa

SEQ ID NO: 56209 - DNA, 8833 bp, Homo Sapiens; identical to SEQ ID NO: 29245

SEQ ID NO: 56210 - DNA, 3118 bp, Homo Sapiens
agttcgacacaccatgccgactgtcagcgtgaagcgtgatctgctcttccaagccctgggccgcacctacactgacgaagaatttgatgaactatgttttgaatttggtctggagcttgatgaaattacatctgagaaggaaataataagtaaagaacaaggtaatgtaaaggcagcaggagcctctgatgttgttctttacaaaattgacgtccctgccaatagatatgatctcctgtgtctggaaggattggttcgaggacttcaggtcttcaaagaaaggataaaggctccagtgtataaacgggtaatgcctgatggaaaaatccagaaattgattatcacagaagagacagctaagatacgtccttttgcggtagcagcagttctccgtaatataaagtttactaaagatcgatatgacagcttcattgaacttcaggagaaattacatcagaatatttgcaggaaaagagcactggttgccattggtacccatgatttggacactttgtcgggcccatttacttatactgcaaagcgtccttcagatatcaaattcaagcctctaaataagaccaaggagtatacagcctgtgaactgatgaacatatacaagactgacaatcacctgaaacattatttacatatcattgaaaacaaacccctgtatccagttatctatgatagcaatggtgtcgtcctttcaatgcctcccatcatcaatggggatcattccagaataacagtaaatactagaaatatttttattgaatgcacgggaactgactttactaaggcaaaaatagttcttgatattattgtcaccatgttcagtgaatattgtgagaatcaatttacggtcgaagctgctgaagtggtttttcctaatggaaaatcacatacctttccagaattagcttaccgaaaggagatggtgagagctgacctaattaacaaaaaagttggaatcagagaaactccagaaaatcttgccaaacttctgaccaggatgtatttaaaatcagaagtcataggtgatgggaatcagattgagattgaaatccctccaaccagagctgacattatccatgcatgtgatattgtagaagatgcagctattgcttatggatataacaacattcagatgactctcccgaaaacttacaccatagctaatcaatttcctcttaataagctcactgaacttctccgacatgacatggcagccgctggcttcactgaagcacttacctttgccctgtgctcccaagaagatattgctgataaactaggtgtggatatctctgcaacaaaggcagtccacataagtaatcctaaaacagctgaatttcaggtggcacgcactacccttcttcctggcctcctgaagaccatagcagcaaatcgtaagatgccccttccactgaaactgtttgaaatctctgacattgtaataaaagattctaatacagatgtaggtgcaaaaaactacagacatctctgtgctgtttattacaacaagaatcctgggtttgagatcattcatgggctgctggacagaattatgcagttgctcgatgtgcctcctggtgaagacaaggggggatatgtgatcaaagcatcagaagggcctgctttcttccccgggcgatgtgcagagatctttgccagggttcaaagcgtcgggaagcttggggtccttcatcctgacgttatcaccaaatttgagctgaccatgccctgctcctccctagaaatcaatattggaccctttttgtgaagattggtctctgtggtgtgattctcttcccaggtgtccctttctcctcccctagtgtccttaagtcctcctccacagggaacatctatttgggctttgatgtttaataaagtagaaagcactgtctggctgtgtgggtagagaccatcctttccctgcatattaggccagcttgtgccatataccagtgtggtgtctgtgtgtgaagctgcattgttgggtaaaagccccgtggagtgctggagaaatgcactagcagagtgcaggatctgttctgaaaggcagacgtgctcctcagacatcagaacatcacattggaacggattactcctgcataacaagatcccatttctttccttattgataaaacaagataatcgatgagaattcatgttgcatgagttcgagataactgaggggtttagctttgattttctacatttgacatgtattcatcattgagaaacactaaaataacaatatttttagaaaacgtttaagaatcaattatggtccaacaattatagcttctgaggtcagtttaaagtgaaagaaaaatctgtaatacaaggattcaaaatatgtgagggtgcataggtattttttactctatctgtgatactctaagatagagtacatgcaacaaagatctgttctgctgtaagagttaaaatggacaagtattgatatcaatgcagtatgaacattaggaaacaatgagaagcttatttttgccataggccatacatgttactgtaatcagtcagttataaaatcatggttttaaatacttaattgagctactagtttctctattgtcccagggagatattagacctctctttttctgaagctaagcttcagccaatcctccttgttttatatcctaatttcctttcttacttcaatctagaattctccagtaggtaccatctctggaaaaaagctgggtctcatgtttgagacaagttcccaggtactattgaagtaataagaaatatgataaaatataatactttaaagtcccagtagaaatagctaacaaaggctgggtgcgctgtggctcatgcctgtaatcctagcactttgggaggctgaggtgggcagatcacttgaggccaatagttcgagatcagcctgaccaacatgatgaaatgccatctccactaaaaatataaaaattagccaggcatggtggtgtgggcctgcagtcccagctacctgggaggctgagtcaggaaaatctcttgaaccaggaggtggacgttgcagtgatcccagattgtgccactgccctccagcctgggtgacagagtgagattctgtctacaaaaa

SEQ ID NO: 56211 - DNA, 2856 bp, Homo Sapiens; identical to SEQ ID NO: 29731

SEQ ID NO: 56212 - DNA, 9501 bp, Homo Sapiens; identical to SEQ ID NO: 23264

SEQ ID NO: 56213 - DNA, 4968 bp, Homo Sapiens
gcggccgccgtggccctcacagtcggcgtttcgccgcctgcccgcggtgcccgcgcacgccggccgccatcgccttcgcgcctggctggcgggggcgctgtcctcccaggccgtccgcgccgctccctggagctcggcggagcgcggcagccagggccggcggaggcgcgaggagccgggcgccaccgccgccgccgccgccgccgccgcgggggccatgaccgtggagcagaacgtgctgcagcagagcgcggcgcagaagcaccagcagacgtttttgaatcaactgagagaaattacggggattaatgacacccagatactacagcaagccttgaaggatagtaatggaaacttggaattagcagtggctttccttactgcgaagaatgctaagacccctcagcaggaggagacaacttactaccaaacagcacttcctggcaatgatagatacatcagtgtgggaagccaagcagatacaaatgtgattgatctcactggagatgataaagatgatcttcagagagcaattgccttgagtttggccgaatcaaacagggcattcagggagactggaataactgatgaggaacaagccattagcagagttcttgaagccagcatagcagagaataaagcatgtttgaagaggacacctacagaagtttggagggattctcgaaacccttatgatagaaaaagacaggacaaagctcccgttgggctaaagaatgttggcaatacttgttggtttagtgctgttattcagtcattatttaatcttttggaatttagaagattagttctgaattacaagcctccatcaaatgctcaagatttaccccgaaaccaaaaggaacatcggaatttgccttttatgcgtgagctgaggtatctatttgcacttcttgttggtaccaaaaggaagtatgttgatccatcaagagcagttgaaattcttaaggatgctttcaaatcaaatgactcacagcagcaagatgtgagtgagtttacacacaaattattagattggttagaagatgccttccaaatgaaagctgaagaggagacggatgaagagaagccaaagaaccccatggtagagttgttctatggcagattcctggctgtgggagtacttgaaggtaaaaaatttgaaaacactgaaatgtttggtcagtacccacttcaggtcaatgggttcaaagatctgcatgagtgcctagaagctgcaatgattgaaggagaaattgagtctttacattcagagaattcaggaaaatcaggccaagagcattggtttactgaattaccacctgtgttaacatttgaattgtcaagatttgaatttaatcaggcattgggaagaccagaaaaaattcacaacaaattagaatttccccaagttttatatttggacagatacatgcacagaaacagagaaataacaagaattaagagggaagagatcaagagactgaaagattacctcacggtattacaacaaaggctagaaagatatttaagctatggttccggtcccaaacgattccccttggtagatgttcttcagtatgcattggaatttgcctcaagtaaacctgtttgcacttctcctgttgacgatattgacgctagttccccacctagtggttccataccatcacagacattaccaagcacaacagaacaacagggagccctatcttcagaactgccaagcacatcaccttcatcagttgctgccatttcatcgagatcagtaatacacaaaccatttactcagtcccggatacctccagatttgcccatgcatccggcaccaaggcacataacggaggaagaactttctgtgctggaaagttgtttacatcgctggaggacagaaatagaaaatgacaccagagatttgcaggaaagcatatccagaatccatcgaacaattgaattaatgtactctgacaaatctatgatacaagttccttatcgattacatgccgttttagttcacgaaggccaagctaatgctgggcactactgggcatatatttttgatcatcgtgaaagcagatggatgaagtacaatgatattgctgtgacaaaatcatcatgggaagagctagtgagggactcttttggtggttatagaaatgccagtgcatactgtttaatgtacataaatgataaggcacagttcctaatacaagaggagtttaataaagaaactgggcagccccttgttggtatagaaacattaccaccggatttgagagattttgttgaggaagacaaccaacgatttgaaaaagaactagaagaatgggatgcacaacttgcccagaaagctttgcaggaaaagcttttagcgtctcagaaattgagagagtcagagacttctgtgacaacagcacaagcagcaggagacccagaatatctagagcagccatcaagaagtgatttctcaaagcacttgaaagaagaaactattcaaataattaccaaggcatcacatgagcatgaagataaaagtcctgaaacagttttgcagtcggcaattaagttggaatatgcaaggttggttaagttggcccaagaagacaccccaccagaaaccgattatcgtttacatcatgtagtggtctactttatccagaaccaggcaccaaagaaaattattgagaaaacattactagaacaatttggagatagaaatttgagttttgatgaaaggtgtcacaacataatgaaagttgctcaagccaaactggaaatgataaaacctgaagaagtaaacttggaggaatatgaggagtggcatcaggattataggaaattcagggaaacaactatgtatctcataattgggctagaaaattttcaaagagaaagttatatagattccttgctgttcctcatctgtgcttatcagaataacaaagaactcttgtctaaaggcttatacagaggacatgatgaagaattgatatcacattatagaagagaatgtttgctaaaattaaatgagcaagccgcagaactcttcgaatctggagaggatcgagaagtaaacaatggtttgattatcatgaatgagtttattgtcccatttttgccattattactggtggatgaaatggaagaaaaggatatactagctgtagaagatatgagaaatcgatggtgttcctaccttggtcaagaaatggaaccacacctccaagaaaagctgacagattttttgccaaaactgcttgattgttctatggagattaaaagtttccatgagccaccgaagttaccttcatattccacgcatgaactctgtgagcgatttgcccgaatcatgttgtccctcagtcgaactcctgctgatggaagataaactgcacactttccctgaacacactgtataaactctttttagttcttaacccttgccttcctgtcacagggtttgcttgttgctgctatagtttttaacttttttttattttaataactgcaaaagacaaaatgactatacagactttagtcagactgcagacaataaagctgaaaatcgcatggcgctcagacattttaaccggaactgatgtataatcacaaatctaattgattttattatggcaaaactatgcttttgccaccttcctgttgcagtattactttgcttttatcttttctttctcaacagctttccattcagtctggatccttccatgactacagccatttaagtgttcagcactgtgtacgatacataatatttggtagcttgtaaatgaaataaagaataaagttttatttatggctacctatgtgtttgtaagcaggtatattgtatattagtgtattagtaatactagataaatgaattttgtctggggattaagattggatagttaatagattaatacaatcttttaattctgctctaatgctagcaaattggaaaatgtttaagtctttgacacttaaatttatctatatttttaacaaagttcttgaacttagtatggcaccggaacctgttttgaattcagtcaggtttttactcaagtaagtggttgattttttttaagtcaaactacactgaaacttttatccttttcttagattaatcttactttttaaatgtatttacaatatacagcaaggtgattatttcaagagaatcccaaagtacttgaataagggctattgtaaaatttaaaagaaatatttatatatacacatatatacacatacacacatgtatatatatattcttcataatggaggacaatgttttgcaatatataaatcattctatttttgtaaattgtatatcactttaattgaaaatgttctctactaattaatactgtgaaacaaaattgatgttgtttaactagaagttatgagtatcttaactgcctttattccttttcaaaaaggaaaaagctgtagaacattttgtagatgaaactactgtttaagattaatgaattaatattgtgaatgaaaatcaaaatccatactttaaaggtaatcatgttactaacaacctatttttgaattcataaaaatttctttataaatgatgttttgtgaacatagtaaaatagaccattatactatgtgtatgtttgatacagcgtcgccaaaactagtgttctttattagtgcctctcacaaaagatcctggatggaggagtaagatgaaatattatgctattatatgatgctgtttgtaaaggtattaatgtactagtaaggtgttaatgacaaggaattagtactattcctgttgtaaagttagattttgcatattgtatctatcaaaatatgtttgggtttagattttaagttgtctactgagcagatttctgcattggttttccagtcctgttaaaagtttagaaacttcatatgtgtcatcacagcttttgtaaagaaagtatccttaatattttatgacattct

SEQ ID NO: 56214 - DNA, 4935 bp, Homo Sapiens; identical to SEQ ID NO: 24773

SEQ ID NO: 56215 - DNA, 5142 bp, Homo Sapiens
gaattcggccgagaggacgagggggagggccagagctgcgcgtgctgctttgcccgagcccgagcccgagcccgagcccgagcccgagcccgagcccgagcccgaacgcaagcctgggagcgcggagcccggctagggactcctcctatttatggagcaggcacccaacatggctgagccccggggccccgtagaccatggagtccagattcgcttcatcacagagccagtgagtggtgcagagatgggcactctacgtcgaggtggacgacgcccagctaaggatgcaagagccagtacctacggggttgctgtgcgtgtgcagggaatcgctgggcagccctttgtggtgctcaacagtggggagaaaggcggtgactcctttggggtccaaatcaagggggccaatgaccaaggggcctcaggagctctgagctcagatttggaactccctgagaacccctactctcaggtcaagggatttcctgccccctcgcagagcagcacatctgatgaggagcctggggcctactggaatggaaagctactccgttcccactcccaggcctcactggcaggccctggcccagtggatcctagtaacagaagcaacagcatgctggagctagccccgaaagtggcttccccaggtagcaccattgacactgctcccctgtcttcagtggactcactcatcaacaagtttgacagtcaacttggaggccaggcccggggtcggactggccgccgaacacggatgctaccccctgaacagcgcaaacggagcaagagcctggacagccgcctcccacgggacacctttgaggaacgggagcgccagtccaccaaccactggacctctagcacaaaatatgacaaccatgtgggcacttcgaagcagccagcccagagccagaacctgagtcctctcagtggctttagccgttctcgtcagactcaggactgggtccttcagagttttgaggagccgcggaggagtgcacaggaccccaccatgctgcagttcaaatcaactccagacctccttcgagaccagcaggaggcagccccaccaggcagtgtggaccatatgaaggccaccatctatggcatcctgagggagggaagctcagaaagtgaaacctctgtgaggaggaaggttagtttggtgctggagaagatgcagcctctagtgatggtttcttctggttctactaaggccgtggcagggcagggtgagcttacccgaaaagtggaggagctacagcgaaagctggatgaagaggtgaagaagcggcagaagctagagccatcccaagttgggctggagcggcagctggaggagaaaacagaagagtgcagccgactgcaggagctgctggagaggaggaagggggaggcccagcagagcaacaaggagctccagaacatgaagcgcctcttggaccagggtgaagatttacgacatgggctggagacccaggtgatggagctgcagaacaagctgaaacatgtccagggtcctgagcctgctaaggaggtgttactgaaggacctgttagagacccgggaacttctggaagaggtcttggaggggaaacagcgagtagaggagcagctgaggctgcgggagcgggagttgacagccctgaagggggccctgaaagaggaggtagcctcccgtgaccaggaggtggaacatgtccggcagcagtaccagcgagacacagagcagctccgcaggagcatgcaagatgcaacccaggaccatgcagtgctggaggccgagaggcagaagatgtcagcccttgtgcgagggctgcagagggagctggaggagacttcagaggagacagggcattggcagagtatgttccagaagaacaaggaggatcttagagccaccaagcaggaactcctgcagctgcgaatggagaaggaggagatggaagaggagcttggagagaagatagaggtcttgcagagggaattagagcaggcccgagctagtgctggagatactcgccaggttgaggtgctcaagaaggagctgctccggacacaggaggagcttaaggaactgcaggcagaacggcagagccaggaggtggctgggcgacaccgggaccgggagttggagaagcagctggcggtcctgagggtcgaggctgatcgaggtcgggagctggaagaacagaacctccagctacaaaagaccctccagcaactgcgacaggactgtgaagaggcttccaaggctaagatggtggccgaggcagaggcaacagtgctggggcagcggcgggccgcagtggagacgacgcttcgggagacccaggaggaaaatgacgaattccgccggcgcatcctgggtttggagcagcagctgaaggagactcgaggtctggtggatggtggggaagcggtggaggcacgactacgggacaagctgcagcggctggaggcagagaaacagcagctggaggaggccctgaatgcgtcccaggaagaggaggggagtctggcagcagccaagcgggcactggaggcacgcctagaggaggctcagcgggggctggcccgcctggggcaggagcagcagacactgaaccgggccctggaggaggaagggaagcagcgggaggtgctccggcgaggcaaggctgagctggaggagcagaagcgtttgctggacaggactgtggaccgactgaacaaggagttggagaagatcggggaggactctaagcaagccctgcagcagctccaggcccagctggaggattataaggaaaaggcccggcgggaggtggcagatgcccagcgccaggccaaggattgggccagtgaggctgagaagacctctggaggactgagccgacttcaggatgagatccagaggctgcggcaggccctgcaggcatcccaggctgagcgggacacagcccggctggacaaagagctactggcccagcgactgcaggggctggagcaagaggcagagaacaagaagcgttcccaggacgacagggcccggcagctgaagggtctcgaggaaaaagtctcacggctggaaacagagttagatgaggagaagaacaccgtggagctgctaacagatcgggtgaatcgtggccgggaccaggtggatcagctgaggacagagctcatgcaggaaaggtctgctcggcaggacctggagtgtgacaaaatctccttggagagacagaacaaggacctgaagacccggttggccagctcagaaggcttccagaagcctagtgccagcctctctcagcttgagtcccagaatcagttgttgcaggagcggctacaggctgaagagagggagaagacagttctgcagtctaccaatcgaaaactggagcggaaagttaaagaactatccatccagattgaagacgagcggcagcatgtcaatgaccagaaagaccagctaagcctgagggtgaaggctttgaagcgtcaggtggatgaagcagaagaggaaattgagcgactggacggcctgaggaagaaggcccagcgtgaggtggaggagcagcatgaggtcaatgaacagctccaggcccggatcaagtctctggagaaggactcctggcgcaaagcttcccgctcagctgctgagtcagctctcaaaaacgaagggctgagctcagatgaggaattcgacagtgtctacgatccctcgtccattgcatcactgcttacggagagcaacctacagaccagctcctgttagctcgtggtcctcaaggactcagaaaccaggctcgaggcctatcccagcaagtgctgctctgctctgcccaccctgggttctgcattcctatgggtgacccaattattcagacctaagacagggaggggtcagagtgatggtgataaaaaaaaaaaaatcatcagcaataagctgatagatggactttccactgtaggagtggacgtttcaagccaactgagccttttcctcaagtgccgacacctccctcatctctcttatagtggaaggatggtcagcattaggctgatggggactgagaaggataggaagggatagaaattgccatgtgtataaagctttattctttagcccttaaccctaaggctcagggaaataccctatgttattgtgctccctggattcctgcaactcattttccttccactctggagcagggtgaggggaatgttatgggtaacagacatgcaggcatggctctacccatttctttgcacaagtatggggcccatgtggtagtccccatacccctccagttcctatatttttgtcttcttcctttcccctctttgccattcctaccttgcatttttcctgtcagtgccttagccaaggcaaggagataaggatgctcttcttgctttttatatctgcacattcatacctctccaaagaccagcttttccccagccagggccctcagccttccctgctgccccagtgattgattgagagagctgttggggtttctctgccaatgacccctgggagagggactttggtagggtcatgataaagtggcgggggtcttggtcctgctcagggttttcatccttcctcctctccctcctctgtgactgtggatatggttataaggtggttgcacctgggagccctgacaactggctgcacaaattccaaaagtaaaggtgtcagtccctgtggccttccttggggcttctctgaccacatgtgcccaacttcaataagagaaccaagggaccttcattttctgaggtgcttggctctgattcagggctttgcaaggggttagaagctgactgtaaaaatgggaagaggcaacggaagacatttatttctcctttggattttggggagaaccaagccctggtagggaagaggtaagggggatgattcacctccatatttcctaagcaggttgtatagggagccggtggcaggaggaaggctgttttcacaaatgacttgtaatgtcgtgattaaaaaaattcctatattcttctgcaaatcaaacgttctttcccaatccaatccagccttggttttattttaaattaaatattaaaattacacatttatattgaaaaaaaaaaaaaaaaaaaaaaaaaaaaaaaaaa

SEQ ID NO: 56216 - DNA, 5534 bp, Homo Sapiens; identical to SEQ ID NO: 30297

SEQ ID NO: 56217 - DNA, 4954 bp, Homo Sapiens
atcacagcttggtgctggggctcagcatggccaggtggctaaccagggcttggtgtcaactacatttgggatgatgacacttggaggacacagagccactgtgcagcaggagtcgccactgctaacagccagagtgtcccagaagcttttgttgacaattccagtttccgaacaaaacatttcggcaatggtgagggcttcgatcccttctctgatttgctgtcagccatgaacggatggatgtgatgcctgctagccaaaaggcttccctctgtgtgttgcagtcctgtggcattatgcatgccccctcccagtgaccccaggctttttatggctgtgagacacgttaaaatttcaggggtaagacgtgaccttttgaggtgactataactgaagattgctttacagaagccaaaaaaggtttttgagtcatgatgcaagaatctgggactgagacaaaaagtaacggttcagccatccagaatgggtcgggcggcagcaaccacttactagagtgcggcggtcttcgggaggggcggtccaacggagagacgccggccgtggacatcggggcagctgacctcgcccacgcccagcagcagcagcaacaggcacttcaggtggcaagacagctccttcttcagcagcaacagcagcagcaagttagtggattaaaatctcccaagaggaatgacaaacaaccagctcttcaggttcccgtgtcagtggctatgatgacacctcaagttatcactccccagcaaatgcagcagatcctccagcaacaagtgctgagccctcagcagctccaggttctcctccagcagcagcaggccctcatgcttcaacagcagcagcttcaagagttttataaaaaacaacaggaacagttgcagcttcaacttttacaacaacaacatgctggaaaacagcctaaagagcaacagcaggtggctacccagcagttggcttttcagcagcagcttttacagatgcagcagttacagcagcagcacctcctgtctttgcagcgccaaggccttctgacaattcagcccgggcagcctgcccttccccttcaacctcttgctcaaggcatgattccaacagaactgcagcagctctggaaagaagtgacaagtgctcatactgcagaagaaaccacaggcaacaatcacagcagtttggatctgaccacgacatgtgtctcctcctctgcaccttccaagacctccttaataatgaacccacatgcctctaccaatggacagctctcagtccacactcccaaaagggaaagtttgtcccatgaggagcacccccatagccatcctctctatggacatggtgtatgcaagtggccaggctgtgaagcagtgtgcgaagatttccaatcatttctaaaacatctcaacagtgagcatgcgctggacgatagaagtacagcccaatgtagagtacaaatgcaggttgtacagcagttagagctacagcttgcaaaagacaaagaacgcctgcaagccatgatgacccacctgcatgtgaagtctacagaacccaaagccgcccctcagcccttgaatctagtatcaagtgtcactctctccaagtccgcatcggaggcttctccacagagcttacctcatactccaacgaccccaaccgcccccctgactcccgtcacccaaggcccctctgtcatcacaaccaccagcatgcacacggtgggacccatccgcaggcggtactcagacaaatacaacgtgcccatttcgtcagcagatattgcgcagaaccaagaattttataagaacgcagaagttagaccaccatttacatatgcatctttaattaggcaggccattctcgaatctccagaaaagcagctaacactaaatgagatctataactggttcacacgaatgtttgcttacttccgacgcaacgcggccacgtggaagaatgcagtgcgtcataatcttagtcttcacaagtgttttgtgcgagtagaaaacgttaaaggggcagtatggacagtggatgaagtagaattccaaaaacgaaggccacaaaagatcagtggtaacccttcccttattaaaaacatgcagagcagccacgcctactgcacacctctcaatgcagctttacaggcttcaatggctgagaatagtatacctctatacactaccgcttccatgggaaatcccactctgggcaacttagccagcgcaatacgggaagagctgaacggggcaatggagcataccaacagcaacgagagtgacagcagtccaggcagatctcctatgcaagccgtgcatcctgtacacgtcaaagaagagcccctcgatccagaggaagctgaagggcccctgtccttagtgacaacagccaaccacagtccagattttgaccatgacagagattacgaagatgaaccagtaaacgaggacatggagtgactatcggggcgggccaaccccgagaatgaagattggaaaaaggaaaaaaaaaaaacacgtcaaaagttagcagtgaaattgttctccatttgttgtacagtctggaggattttcactacgttttgacaactctgaaatgtgttaactcttagtgccatcaagaaccccatttgggagtatttttgatttttctactttttgttgaaaaaaggaatttgtactctgtgcattggatggacttgtttggtacttgggattttcctctcttaaccgtcaacatcagtgttgtaaatttgctaaactgattcacttttagcagcagactttgaactgcagtcctgccaacgttggacactgaggacgcccgacagagcttgtgcacctaagctgcagaccaagcctttgcccagaatttaaggattccaatggacgacctatttgcacagtactgcatgttgattatcactgcctttactccttttttttttttttttttttttttgcttccagttgggatggggaaggcctttgtgtgtgtattggggggaggggttaaaaaataattatcccaaactttttaatgtattgctttttttttttttttccttctactataccattttaagttctgacctcaggcctccatttgggccgatggcctcttggaggcttaaagttttctgtaccttgtgatgaatgttaataggtgtttttattatacaaagctgaatgtcatttctcgtttgtagctttctgtcactcattccatcttccttcagacatcaccacgtttctctaaagtcagaaaacattccgttttggtctttttcaaaaaggtcccaaatgctgcactctacacatgaaggccctctcacacagacgtgacgtcctgccagaaagagaatgaatgacagaaaaaaaaaagagagacaaactctaggaacaatgccgattcattccacgcagcagtattgggggtggttcgggggaggggtgtttcggattttctttttttcttttcttttatttttttttttttgcagcaaccattaataaatgccaccacattctaccagcacaaggaaacataggcagcactgaaaaaaaaaaaaaagctcatattaattagactgacaatatggccttggaaggctctcccttgtggaaccaagttgccatgggccttgggtgctctgcgataacgggtgtgggttggttttgtttgcaaaatggccaaaaaaaaaaccggcttccccgagcagctgccctgaaagtaggggtggcggcggcggcgctgagtttatacattagttcagacctacttggtggcattaaactgtttgaatgcaaattcgatttcagattgaacttgttaagggagttaacgagggctgagttcagcaaatgctaaagtgttaatttcaaatatgcaaatttggtactgcagtttgttatgcaatattatatcaccaacccagtatcacaaaaactcatagaagatatcatgtaggccctgggctttgggggggtcccaaacatggtatgcagaaatgtgatggttacaggtcagtacaacctcagtccttagaacccctccacacttcagctctgcacccactttcctgtcatttatttatataggactgtagttttttttagttcgagagcctttcgaagcttaatttatattctttctttgtaccttttttctaaaattaccaaagatattacacaaaggtaaattatgttctctgttttatgctttatctgatgaagccaaatatcctcttattgttgatcaaaggaggcaaaagaatttagaggcaaatgacaagcgataggctattgcaacctgagaaagagaactgctccttcatcgtaaatttagaagaccaagtagataatggaaccaaagttgtacttttttctagtagttatttttcctttttctttttgtgtacctctacagagaccaaaactcattctcttaaagagattttatggggctactgcagataaaaataggacacaatattaaaggagctacagaaggaagggagtcccatctcaaaaaaaaaatgaatgtatgccactgcaattagagtatccaataaaggagacagtttagagtcaggacagaaaagcttccataattgaactagattacataatagtatttctagaaaaagagatatttttagattgtatgccacttttgtttaagaactgtgctgtgatcactgtattaattttggtttatcttggcatatatccttcagtttgtttttatttttaatttttcctttttttccgattaggctttggtcagcatttttcatttaaagaaaagtaacactcccatccactcataagcttggtacaaaaacttctctggcagttacttttgaagcttcactctgctttctgtataaagggcagtctgtggtcacgcaagacttaaaaaaaaaaaaaaaaaaaaaaaaaaaaaa

SEQ ID NO: 56218 - DNA, 3607 bp, Homo Sapiens
gggacgggaggagccggggcagccagaagaggtgggaaaagcggaggaggacgcccaggaggaggcggcggcggcggccgggaagtgaaaggtctcgcaaagttcatgcggcggctgcgggcgccgagccccgggatagcggcagacgagcccgcagggccgctccgcggggcagcgcagccaggccggctatggtcccggggctcccgccgccccccaggtgcccgggacccgccaggccggtgcgcgagggtcaccccacctccccgcgcggtcccggcccctggctcccagctgccggcgaccgctgaccgagcccggcgccccaggaggaggaagaaaccagggccccgttccctcccgaggacggcggcgcttcatcccgcagcccagaggtctcggctccctccggcacccgcccggcccggctgctccctggctcctcccggccatggggagctgcgcgcggctgctgctgctctggggctgcacggtggtggccgcaggactgagtggagtagctggagtgagttcccgctgtgaaaaagcctgcaaccctcggatgggaaatttggctttggggcgaaaactctgggcagacaccacctgcggtcagaatgctaccgaactgtactgcttctacagtgagaacaaggatctgacttgtcggcagcccaaatgtgacaagtgcaatgctgcctatcctcacctggctcacctgccatctgccatggcagactcatccttccggtttcctcgcacatggtggcagtctgcggaggatgtgcacagagaaaagatccagttagacctggaagctgaattctacttcactcacctaattgtgatgttcaagtcccccaggccggctgccatggtgctggaccgctcccaggactttgggaaaacatggaagccttataagtactttgcgactaactgctccgctacatttggcctggaagatgatgttgtcaagaagggcgctatttgtacttctaaatactccagtccttttccatgcactggaggagaggttattttcaaagctttgtcaccaccacacgatacagagaacccttacagtgccaaagttcaggagcagctgaagatcaccaaccttcgcgtgcagctgctgaaacgacagtcttgtccctgtcagagaaatgacctgaacgaagagcctcaacattttacacactatgcgatctatgatttcattgtcaagggcagctgcttctgcaatggccacgccgatcaatgcatacctgttcatggcttcagacctgtcaaggccccaggaacattccacatggtccatgggaagtgtatgtgtaagcacaacacagcaggcagccactgccagcactgtgccccgttatacaatgaccggccatgggaggcagctgatggcaaaacgggggctcccaacgagtgcagagcctgcaagtgtaatgggcatgctgatacctgtcacttcgacgttaatgtgtgggaggcatcagggaatcgtagtggtggtgtctgtgatgactgtcagcacaacacagaaggacagtattgccagaggtgcaagccaggcttctatcgtgacctgcggagacccttctcagctccagatgcttgcaaaccgtgttcctgccatccagtaggatcagctgtccttcctgccaactcagtgaccttctgcgaccccagcaatggtgactgcccttgcaagcctggggtggcagggcgacgttgtgacaggtgcatggtgggatactggggcttcggagactatggctgtcgaccatgtgactgtgcggggagctgtgaccctatcaccggagactgcatcagcagccacacagacatagactggtgtcatgaagttcctgacttccgtcccgtgcacaataagagcgaaccagcctgggagtgggaggatgcgcaggggttttctgcacttctacactcaggtaaatgcgaatgtaaggaacagacattaggaaatgccaaggcattctgtggaatgaaatattcatatgtgctaaaaataaagattttatcagctcatgataaaggtactcatgttgaggtcaatgtgaagattaaaaaggtcttaaaatctaccaaactgaagattttccgaggaaagcgaacattatatccagaatcatggacggacagaggatgcacttgtccaatcctcaatcctggtttggaataccttgtagcaggacatgaggatataagaacaggcaaactaattgtgaatatgaaaagctttgtccagcactggaaaccttctcttggaagaaaagtcatggatattttaaaaagagagtgcaagtagcattaagatggatagcacataatggcacttgtctatgtacaaaacacaaactttagagcaagaagacctcagacaggaaactggaattttttaaagtgccaaaacatatagaaatgtttgaatgcatgggtcttatctaatttatctcttctggacccatgtttaaatacagttttatttcatgaagagaaatgaaaacccctacactgatatctgttttctatgggactgattctgaaattcttaactattaagaatattttaatagcagcatgacatttagcagtaatccattaagggcagtacctctaacaaggacgccttccagcttcagctatgttacttacgtttgatgctacttaaagtaatgaatgacgttttaaggaatccctaaccctactatcagaaaaggtgtttgttaaagagccttctcttgtgtgttacgcatgaactttggtctgtaggtgttaaatggaacctctccatgtgtatatagtatttccttgtataaagcactttactacctaccacttgtgttgtgaacgtttggtgactgctgttgaaagaaggaaaagggtgtgtgagaaagcctactgaagcagctgcacggccactacatgtggacaaaagtgaacatataaaagaagttgtgctatttaactctgaatacttggagaaactaggtgaagatgcaaccagaaaggagaatatgtatgcgtgaagtctcagctttgagckggaggctagaaagagcagccagagaactttttaaaaactaaccagaagagctttaaaataagagaaagaaatcataaatgtagacatatgcttggctaaaggggaaatggactttaaattttaaagagctcatttgcaatgcacttgtatacacttcaaaaattattgtagacacagaatttgttatatttttgtgcttagtatttaaacctgaacattgaaacagttttcctccttgtctttcttaacagtaatagtcattatatttacctgttttttaacacaatgtatgtgatagtcaaaaaatcacagtttttcattattattcatcttctgtacccacgcataaccactatacatagtttcttttgtacttgaatatacaaaacatgaacacagtgccatatgaataatttcacatacagaacctttttttctctgaagtcctgtggacttgcaaatatatatatatattgctttgttaatttgtttttatatttcatatatgtaataaaggaatatgatctgaaa

SEQ ID NO: 56219 - DNA, 1457 bp, Homo Sapiens
gccgtgcgtgagcgtgcgcgggcgcgtcggccggcgagggagcagcaaacggccggcggcgggtgccgcgcggggggcgggcggcgcggagtaggtggcggcggccatggccgaggcgtcgccgcatcccggacggtacttctgccactgctgctccgtggagatcgtcccgcgcctgccggattatatctgtccaagatgcgagtctggttttatcgaggagcttccggaagagaccaggagcacagaaaatggttctgccccctccacagctcccacagaccagagccggccaccgttggagcacgtggaccagcacctgttcacgctgccgcagggctacggacagtttgctttcggcatcttcgatgacagcttcgagatccccacgttccctcctggggcgcaggctgacgacggcagggaccctgagagccggcgggagagagaccatccgtcccggcaccggtacggcgcccgacagccccgcgcccgcctcaccacgcggcgggccaccggccggcacgaaggcgtccccacgctggaagggatcatccagcagctcgtcaacggcatcatcacgcccgccaccatccccagcctgggcccctggggagtcctgcactcaaaccctatggactacgcctggggggccaacggcctggatgccatcatcacacagctcctcaatcagtttgaaaacacaggccccccaccggcagataaagagaaaatccaggccctccccaccgtccccgtcactgaggagcacgtaggctccgggctcgagtgccctgtgtgcaaggacgactacgcgctgggtgagcgtgtgcggcagctgccctgcaaccacctgttccacgacggctgcatcgtgccctggctggagcagcacgacagctgccccgtctgccgaaaaagcctcacgggacagaacacggccacgaacccccctggcctcactggggtgagcttctcctcctcgtcgtcatcgtcctcctccagctcgcccagcaacgagaacgccacatggtcccctctggggcgtccccagcctccccgtcctctgtctaacctcaccctctaaacgttcagcggtggaaagatttttataattttaaattattactgctttgaaataaacggacgtttgagctcacgtggcggccatgcatggtttgtggcggaagacggggcccagcggctcccccagcgctgaagcacggggttcagcggctcccccagtgctgcaggtgccgccaggacgggccacgtgggcccccagcctccccctcggccgcctccacgacccggagtaggggggctcgggaccatgaggatgaccagcaaaattcaagaacaaaactgctccaacagacttttttaaaggaaaaaatatgtgtatcttgaaagctatttaaaatacactacttacaaagagaaaaaaaaaaaaaaaa

SEQ ID NO: 56220 - DNA, 2534 bp, Homo Sapiens
cttgcaccgcctgccgaatcaattcaacatggcagccatgcgctggcgatggtggcagcggctgttaccttggaggttgctgcaggcccgtggctttccacaaaattctgcacccagcctgggcctaggagcgaggacttattcccagggcgactgctcgtattcgcgcacggcgctgtatgatctgctcggcgtcccctccacagccacgcaggcccaaatcaaggcggcttactaccgtcagtgctttctctaccacccggaccgcaactccgggagcgcggaggccgccgagcgcttcacgcgcatctcccaggcctacgtggtgctgggcagtgccaccctccgtcgcaagtatgatcgcggcctactcagcgacgaggacctgcgcggacctggcgtccggccctccaggacgcccgcacccgaccccggctcgccgcgtaccccgccgcccacctctcggacccacgacggttctcgggcctcccccggcgccaaccgcacgatgttcaactttgacgccttctaccaggcccactacggggaacaactggagcgggaacggcgcctgagggcccggcgggaggcccttcgcaaacggcaggagtatcggtccatgaaaggcctccgctgggaggatacccgagacacggctgccattttcctcatcttttcaatcttcatcatcatcggcttttatatttaatcggagagagaagggaaggggagtgtccccagccaaccccccagaaacggccttttttcctgcctctgaacccttggccattgatagtctacctttgctgggatccgaaggaactgtactccccctgccctccccgacccgcccagcttagccgatgacctgcacatcgctccactgtggtccagaaaaggaggcctttcgatgtctgagaaagaggccccacgctgtagagtcccgaaagcccaggagtgaagggggttcctggagtctctagggtgcttcttccagagtctgtcttcttgcttccagatgtggtcaacttctggaacactcgctgtagctttattgtttagccccaagcaagatttatctcctcctgccccgcatgtgtatggtgggcctctgtaaccttgaaatgtgcaatgtgaccaattgttgactaccaaaagaaaaggtctggggttgtacgaaacttgtctttctgtgacttccccaagccgcaggtgagacctggtccagggtaagaatgggatcggtggagagcctgtcgttcctcccgctaaggtcagccccctggggcactcctccttatgttgatagcatgtaggagtgagaaaaagtcattgagcataaggaatgagtgttcctgtgcccatatttaatgtgtgaccttggagaagttactctgtaggcatgacagcagaggagaaaatcatttggcatcttgaggtctgtcatgctttattatccatagtttttggggggttttttgttttgttttgtttttgagatggagtcttgcgctctgttgcccaggctggagtgcagtggtgcgatcttagctcactgcaacctccacctcccgggttcaagcgattctcctgcctcagcctcctgtgtaactgggattacaggctcccaccacacctggctagtgttttgtatttttagtagatacggggtttcaccatgctggccagactgaggtctcgaactgccgacctcaggctgtctgcccgtccagcctcccaaagtgctgggattgcaggcatgagccactgctcccggccctattatccatagttctaatccacagggattacagcataatgctagcagggccaggttcatccttgagacagtgtggctggctgtcacctggtcctccctttaccagccagccccattgcacactgtgcagcccatcccctcccagaaatagagtgacaaactctgcacttaagtcccctgtttctgtttaacttgcagtgcttatcacaggcccttccttaattttttaaacaaggctgcttgaggctggggtaaattttggggctttgggagtacacaggactactgagggacggggagttggtggcttggtgttcatggtggagacttggttctttacgcagagcaggctaaaggcgtgttttttctgctctgtttctaattcatgttaagtagttggtcatcactttggtcagagctgctgctgaagctctcttaactgtgagtcactggacgttggcagggagttggctgtgagattgtaggtgctcaagtgtttctgttcgggactgagtgtgaatctgtaaaaggggaaaatcctcgcaagaggtctacgagaaggatgagggcccaagtctagggtctaaacaaagccaggagtggtttggtatattactgagtgcaatcattgcgtgccattcctgcactcaatgtattgtgtaaaatccttaggtaaaatgggataaacccacagctggtcctacttggcctcttgaaaaccattccatcattgtgccaatctagcctgaaaagg

SEQ ID NO: 56221 - DNA, 2516 bp, Homo Sapiens
tcgacgtcggggtcaatgaaaacaaacggggagcccagggggaaggaaggcaggcgaggaagaggcagcgccggggcgccggagggagcagccgggctgcggaagcgcgagcaggaggccggtcgcgggcgcatttttgccgttgtcgcggccgccgccgccgaggcttacccgggaatgtctgggcccgcgcctcgcggcccccaagctccacgctgcgcccgctgtcccggcctctaaaggccgccacgtccctgcggcgcgcgcaggcagaaagcggcttcgtgccggcggagggggcccgggcgggccgggaggggctgccccaggccctgcgcctaccccatcaccgcggccggcgccgggccgggaggatgcgcggtgtggggctctgaagcatggagggggtgttgtacaagtggaccaactatctcacaggctggcagcctcgttggtttgttttagataatggaatcttatcctactatgattcacaagatgatgtttgcaaagggagcaaaggaagcataaagatggcagtttgtgaaattaaagttcattcagcagacaacacaagaatggaattaatcattcctggagagcagcatttctacatgaaggcagtgaatgcagctgaaagacagaggtggctggtcgctctggggagctccaaagcatgtttgactgatacaaggactaaaaaagaaaaagaaataagtgaaaccagtgaatcgctgaaaaccaaaatgtctgaacttcgcctctactgtgacctcttaatgcagcaagttcatacaatacaggaatttgttcaccatgatgagaatcattcatctcctagtgcagagaacatgaatgaagcctcttctctgcttagtgccacgtgtaacacattcatcacaacgcttgaggaatgtgtgaagatagccaatgccaagtttaaacctgagatgtttcaactgcaccatccggatcccttagtttctcctgtgtcaccttctcctgttcaaatgatgaagcgttctgtcagccaccctggttcttgcagttcagagaggagtagccactctataaaagaaccagtatctacacttcaccgactctcccagcgacgccgaagaacctactcagatacagattcttgtagtgatattcctcttgaagacccagatagacctgttcactgttcaaaaaatacacttaatggagatttggcatcagcaaccattcctgaagaaagcagacttatggccaaaaaacaatctgaatcagaagatactcttccatccttctcttcctgaagaaactgaagtgtccaacttcctctaagtattgctatgcaaaagctgctgtaattaaactattgttatagggagtagttttttcccttaggactctgcactttatagaatgttgtaaaacagacaaacaagaaaacaaaccacatacttttgaagtgtattttatctttatatagtttgtttgcaagagtattttcctaataacttcacagtatgaatgtgcatcttttttttttgaacaaatgatggtgtaacattttgacatccataaggacaaatgtagatatttttcttaaaaactctgaggggactgacagcatggtcagggtgtattgtagcttataaacatgaaatcttataaggtttcagtttgacagaagtgtgatatatgtaacttgtgccatggaccaaatggtcactttaccacagctaaaaatgagttacgatagcagcttgatggtgattgtattgtattcctttaatcaaaaaggaaacacaatattctaagtatctttagcccaaataccatgacatattgagcatctttaaataaccagactgtattgtccttcatatgtgaagttgacactactgatttgtcaataccaaattttgggttaaagtgtttaatttttatgtatttattttcttgttgcctcaaaagatgattgcattctaacttttgtgacctaccaaatttaagatgtgtatacgttgttctttacgttgttctagaaaagagattttaatgctgtagtgactttgctcacttacactagagaaataaacaactttcaatggaagagaattttagtgctttttttttcctaaaatagatattaagctgctgttgtaaagtattgtttgcagctctttccaatatctagagacatttttatttatgaatatttatacaaaaaggaattctgtcaagatgactgctctatatcacttgagaatggcattatttaattaaagaacaaatagcattttttggtagtgcctgtccatacctattgtcattgtttgccttgtaatctgtttttttgaattcattttgggctgatagttttgtttaaggttttggataaggagcactttaaaacaaactggtgtgttgtttttaagttaatcatatgtttaataaatgcgtggtttttgcattcaaaaaaaaaaaaaaaaaaaaaaaaaaaaaaaaaaaaaaaaaaaaaaaaa

SEQ ID NO: 56222 - DNA, 3210 bp, Homo Sapiens
gtgcggatgcggggaggctgcgtgtgtgcgcagggagagaacgccggccaccttcccgcttccgagctgggtgcgcgccgagcacaggagattgcctgcgtttaggaggtggctgcgttgtgggaaaagctatcaaggaagaaattgccaaaccatgtctttttttctgtttcagagtagttcacaacagatctgagtgttttaattaagcatggaatacagaaaacaacaaaaaacttaagctttaatttcatctggaattccacagttttcttagctccctggacccggttgacctgttggtctcttcccgctggctgctctatcacgtggtgctctccgactactcaccccgagtgtaaagaaccttcggctcgcgtgcttctgagctgctgtggatggcctcggctctctggactgtccttccgagtaggatgtcactgagatccctcaaatggagcctcctgctgctgtcactcctgagtttctttgtgatgtggtacctcagccttccccactacaatgtgatagaacgcgtgaactggatgtacttctatgagtatgagccgatttacagacaagactttcacttcacacttcgagagcattcaaactgctctcatcaaaatccatttctggtcattctggtgacctcccacccttcagatgtgaaagccaggcaggccattagagttacttggggtgaaaaaaagtcttggtggggatatgaggttcttacatttttcttattaggccaagaggctgaaaaggaagacaaaatgttggcattgtccttagaggatgaacaccttctttatggtgacataatccgacaagattttttagacacatataataacctgaccttgaaaaccattatggcattcaggtgggtaactgagttttgccccaatgccaagtacgtaatgaagacagacactgatgttttcatcaatactggcaatttagtgaagtatcttttaaacctaaaccactcagagaagtttttcacaggttatcctctaattgataattattcctatagaggattttaccaaaaaacccatatttcttaccaggagtatcctttcaaggtgttccctccatactgcagtgggttgggttatataatgtccagagatttggtgccaaggatctatgaaatgatgggtcacgtaaaacccatcaagtttgaagatgtttatgtcgggatctgtttgaatttattaaaagtgaacattcatattccagaagacacaaatcttttctttctatatagaatccatttggatgtctgtcaactgagacgtgtgattgcagcccatggcttttcttccaaggagatcatcactttttggcaggtcatgctaaggaacaccacatgccattattaacttcacattctacaaaaagcctagaaggacaggatactttgtggaaagtgttaaataaagtaggtactgtggaaaattcatggggaggtcagtgtgctggcttacactgaactgaaactcatgaaaaacccagactggagactggagggttacacttgtgatttattagtcaggcccttcaaagatgatatgtggaggaattaaatataaaggaattggaggtttttgctaaagaaattaataggaccaaacaatttggacatgtcattctgtagactagaatttcttaaaagggtgttactgagttataagctcactaggctgtaaaaacaaaacaatgtagagttttatttattgaacaatgtagtcacttgaaggttttgtgtatatcttatgtggattaccaatttaaaaatatatgtagttctgtgtcaaaaaacttcttcactgaagttatactgaacaaaatattatttaaaattacttcaactttgtgtttttaaatgttttgacgatttcaatacaagataaaaaggatagtgaatcattctttacatgcaaacattttccagttacttaactgatcagtttattattgatacatcactccattaatgtaaagtcataggtcattattgcatatcagtaatctcttggactttgttaaatattttactgtggtaatatagagaagaattaaagcaagaaaatctgaagtattgtcttgtttttaaaaaatacagttcctagtgtttatagaagtcacttaatttgtctcatttttccacctggaaattaggaataatgtagaatgcaaggcagtaatttccttttggaaaggactctgaaggcagaaaagaagggagagaacctcatgggcagaatattataaaaagagtgtcatattccagcatttgaattggaaagagaagagtgaagatccaagttgcattattaatctgccctgtgttttttccttttaacaatcagtttgagctgctgctgttatgagtttctcatcaagatgaaagccctaatatgtaaagtcaaatccgatttaaattttgtgcttttatagaaagaaatttcttcatagacgtggtgatatatcatttcttggacctgctaatagtaggtcaaaggggagcactccttgccccctgttcctgggtttatgcagttttctttttagagtttatatagggcaagtggttctttttctctgaattacaggatggaaaaaggtcatatcctttgtcaggaaatataaacttgaaagtatgtagtcagctcttgtaatactcatatttatgattgtcctatatgaaaaacaacttcagttaaaactataatgtgtgattctgtataacaaggtgatgtctgtttcccagggctcagacctaatccagttataataaaatcaattaaatgaaatattctatagaatcgatctatgcccttgttaatctccatccatataggagtcacgttctttaagacagatggtggtagttatttttgtggcatggttagatttgactggttttgcagaagattacagttatgtactgcataatgacatatacaatagtggtcccataaaattataatggagcagaaaatctattgcctcatgatgttttagccgttttaatgtcatagcctagtgcattactcacgtgtctgtggagatgctggtgtaaacaaacctactacactgccagttgtataaaagtacagcacattcagttatgtacagtatgtaatactgataatgacaataaatgacaccggtttgtgtatttactttttataa

SEQ ID NO: 56223 - DNA, 4494 bp, Homo Sapiens
ggcccggccggactgagttcgctgctgtcccggttcctctcgagtcggctccaactgccagcccgggttggcgccatgtacgccgtgtacaaacaggcgcatccgcccaccggtctggagttctccatgtactgcaacttcttcaacaacagcgagcgcaacctggtagtggccgggacctcgcagctctacgtgtaccgcctcaaccgcgacgccgaggctctgaccaagaatgacaggagcacagaggggaaggcccaccgggagaagctcgagcttgctgcctccttctccttctttggcaacgtcatgtccatggccagcgtgcagctggcaggagccaagcgggatgccctgctcctaagcttcaaggatgccaagctgtctgtggtggagtacgacccgggcacccatgacctgaagaccctgtcactgcactactttgaggagcctgagcttcgggacgggtttgtgcagaatgtacacacgccgcgagtgcgggtggaccccgacgggcgctgtgcagccatgcttgtctacggcacgcggctggtggtcctgcccttccgcagggagagcctggctgaggagcacgaggggctcgtgggtgaggggcagaggtccagcttcctgcccagctacatcatcgacgtgcgggccctagacgagaagctgctcaacatcatcgacctgcagttcctgcatggctactacgagcctaccctcctcatcctgtttgagcccaaccagacctggcctgggcgcgtggccgtgcggcaggacacgtgctccattgtggccatctcactgaacatcacgcagaaggtgcaccccgtcatctggtccctcaccagcctgccctttgactgcacccaggctctggctgtgcccaagcccataggtggggtggtggtgtttgccgtcaactcgctgttgtacctgaaccagagcgtccccccgtatggcgtggctctcaacagcctcaccacaggaaccacggctttcccgcttcgcacccaggagggtgtgcggatcaccctggactgcgcccaggccaccttcatctcctacgacaagatggtcatctccctcaagggcggcgagatctacgtgctgaccctcatcaccgacggcatgcgcagtgtccgagcgttccactttgacaaggcggccgccagcgtcctcaccaccagcatggtcaccatggagcccgggtacctgttcctgggttctcgcctgggcaattccctcctcctcaagtacacggagaagctgcaggagcccccggccagtgctgtccgtgaggctgccgacaaggaagagcctccctcaaagaagaagcgagtggatgcgacggccggctggtcagctgcgggtaagtcggtgccgcaggatgaggtggacgagattgaagtgtacggcagcgaggcccagtcgggaacacagctggccacctactcctttgaggtgtgtgacagcatcctgaacattggaccctgtgccaatgccgccgtgggcgagcctgccttcctctctgaagagtttcagaacagccccgagccggacctggagattgtggtttgctccggccacgggaagaacggggctttgtcggtgctgcagaagagcatccggccccaggtggtgacaacctttgagcttcccggctgctatgacatgtggacagtcatcgccccggtgcgtaaggaggaggaggacaatcccaagggggagggcacagagcaggaacccagcaccacccctgaagcagacgacgacggccgcagacacggattcctgattctgagccgggaagactccaccatgatcctgcagacggggcaggagatcatggagctggacaccagtggcttcgccactcagggccccacggtctttgctgggaacatcggggacaaccgctacattgtccaagtgtcaccactgggcatccgcctgctggaaggagtgaatcagctgcacttcatccccgtggacctgggcgcccccatcgtgcagtgcgccgtggccgacccctatgtggtcatcatgagtgccgagggccacgtcaccatgttcctgctgaagagtgactcctacggtggccgccaccaccgcctggcgctgcacaagcccccgctgcaccatcagtccaaggtgattacgctgtgcctgtaccgagacctcagcggcatgttcaccactgagagccgcctgggtggggcccgtgacgagctcgggggccgcagtggcccggaggccgagggcctgggctcagagactagccccacagtggatgacgaggaggagatgctgtatggggattcgggctccctcttcagccccagcaaggaggaggcccgaagaagcagccagccccctgctgaccgggaccctgcacccttccgggcagagcctacccactggtgcctgctggtgcgggagaatggcaccatggagatctaccagcttcccgactggcggctggtgttcctggtgaagaacttccctgtggggcagcgggtccttgtggacagctcctttggacagcccactacacagggcgaggcccgcagggaggaggccacgcgccagggggagctgcccctcgtcaaggaggtgctgctggtggcgctgggcagccgccagagcaggccctacctgctggtgcatgtggaccaagagctgcttatctacgaggccttcccccacgactctcagctcggccagggcaatctcaaagtccgctttaagaaggtccctcacaacatcaacttccgtgagaagaagccaaagccatccaagaagaaagcagaaggtggcggcgcagaggagggggctggggcccggggccgcgtggcgcgtttccgctacttcgaggatatttatggctactcaggggtcttcatctgcggcccctcccctcactggctcttggtgaccggccgaggggctctgcggctacaccccatggccatcgacggcccggtcgactctttcgctccattccacaatgtcaactgtccccgcggcttcctgtacttcaacagacagggcgagctgaggatcagtgtcctgcctgcctacctgtcctatgatgccccatggcctgtcaggaagatcccgctgcgctgcacggcccactatgtggcttaccacgtggagtctaaggtgtatgctgtggccaccagcaccaacacgccgtgtgcccgcatcccacgcatgactggcgaggagaaggagtttgagaccatcgagagagatgagcggtacatccacccccagcaggaggccttctccatccagctcatctccccggtcagctgggaggctattcccaatgccaggatcgagctgcaggagtgggagcatgtgacctgcatgaagacagtgtctctgcgcagtgaggagaccgtgtcgggcctcaaaggctacgtggccgccgggacctgcctcatgcagggggaggaggtcacgtgccgagggcggatcttgatcatggatgtgattgaggtggtgcccgagcctggccagcccttgaccaagaacaagttcaaagtcctttacgagaaggagcagaaggggcccgtgaccgccctgtgccactgcaatggccacctggtgtcggccatcggccagaagattttcctgtggagcctgcgggccagcgagctgacgggcatggccttcatcgacacgcagctctacatacaccagatgatcagcgtcaagaacttcatcctggcagccgacgtcatgaagagcatttcgctgctgcgctaccaggaggaaagcaagacgctgagcctggtgtcgcgggatgccaagcccctggaggtgtacagcgtggacttcatggtggacaatgcccagctgggttttctggtgtctgaccgcgaccgcaacctcatggtgtacatgtacctgcccgaagccaaggagagtttcgggggcatgcgcctgctgcgtcgggcagacttccacgtgggtgcccacgtgaacacgttctggaggaccccgtgccggggggccactgaagggctcagcaaaaagtcggtcgtgtgggagaataagcacatcacgtggtttgccaccctggacggcggcatcgggctgctgctgcccatgcaggagaagacctaccggcggctgctgatgctgcagaacgcgctgaccaccatgctgccacaccacgccggcctcaacccccgcgccttccggatgctgcacgtggaccgccgcaccctccagaatgccgtgcgcaacgtgctggatggggagctgctcaaccgctacctgtacctgagcaccatggagcgcagcgagctagccaagaagatcggcaccacaccagacataatcctggacgacttgctggagacggaccgcgtcaccgcccacttctagccccgtggatgccgtcaccaccagcacacggaactacctcccaccccctttttgtacaaaacacaaggaaaaacattttttgcttga

SEQ ID NO: 56224 - DNA, 4500 bp, Homo Sapiens
ggtgcagtgttggaagctccggttctcccggaagtggcccaggtctctctgtcggggtcccctccatctcgctgctgctgaaggccgcgagggcggcggcgatggcggaggcggcgctgttgctgctgcctgaggcggcggcggagcgggacgctagggaaaagctggctctctgggatcggagaccggacacgacggcgccgctgaccgacaggcagacggactcggtattggagctgaaggcggcggcagagaacttgccggtgccagctgagcttccaattgaagacttgtgcagtttaacatcccagtcactgcccattgaactgacttcagtagtgcctgaatctacagaagacattctcttgaagggcttcacttccttaggaatggaagaagaaagaattgaaaccgcacagcagtttttctcatggtttgcaaagctgcaaactcagatggatcaagatgaaggaactaaatatagacagatgagggattacttgtctgggtttcaggagcagtgtgatgctatattgaatgatgtaaacagtgctcttcagcatctggagtctttgcagaaacagtatctttttgtgtccaataagacaggaaccctacatgaagcctgtgaacagctcctaaaagaacagtcggaacttgttgatctggctgaaaacattcaacaaaagctttcctattttaacgaattggaaactattaacacaaaattgaattcccctacattgtcggtgaatagtgacggatttatacctatgctggccaagttagatgattgtataacatatatctcatctcatcctaattttaaagattatcccatatatttgctgaagtttaaacagtgtctttctaaagctttgcacctcatgaagacatatactgtgaacacactacagaccctcacaagtcagttactgaaaagggatccttcatctgtacctaatgcagacaatgccttcacattattttatgtgaaatttcgagctgctgcccccaaagtcagaactcttattgaacaaatagaactgcggtctgaaaaaatacctgaataccaacaactgctaaatgatatccaccagtgttaccttgatcagcgggagctccttttgggccctagtattgcttgcactgttgcagagttaaccagccaaaataatagagatcactgtgccttggttcgtagtggctgtgccttcatggttcatgtctgccaggatgaacaccaactttacaatgaatttttcacaaaaccaacatcaaaattagatgagcttttggagaaactgtgtgtgtcattgtatgatgtcttcaggccattgatcattcatgttattcacttagagactctgtcggaactttgtgggattcttaaaaatgaagtgcttgaagatcatgtgcagaacaatgctgagcaactgggggcatttgcagctggagtcaagcagatgttagaagatgtacaggagcggctcgtctaccgaacccacatctatattcagacggacatcacgggctataaaccagctcctggagatctggcatatcccgataagttagtcatgatggagcaaattgcacagagtttgaaagatgaacagaagaaggtaccttcagaagcttcattttcagatgttcacttagaagaaggagagtctaacagtctgacaaaatctggttcaacagaatccctcaatcctagaccacagaccacaatttctccagcagatcttcatggaatgtggtatcctacggttcgaagaactcttgtctgtctctccaaattatacagatgcatagatagggcagtgttccaaggattatcacaggaagcattgtctgcctgcattcagtccttacttggagcgtcagagtctatcagcaaaaacaagactcagattgatggacaacttttcttaattaagcaccttttgatacttcgtgaacaaattgctccatttcacactgaattcaccattaaggaaatttccctggacctcaagaaaactagagatgcagcatttaaaatcctgaaccctatgactgtcccaagattttttaggctgaatagcaacaatgccttgatagagttcttgttggagggtactcctgagataagagaacattatcttgactctaaaaaagacgtagaccgtcatctgaaatcggcctgtgagcagtttattcagcagcagaccaagctgtttgtagaacagctggaggagttcatgacaaaggtttcagcgttaaaaacaatggccagtcagggaggccccaagtatactctctcacagcagccttgggcacaaccagcaaaggtcagtgaccttgcggcaactgcatataagacaataaaaacaaagctgcctgtgacattgagaagtatgtccttgtacctatccaataaagataccgagttcatcttgtttaaacctgtgaggaataatattcagcaagtcttccagaagttccacgctctgttaaaggaagagttcagccctgaagacatccagatcattgcctgtccatctatggaacagctgagccttctgctgtcagtttctaaataagcaggccagccgggctgtgcacctaaatgtctgtctgggaggagcaggctgagaagtcttgcagtctgcaggacaccgaggaatcgtatgtgggaacgtccccgagaaccacacgagcgtgctgctcagtgctgactgcagaatgaaatagaagcaaagtgttacaggatcagtgttttcttttctaaaacatcaaaatgccaaagattaatctgtgattggtgataactgcctcgtttaaatggtcacaagaaatgtgaagagagagctagggcagacatgcagtgaaatggttctttgttaaaaatgtgcaataaaaatagattacaataagtagtgcaaagaactttacagaaatcaagcgaattagaaggcctgtaagagtaaggtttgctaaaacgtgaaacactgtaacacttttaaccactgagcattccacagtgaaatgttatttctatgctcttatttaatgtaatgtttctcctgtcatttttgaagttgagtttggagtagattggttgcttctgagaacacattctgccttcctgggaagtcggggtgtcatcctttcctctgtttgatgtgaggtagtttaaagatacaaggactttgtgtgaagctccagcatctgtgccccttgaattgcttaggtgcagacagttctaaagcaaggagctgcagcattctcatcatagatacgtgcagtatctttaatgagtatcttcatggtatgatagtgtgtgtttgtgagtgcgaagtaccaattaaggtgtcttaaatttggcgcatagaggagagaaggaaacctgaggagtagtgttcctcctgaatgaaggttcaggtcaccagccttctgtacactgcctttggttttagcagttctttgaaaagcaaacactttcatgtcctgtctattcattcagctggctgtgctgtgctgtggaccagctgtgtggatctctagcccagctacagcagaatacattttaccagcaaacctaaggatgacaaacactatccacatctgaaaactaccacaccatatcagggatcataaattatgcatatctatgaattttccaacaaattcctacttcctgattggattggttttgccgctgatgttaaggcagccagcttcttagttcaaaaagaattctgagtttttcaaacactagtctagaggtggacattgtcaggggttctggaatgggaccaggggaccttttggtgcagtgggtgcctgtaactcattagacgtactgaggcagcacttctgcagggtgcataccctgattgttgtcatttgtaacaggtcacttccttttcactcagtttaaattggtgatggacgttgcttgattgagcttattactctctattttgagaaggtagaaggtaagagggcccatattcattctttgccatgaaatgaatgaattaggaagattgtatttacttaactgttttttaaatacatgtttaatgaaataaactgtaaaatatccagttttgtgtattatatgtacatttgatttttaatagcctttccaaagaaatgagggcatgattattgtacagtaagtacgtgactgatttaatttgatttacagagcggagtgtgttcttataaaaatatttaatgacattggttcttgtcttttgatcttttatttctgaaacactcaaacaccttacaaagtgctgagtaggtaatagtgacccaacttgtttgctaaatgattatttgtttaaatctgtacagttttaagtgttcacttatacaaagagtgtatatactttcaaataatttaaaatgctttatattatttggctagaaattgctgtttttaataaatgtgaattttttaaaaataaagatttttgcttcctaaaaaaaaaaaaaaaaaaa

SEQ ID NO: 56225 - DNA, 8389 bp, Homo Sapiens; identical to SEQ ID NO: 22902

SEQ ID NO: 56226 - DNA, 2475 bp, Homo Sapiens
cagatatcctcagctctctccagagctcaacacagtaccagatgctccagaaatgtttgctgaactgaatttgattggaaaggaaaacagagccccaggcctgcgcggtggctcacgtctataatcccagcactgtgggaggccgaggcagacggatcacttgaggtcaggagttcaagaccagcctggccaacatggtcccagctgcagggcagccatgagcctggtggcctgtgagtgcctgcccagccccggcctggagcctgagccttgctcacgagcacggtcccaagctcacgtgtacctggagcagattcgcaacagggtggctctgggagtgcctgacatgacaaaacgtgactatctggtggatgcggccacgcagatccggctggccctggagcgcgatgttagtgaggactatgaggcggccttcaaccactatcagaatggcgtggacgtgctgctccgtggcatacacgttgaccccaacaaggagcgacgtgaggctgtgaagctgaaaattaccaaatacctgcggcgggcagaggagatcttcaactgccacctgcagcggccgctgagcagtggagccagccccagcgcggtgcagctggtccaggacccggcaaccggagggacctttgtggtgaagagcctacccaggtgccacatggtgagcagggagcggctgaccatcatcccacacggagtcccctacatgacgaagctgctcaggtactttgtgagcgaggactccatcttcctgcacctggagcatgtgcaaggaggcactctctggtcccacctgctctcccaggcgcactcccgacattctgggctcagctctggctctacccaggagaggatgaaggctcagctcaacccccacctcaacctcctgaccccagcgaggcttccctcaggccatgcccctggccaggacagaatcgccctggagcctcctaggacttctccgaaccttctcctagctggggaggccccatccaccagaccccagagggaggctgaaggtgaacccacagccaggaccagcacctctggctcctcggaccttccaaaggccccaggtggccacctgcaccttcaagctaggagggctggccagaactcagacgctgggccccctcgggggctcacttgggttcctgagggggccggcccggtgctagggggctgtggccgaggcatggatcagagctgcctgtcagcagatggggccggccggggctgtggcagggccacctggagtgtgagagaggagcaggtgaagcagtgggcggcagagatgctggtagcgctggaggcgctgcacgagcagggggtgctgtgccgggacctccaccccgggaacctgctcctggaccaggcaggtcacatccggctcacatattttggccagtggtcagaggtggagccccagtgctgcggggaggccgtggacaatctctacagcgccccagaggtgggtgggatttccgagctgacggaagcctgtgactggtggagctttgggtctctactgtatgaactgctgacgggaatggcactgtcccagagccacccttcaggaatccaggcccacacccagctccagctgcccgagtggctcagtcgcccagcggcctctctgctgactgagctgctgcagttcgagcctacccggcgcctgggcatgggagaaggtggtgtcagcaaactcaagtcccatccctttttcagtaccatccaatggagcaagctggtggggacatctctggagactcatctcaggacactgatccactggctcagtggacccaaaccagactgtcctggctagtcctctcagtcacacagcgagtaggcctcttccaccagaagctgttcgtgcagctggggaggcccagaagcagggatgccatctgttgtgcagggagggatgaggactccctctcaggccctggctgtttaccatgtcactgcctactgtgacttcatgcccttttgggataagaaaccacaaaacgcatggaacaactatccatggctcttagccagaaatgtcttgcctctggtctctgaaaagctggggtgagtggttacctcaaagacaattgcctccagtttgggggctcctctcagggttcaccctgtcaccggggcgtgggaccgacctgggaaatttccactagagttttgccctcagctcctccctgccagcatcccagtcaccaccaggtggcgcttctgacacggtccacgtgcctggctctgaaggcccaactgtcagaccagacccctcactcatggtggggagacttgacttcctcgggctcttcaggagactgagacagagaagacaagtgaaagcgcagcctgtacatgactctctgtggtccacgtcctgcctctccctggggtttacacggccccaataaagcctgctctggcctaaaaaaaaaaaaaaaaaaa

SEQ ID NO: 56227 - DNA, 4220 bp, Homo Sapiens; identical to SEQ ID NO: 29599

SEQ ID NO: 56228 - DNA, 4757 bp, Homo Sapiens
gttttccgtggaatcaggccggctgaatggaacaaaagtgggacttttaaaatgttgccctgtaagaagagaagaactacagtgacagagtccctacagcataaaggcaatcaagaggaaaacaacgtagacctagaatcagccgttaaaccagaatctgaccaggttaaggacttgagttcggtgtcactatcctgggatccaagtcatggcagagtagctggcttcgaagtacagtctttgcaggatgcaggaaatcagcttggtatggaggatacatctctgagctctggaatgctcacccagaacacaaatgtaccaattctagaaggtgttgatgtggccatctctcagggaatcaccctaccttccttggagtcttttcacccccttaatatacacattggtaaaggaaaactccacgctactggctcaaagagagggaaaaaaatgacactcaggcctgggccagttacccaagaagacagatgtgatcatcttaccctaaaggagcctttttcaggagagcctagtgaagaagtcaaggaagaaggagggaaacctcaaatgaattctgaaggggagataccttccctgccatcaggcagccaatctgcaaaaccagtaagccagcccaggaaatcaacccagccagatgtttgtgcctctcctcaagaaaagccactcaggactctgtttcaccaacctgaggaagagatagaagatggtggactcttcattccaatggaagaacaagacaatgaagaaagtgagaaaaggagaaaaaagaaaaagggtaccaagaggaaacgagatggaaggggtcaagaagggaccttggcatatgacctgaaactggatgacatgcttgaccgtaccttggaggatggtgccaagcagcacaatctaacagcagtcaatgtccgaaacatccttcatgaagtaatcacaaatgaacacgtggtagctatgatgaaagcagccatcagtgagacggaagatatgccaatgtttgagcctaaaatgacacgctctaaactgaaggaagtagtggaaaaaggagtggtaattccaacatggaatatttcaccaattaagaaggccaatgaaattaagcctcctcagtttgtggatatccaccttgaagaagatgattcctcagatgaagaataccagccggatgatgaagaagaagatgaaactgctgaagagagcttattggaaagtgatgttgaaagcactgcttcatctccacgtggggcaaagaaatccagattgaggcagtcttctgagatgactgaaacagatgaggagagtggcatattatcagaggctgagaaagtcaccgcaccagccatcaggcacatcagtgctgaggtagtgcccatggggcccccgccccctccaaagccgaaacagaccagagatagtactttcatggagaagttacatgcggtagatgaggagctggcttccagtccagtctgcatggattctttccagcccatggatgacagtctcattgcatttcgaacgcgttctaagatgcccctgaaagatgttcccctgggccaattagaggcagagctccaagctccagacatcactccagatatgtatgaccccaatacggcagatgatgaggactggaagatgtggctggggggacttatgaatgatgatgtggggaatgaagatgaagcagatgatgatgatgatccagaatataatttcctggaagacctcgatgaaccagacacagaggatttccggactgaccgggcagtgagaatcaccaaaaaggaagtaaatgagctgatggaagagctgtttgaaactttccaagatgagatgggattctccaacatggaagatgatggcccagaagaggaggagtgtgtagctgagcctcgtcctaactttaacacccctcaagctctacggtttgaggaaccactggccaacctgttaaatgaacaacatcggacagtgaaggagctatttgaacagctgaagatgaagaaatcttcagccaaacagctgcaggaagtagagaaggttaaaccccagagtgagaaagttcatcagactctgattctggacccagcacagaggaagagactccagcagcagatgcagcagcacgttcagctcttgacccaaatccaccttcttgccacctgcaaccccaacctcaatccggaggccactaccaccaggatatttcttaaagagctgggaacctttgctcaaagctccatcgcccttcaccatcagtacaaccccaagtttcagaccctgttccaaccctgtaacttgatgggagctatgcagctgattgaagacttcagcacacatgtcagcattgactgcagccctcataaaactgtcaagaagactgcgaatgaatttccctgtttgccaaagcaagtggcttggattctggccacaagcaaggttttcatgtatccagagttacttccagtgtgttccctgaaggcaaagaatccccaggataagatcgtcttcaccaaggctgaggacaatttgttagctttaggactgaagcattttgaaggaactgagtttcctaatcctctaatcagcaagtaccttctaacctgcaaaactgcccaccaactgacagtgagaatcaagaacctcaacatgaacagagctcctgacaacatcattaaattttataagaagaccaaacagctgccagtcctaggaaaatgctgtgaagagatccagccacatcagtggaagccacctatagagagagaagaacaccggctcccattctggttaaaggccagtctgccatccatccaggaagaactgcggcacatggctgatggtgctagagaggtaggaaatatgactggaaccactgagatcaactcagatcgaagcctagaaaaagacaatttggagttggggagtgaatctcggtacccactgctattgcctaagggtgtagtcctgaaactgaagccagttgccacccgttcccccaggaaggcttggagacagaagcgttcatcagtcctgaagcccctccttatccaacccagcccctctctccagcccagcttcaaccctgggaaaacaccagcccgatcaactcattcagaagcccctccgagcaaaatggtgctccggattcctcacccaatacagccagccactgttttacagacagttccaggtgtccctccactgggggtcagtggaggtgagagttttgagtctcctgcagcactgcctgctgtgccccctgaggccaggacaagcttccctctgtctgagtcccagactttgctctcttctgcccctgtgcccaaggtaatgctgccctcccttgccccttctaagtttcgaaagccatatgtgagacggagaccctcaaagagaagaggagtcaaggcctctccctgtatgaaacctgcccctgttatccaccaccctgcatctgttatcttcactgttcctgctaccactgtgaagattgtgagccttggcggtggctgtaacatgatccagcctgtcaatgcggctgtggcccagagtccccagactattcccatcactaccctcttggttaaccctacttccttcccctgtccattgaaccagtcccttgtggcctcctctgtctcacccttaattgtttctggcaattctgtgaatcttcctataccatccacccctgaagataaggcccacgtgaatgtggacattgcttgtgctgtggctgatggggaaaatgcctttcagggcctagaacccaaattagagccccaggaactatctcctctctctgctactgttttcccgaaagtggaacatagcccagggcctccactagcagatgcagagtgccaagaaggattgtcagagaatagtgcctgtcgctggaccgttgtgaaaacagaggaggggaggcaagctctggagccgctccctcagggcatccaggagtctctaaacaaccctacccctggggatttagaggaaattgtcaagatggaacctgaagaagctagagaggaaatcagtggatcccctgagcgtgatatttgtgatgacatcaaagtggaacatgctgtggaattggacactggtgccccaagcgaggagttgagcagtgctggagaagtaacgaaacagacagtcttacagaaggaagaggggaggagtcagccaactaaaaccccttcatcttctcaagagccccctgatgaaggaacctcagggacagatgtgaacaaaggatcatcaaagaatgctttgtcctcaatggatcctgaagtgaggcttagtagccccccagggaagccagaagattcatccagtgttgatggtcagtcagtggggactccagttgggccagaaactggaggagagaagaatgggccagaagaagaggaagaagaggactttgatgacctcacccaagatgaggaagatgaaatgtcatcagcttctgaggaatctgtgctttctgtcccagaactccaggtgagagctggagaatattctcaagtatttcgtggactcagtaatatgtatcacttattgatatgccacctgcttgcttgctgcactatggatagtcctaaaatcatttgtatttgatttgtgaatgcattatgggacatgattgtggagttgaggtgaaatgagatggaaaggatgaaattttacttattatattaaactcgtttacacattaaaaaaaaaaaaaaaaaaaa

SEQ ID NO: 56229 - DNA, 849 bp, Homo Sapiens
ggggaaggcggcggcggcggtggcctttggggccgaagtgggcgtgcggctcgcgctgttcgcggccttcctggtgacggagctgctccccccgttccagagactcatccagccggaggagatgtggctctaccggaacccctacgtggaggcggagtatttccccaccaagccgatgtttgttattgcatttctctctccactgtctctgatcttcctggccaaatttctcaagaaggcagacacaagagacagcagacaagcctgcctggctgccagccttgccctggctctgaatggcgtctttaccaacacaataaaactgatcgtagggaggccacgcccagatttcttctaccgctgcttccctgatgggctagcccattctgacttgatgtgtacaggggataaggacgtggtgaatgagggccgaaagagcttccccagtggacattcttcctttgcatttgctggtctggcctttgcgtccttctacctggcagggaagttacactgcttcacaccacaaggccgtgggaaatcttggaggttctgtgcctttctgtcacctctactttttgcagctgtgattgcactgtcccgcacatgtgactacaagcatcactggcaaggaccctttaaatggtgaaaatgggcagatgaatagcaataagtggacctttgttactcttctgagttagaaaaattctaatttagtacactctgaacaaagcttattatacttacttaagatgtgttttgatttggtgttcagaaagcaacctgacaatgataatactgtaactatgataaaattgagaataaaaagattttatttagaaaaaaaaa

SEQ ID NO: 56230 - DNA, 3067 bp, Homo Sapiens
gcgagtgtcgcgtctgcagtgtgtggggttcgcggggcggcgggtagagttgagcatttttgtcatctgcaaataattttagccaggtggcaagtgtatggactgtggagtaagaagtacctgcctctgcctctgacttgggttctggcctataggaacaagacattttcagtaatggaagaaggagcttccaggctggggaagatcatcatttccagtggtagcttgacctgagatgatacctgaccaccacttctgggaaggcccagaatagacagaagagagagaacatactagagttgctagcccctaagagttgaacgaaatgggcaaggcccagctgaaataacaggaaacacatgaaaaatgccacgattgtaatgtctgtgaggagagagcaaggcagttcttcaggggaggggtcattgtcattcgaagatgtggctgtgggcttcaccagggaggagtggcagtttttggaccagtctcagaaggtcttgtacaaggaagtaatgttggagaactacatcaacctagtatcaatagggtatcgaggcaccaagccagattcgctcttcaagttggagcaaggagaacccccagggatagtagaaggagcagcccacagtcaaatctgtccaggttttgttatccagagtagaagatatgcaggaaaagattctgatgcatttggtggatatgggagatcatgcctccatatcaagtgtgacaaaactcttactggagttaaataccatagatgtgttaaacccagcagccctaaatcacagctcaatgacctacaaaaaatttgtgcaggagggaaaccacatgaatgcagtgtgtgcgggagagccttctccaggaaagcacagcttattcaacatcagagaactgaaagaggagagaaaccccatggatgtggtgaatgtgggaaaacattcatgaggaagattcagctcactgagcatcagagaactcacacaggagagaagccccatgaatgtagtgaatgtggaaaagccttctccagaaagtcacagctcatggtccatcagagaacccatacaggagagaaaccctacagatgcagcgaatgcggaaaagccttcagccggaagtgccggctcaatagacatcagcgatcacatactggagagaaactctatgggtgcagtgtgtgtgggaaagccttttctcagaaggcatacctcactgcacaccagagacttcacacaggagataagccttataaatgcagtgattgtggaagaaccttctattttaagtcagacctgaccagacatcagaggattcatacgggagagaaaccttatgaatgtagtgagtgtgaaaaagcctttagaagcaagtcgaagctcattcagcatcagcgtactcacactggagagagaccatattcatgcagagaatgtggcaaagcctttgcccacatgtcagtcctcattaaacatgagaaaactcacataagagagacagccataaattcactgacggtggagaaaccttcctcaaggagtcatacctccttatacatgagcgaactcatacaagagcaaaagactgtgaacacagtacctatagaaatgccttcctcaggaaccccgccattgttaaacaagagtgagcgcctagtgggcagaaatgtagtgattgtggaacaaccttttccaagaaatcaagcctttgtagttaatcaggaatttgaacagagaataagcctcacaaatgaagtgaatgtggccccatcagtaataaattatatcttgtatcttacagatattgtatcagaataaatcttctgataccagaaaggtgggaaaatctttagtaggaatcctccagccattatatcccagagagctcatttagggctgaaacactgtggaggcagtggttgtggaggacatttctgtgagaagtcaaacctgttaaacaccattgaaatcatgttgggtagaaatgcagctgttatgaggaagtctttacctggagatgatatctcaattggtatcaaaagaattcttacaggaatatttatgaaagattgtgatggtgcttttagcgctaaattgtgcctcgtgtgccaaagaaacatagacaactgtagaggcaatggatatggaaaacatttttcgtaaaatatgggagaatttatagaaaagaaaaactcttgaaagtaagaaatgatggcaactcaccaaattaactcatgtatcatacttttatgtcttgagagtcttggagggacgtgtttaatgaaatcttgaaccccaggaatagtattatgtaatgaaaacctatgaatataacaaatatggaagtaaaattgtgttagtttcttatgagtgttgcaccaaactaacacaaatttaatggcttaaaacaacacaaaatcattatcttacagttctggaggactgaagtccaaatgcatctcacggggctacatcaagctgttgacagggctgcttttctttttggaggctctaggggagcgtctttctttgcccttccagcttctagaagctgcccaaattctgtggtttggggcctcctttcaaaaccagcaatggccaatcagtcttacatcactcaaacacttgagtgttctgtctccctcttccatgtttgaggacccttgtgattacactgtgaaaacccagataagccaggataatctccctatcttattatgaggcaagtatgttaagattttattctataatcagagaatcttatgctatgattgttatatgtgagcattatagatgctcttgaaatgttaaaatcacatcagcactggaaaataactcctaaatgtccaaaaagaacatgagatttatggtgcttgaaatgttgctaaacgtaaatttgtatctattctgaaattatataaattaacctacctggccaggcacagtggctcacacctgtaatctcagcactttgggaggccaaggcaggaagatcacttgagcccgcaagtttgagaccaccctgggcaacatagcgagactacctctacaaaaaaaaaaaaaaaaaa

SEQ ID NO: 56231 - DNA, 1196 bp, Homo Sapiens
gtagtgaagcttctccattctgtaagctttccgggaacatccaaggcaagactggcacccagcacagcagtgactgaccacataccccactctccaggacccatggagtccttcagctcaaagagcctggcactgcaagcagagaagaagctactgagtaagatggcgggtcgctctgtggctcatctcttcatagatgagacaagcagtgaggtgctagatgagctctaccgtgtgtccaaggagtacacgcacagccggccccaggcccagcgcgtgatcaaggacctgatcaaagtggccatcaaggtggctgtgctgcaccgcaatggctcctttggccccagtgagctggccctggctacccgctttcgccagaagctgcggcagggtgccatgacggcacttacctttggtgaggtagacttcaccttcgaggctgctgttctggctggcctgctgaccgagtgccgggatgtgctgctagagttggtggaacaccacctcacgcccaagtcacatggccgcatccgccacgtgtttgatcacttctctgacccaggtctgctcacggccctctatgggcctgacttcactcagcaccttggcaagatctgtgacggactcaggaagctgctagacgaagggaagctctgagagccctgagcctagcacattccaccttgacaaaatggttgactgagaaaacacagataatgggcttcctaaccctgctcacctggcactaacacttttcaatcttcaggcttcattccttcccaagagtgcttttgactctgagaccagcccacccccaaacagctagtggagaaggagcaatgctgaggggtgaggcctctctcccactccagccccaggacaggaaacagaactgcctgaaaaaggtgaagtgaaacttggatctctatttctcccataagggacttctgaaacagggaagccccctcccatgtgaaccaaggaaaggaggcacagcccagagaacccctttggggatactaaagacagaagaggggaaggtggcccttagagacagagcttggacagatgccagaggctctgttccagagtgcaggaagaaggggctagggcaggggagattctcataggggaaataaaactactaaaatatgaaaaaaaaaaaaaaaaaaaaaaaaaaaaaaaaaaaaaaaaaa

SEQ ID NO: 56232 - DNA, 2706 bp, Homo Sapiens
ccgtgtgcagtcgccccgcgccccgcgcgacccttcgggtaaactacgaactgggagttctgaagaatgggtaaagactttcgttactatttccagcatccctggtctcgcatgattgtggcttacttggtgatcttctttaacttcttaatatttgcggaggacccagtttctcatagccaaacagaagccaatgttattgttgttggaaactgtttttcatttgttacaaataaataccctagaggagttggctggaggattttgaaggtgcttctatggctacttgccattctcacaggactaatagctggcaaatttctgttccatcagcgtttgtttggtcagttgctccgattaaaaatgtttcgagaagatcatgggtcgtggatgacaatgttcttcagcacaattctctttctcttcatattttctcacatatacaacacgattcttctaatggatgggaacatgggagcatatatcattacagactatatgggcatccgaaatgaaagtttcatgaaattagctgcagtagggacctggatgggggactttgtcacagcttggatggtcactgatatgatgcttcaggacaaaccctatcctgactggggaaaatcagcaagagctttctggaagaaaggaaatgttaggatcactttattctggacagttctttttactctgacgtctgtggttgtacttgtgattacaacggactggatcagctgggacaagctgaatcggggatttttgcccagtgatgaagtttccagagcattccttgcttcttttatcttggtctttgaccttcttattgtgatgcaggactgggaattcccacatttcatgggagatgttgatgtaaatctccctggtttgcacacccctcacatgcagttcaagattcctttcttccagaaaatcttcaaggaggaatatcgtattcacataacaggcaaatggtttaactatggaattatcttcctcgtcttgattttggatcttaatatgtggaagaaccaaatattttataaacctcatgaatatgggcaatatatcggcccggggcagaagatatatacagtgaaagactcagaaagtttaaaagatttgaacagaaccaagctatcctgggaatggaggtccaatcacactaaccctcggactaataaaacatatgttgagggagacatgttcttacacagcaggttcataggagccagtcttgatgtcaagtgtctggcctttgttccaagcctgatagcctttgtgtggtttggattctttatttggttctttggacgatttttgaaaaatgagccacgcatggagaatcaagacaaaacttacactcgcatgaaaagaaaatctccatcagaacatagcaaagacatgggaatcactcgagaaaacacccaggcttcagtagaagaccccttgaatgacccttctttggtttgcatcaggtctgacttcaatgagatcgtctacaagtcttcccacctaacctcggaaaacttgagctcacagttgaacgaatctactagtgcaacagaagctgatcaagacccaacgacttctaaaagtacacctacgaactagactcggagatagacttggagataacacaaaaagcaaccttgagtgtaactttaaaaatttagtctttccttttgtatatgtaaggtttacgtagtgttaggtaaaaatatgaacaatgccacaacggtgctcaacatgctttttctaggattcattgttttctatttgtattataatacacgtgcctactgtatactcaacagtcctctagagattgcttttcacaattgcacaagctattactgactttacagcatagtggaagattagctgatgacccatgtatctgatgttcaaccatagtggtgccttgagacattaaactgtttttaactgtaccagaaatgaagtgtggaacagttacctaacctatttcacatgggcgttttgtatacaactattttgatctacacttgatgtctgagcagaaaacagaaatagctaaatgtgactcaggaagtatctcttggtttcttattcagcagcagagttggtgactttgacaactggactgcagagaaacatggtgatcaccttttaatttttattggctgtctgccaaatataaatacagatgcaaaattcagtaataggagatccataacccaacatgggtcactactcgtgaaatgtgactttctcccaccagtaattgaaatgaggtgatgatacctaattatgttttcctaattaaagataaattgctacttgattaaaaatcctgcccttcacctttgggaacaaaggttaagagacacagttgggcgaactctcaaatttattggcatttacacaaagtcccagacaaccaaggaactgaagttttcatcatatgagagcagcacatcccaccatttacaatattcgtatatctttctgcaaatatggctctggatagtgaaaattgaaaaacatatgccaaccctgagcaagggaactcctcaaaaaatcatgcagcggaaccttgtcaggtagagaagccgtgcatgaaagaatttgtttaatgtcttgttttgcgtatgtgttttttgtttttgttttttaagaactaaatattgcacattaataaataagaattatacagcaaaaaaaaaa

SEQ ID NO: 56233 - DNA, 3101 bp, Homo Sapiens
cgggagaaaaggcatccttacctctggttgaaggtctcggggcctccccctctgcatccggaccctctccccatcccagcctcccatgccaaggcccgccttgtcagtcacttccttttgtcatcggcttggcaaacgggagagaaaacagagcttcatgggaaacagcggcaacagttggtcccatacacctttccccaagttggagctaggcctggggccccagcccatggcgccccgggagctccctacctgctccatctgcctggagaggttgcgcgaccccatctcgctggactgtggccacgacttctgcatacggtgcttcagcacacaccgtctcccgggctgtgagccgccctgctgtcctgagtgccggaagatatgcaagcagaagaggggcctccggagcctgggcgagaagatgaagctcctgccgcagcggccgctgccccctgcactgcaggagacgtgtcctgtgagggcggagccgctgctgctggttcgcatcaatgcctctgggggcctcatccttaggatgggggccatcaaccgctgcctgaagcaccctctggccagggacaccccagtctgcctcctcgctgtcctgggggagcagcactcagggaagtccttcctcctcaaccatttgcttcagggcttgccgggcctggagtctggtgagggcggccggccaagaggaggagaggcatccctgcagggctgcaggtggggcgccaatggcctcgccaggggcatatggatgtggagccaccccttcttgctggggaaagaagggaagaaggtggcggtgttcctggtggacacaggggatgccatgagccctgagctgagcagggaaacaaggatcaagctctgtgctctcaccacgatgctgagctcctaccagatcctcagcacctcccaggagctgaaggatacagacctggactatctggagatgtttgtccacgtggccgaggtgatgggcaagcattatgggatggtgccaatccagcatctggacctcttagttcgtgactcatcccaccccaacaaggcagggcaggggcatgtaggcaacatcttccagagattgtctggcagataccccaaggtgcaggagctgctgcaagggaagcgagcccgttgctgcctcttgcctgccccagggaggcggcggatgaaccaaggccatgcaagccctggtggtgacacagatgatgacttccgccaccttctgggggcctacgtctcagatgtgctgagtgcggccccccagcacgctaagagccgctgccaggggtactggaacgaggggcgcgccgtggccaggggggacagacgcctactcacggggcagcagctagctcaggaaatcaagaacctctcaggatggatggggaggacagggcccggtttcacctctccggatgagatggctgctcagctgcacgacctgaggaaggtggaagctgccaagagggagttcgaggagtatgtgaggcagcaggacgtagccaccaagcgcatattctctgcgctgcgggtcctgccagacaccatgcggaacctcctctccacccagaaagatgccattctggcccgccatggtgtggccttactctgcaaggggagagatcagaccttggaggcactggaagctgagctgcaggccacggccaaggccttcatggactcctacacgatgcgcttctgtggccacctagctgctgtggggggtgctgtgggggccgggctcatgggcctggcagggggcgtggtgggtgctggcatggcagcagctgcactggctgcagaggctgggatggtggctgctggagctgccgtgggggccacaggggccgctgtggttgggggtggcgtgggtgctgggttggctgccacagtgggctgcatggagaaggaggaggatgagaggcttctggaaggggaccgagagccccttctccaggaagagtaacagccccaggaggtattgaaggacaggagagatgtcaggtggggatgaagaagaggggcaggtcgggggagggtgatgccagggattccaaggcaccgccatgtactgcactgccctggtcgaatgctcggtgtctgggtggcagctgagctgggactcaaggtggctcttggaacctgggaggcagcatctgggggcagtggatagaacacccggcctgtttctggttgcagatggttgccgatctgcccttgtcacagataggctacatcccagggtttctggctgcaagtgagactccaccctccccacctggctcatttccccgatgaccctggattgtaggaaagttaagcaggcaccatcctggaagtctacccctaggtggtcgagagacctgttctttcacagatgtgagaagccccaggatgattgaccatggtgttcaggagcggggagcactgatgaggtgctggggatgacaggaaggaaggaacactgggcagaaccagagagatgggacatggtagactgtggcccagaccccagagcagagaaacttgttcccatgacccttcccaaatctgctccagcaggactaaggtggctttcccactcctggcccacagccccagagagcctgtctgtgcatcctgaaccactctttgctgggcctccgcaagggcctctcttgggtctgtgtcctttttcaagcctgtttagatgggggagtgcccatgccctctgtgaagtgcccaaatgcgaaagaataacaccttttcttgcattctgagctaagccagacagcctttatactagattctatcaaaatcttgcaaaggaaaacaaaatgaacaacttctacccttaaacacatcctttctcccctgggcttgtaagaagatgcagcttgatgcagctcctcaaacaccaggccccctgggaactgggggtgcgggagttctccctctgggggacagaaaatctgactactaggaagacttctaggctatgaaactgacttctaggctatgaaacttacagggtatgggtgggcacattatcctttattttatgaaaaataaaatgtgtgtatgtgaaaaaaaaaaaaaaaaaa

SEQ ID NO: 56234 - DNA, 3362 bp, Homo Sapiens
cctttttgcaaatggtagttgatttttgcagaaggtttgtggccagatcgctatgtataatactgatgaagcatttttgttccagctctgtctcggaagacctaggctgtagacgtggggatttcagtaggaaacattatggatctgtggagctgcttatttccagtgatgctgatggagccatccaaagggctggaagattcagagtggaaaatggctcttcagatgagaatgcaactgccctgcctggtacttggcgaagaacagacgtgcacttagagaacccagaataccacaccagatggtatttcaaatattttttaggacaagtccgtcagaactacattggaaacgatgccgagaagagccctttcttcttgtccgtgaccctttctgaccaaaacaatcaacgtgtccctcaataccgtgcaattctttggagaaaaacaggtacccagaaaatatgccttccctacagtcccacaaaaactctttctgtgaagtccatcttaagtgccatgaatctggacaaatttgagaaaggccccagggaaatttttcatcctgaaatacaaaaggacttgctggttcttgaagaacaagagggctctgtgaatttcaagtttggggttctttttgccaaagatgggcagctcactgatgatgagatgttcagcaatgaaattggaagcgagccttttcaaaaatttttaaatcttctgggtgacacaatcactctaaagggctggacgggctaccgtggcggtctggataccaaaaatgataccacagggatacattcagtttatactgtgtaccaagggcatgagatcatgtttcatgtttccaccatgttgccatattccaaagagaacaaacagcaggtggaaaggaaacgccacattggaaacgatatcgtcaccattgtgttccaagaaggagaggaatcttctcctgcctttaagccttccatgatccgctcccactttacacatatttttgccttagtgagatacaatcaacaaaatgacaattacaggctgaaaatattttcagaagagagcgtaccactctttggccctcccttgccaactccaccagtgtttacagaccaccaggaattcagggactttttgctagtgaaattaattaatggtgaaaaagccactttggaaaccccaacatttgcccagaaacgtcggcgtaccctggatatgttgattagatctttacaccaggatttgatgccagatttgcataagaacatgcttaatagacgatcttttagtgatgtcttaccagagtcacccaagtcagcgcggaagaaagaggaggcccgccaggcggagtttgttagaatagggcaggcactaaaactgaaatccattgtgagaggggatgctccatcaagcttggcagcttcagggatctgtaaaaaagagccgtgggagccccagtgtttctgcagtaatttccctcatgaagccgtgtgtgcagatccctggggccaggccttgctggtttccactgatgctggcgtcttgctagtggatgatgaccttccatcagtgcccgtgtttgacagaactctgccagtgaagcaaatgcatgtgcttgagaccctggaccttctggttctcagagcagacaaaggaaaagatgctcgcctctttgtcttcaggctaagtgctctgcaaaagggccttgaggggaagcaggctgggaagagcaggtctgactgcagagaaaacaagttggagaaaacaaaaggctgccacctgtatgctattaacactcaccacagcagagagctgaggattgtggttgcaattcggaataaactgcttctgatcacaagaaaacacaacaagccaagcggggtcaccagcacctcattgttatctcccctgtctgagtcacctgttgaagaattccagtacatcagggagatctgtctgtctgactctcccatggtgatgaccttagtggatgggccagctgaagagagtgacaatctcatctgtgtggcttatcgacaccaatttgatgtggtgaatgagagcacaggagaagccttcaggctgcaccacgtggaggccaacagggttaattttgttgcagctattgatgtgtacgaagatggagaagctggtttgctgttgtgttacaactacagttgcatctataaaaaggtttgcccctttaatggtggctcttttttggttcaaccttctgcgtcagatttccagttctgttggaaccaggctccctatgcaattgtctgtgctttcccgtatctcctggccttcaccaccgactccatggagatccgcctggtggtgaacgggaacctggtccacactgcagtcgtgccgcagctgcagctggtggcctccaggtcggatatatacttcacagcaactgcagctgtgaatgaggtctcatctggaggcagctccaagggggccagtgcccgaaattctcctcagacacccccgggccgagatactccagtatttccttcttccctgggggaaggtgaaattcaatcaaaaaatctgtacaagattccacttagaaacctcgtgggcagaagcatcgaacgacctctgaagtcacccttagtctccaaggtcatcaccccacccactcccatcagtgtgggccttgctgccattccagtcacgcactccttgtccctgtctcgcatggagatcaaagaaatagcaagcaggacccgcagggaactactgggcctctcggatgaaggtggacccaagtcagaaggagcgccaaaggccaaatcaaaaccccggaagcggttagaagaaagccaaggaggccccaagccaggggcagtgaggtcatctagcagtgacaggatcccatcaggctccttggaaagtgcttctacttccgaagccaaccctgaggggcactcagccagctctgaccaggaccctgtggcagacagagagggcagcccggtctccggcagcagccccttccagctcacggctttctccgatgaagacattatagacttgaagtaacagagttgaatctcatttgccatctttagttttcttatggaggtttatactctttaaacagttctgatgtaatttctcaacaaaatgtggcttttagcctgtcagtgatctattggaccaaaccttctgcacactcggccagttccctctccaatgtccggtgccatctttcctgacctttgtttctttctgttcaggaaccatcagtccccttgtaataaaggtggtagatttcattgaggttttagattgaaactttgaataaatcaaaaatactcattcttatttactgcaaaaaaaaaaaaaaaa

SEQ ID NO: 56235 - DNA, 2129 bp, Homo Sapiens
tcctatccaccctccactcccctgtcccttggtgactcatccctgagcttcccaaggaagcccccaccctctgccctttcctcccgccttccatgagtggaaaatccacctccgccccctatagcaggccagcccccttcctccccagtctccgaccccatcccccagccgaccagtttcctctccaggaccagggagcaatcacagctgccccgaccttggcttcctctgctgggtgggattgggggctgggcccccaaatgggcccctggcttcccccttcctctgggcaggggacagagagacacaggctcggggagcaggactgacttcctcttgtcccggaatgagcatgcctgccctttgcaagcaggtttgggtctcacgcagaggaaaccaaaagcaataagagggagggaaggcagagcaaccaatcaagggcagggtgagactcaaaacgagcgggctccctggggagccagacagaggctgggggtgatggcggagctacagcagctgcaggagtttgagatccccactggccgggaggctctgaggggcaaccacagtgccctgctgcgggtcgctgactactgcgaggacaactatgtgcaggccacagacaagcggaaggcgctggaggagaccatggccttcactacccaggcactggccagcgtggcctaccaggtgggcaacctggccgggcacactctgcgcatgttggacctgcagggggccgccctgcggcaggtggaagcccgtgtaagcacgctgggccagatggtgaacatgcatatggagaaggtggcccgaagggagatcggcaccttagccactgtccagcggctgccccccggccagaaggtcatcgccccagagaacctaccccctctcacgccctactgcaggagacccctcaactttggctgcctggacgacattggccatgggatcaaggacctcagcacgcagctgtcaagaacaggcaccctgtctcgaaagagcatcaaggcccctgccacacccgcctccgccaccttggggagaccaccccggattcccgagccagtgcacctgccggtggtgcccgacggcagactctccgccgcctcctctgcgtcttccctggcctcggccggcagcgccgaaggtgtcggtggggcccccacgcccaaggggcaggcagcacctccagccccacctctccccagctccttggacccacctcctccaccagcagccgtcgaggtgttccagcggcctcccacgctggaggagttgtccccacccccaccggacgaagagctgcccctgccactggacctgcctcctcctccacccctggatggagatgaattggggctgcctccacccccaccaggatttgggcctgatgagcccagctgggtgcctgcctcatacttggagaaagtggtgacactgtacccatacaccagccagaaggacaatgagctctccttctctgagggcactgtcatctgtgtcactcgccgctactccgatggctggtgcgagggcgtcagctcagaggggactggattcttccctgggaactatgtggagcccagctgctgacagcccagggctctctgggcagctgatgtctgcactgagtgggtttcatgagccccaagccaaaaccagctccagtcacagctggactgggtctgcccacctcttgggctgtgagctgtgttctgtccttcctcccatcggagggagaaggggtcctggggagagagaatttatccagaggcctgctgcagatggggaagagctggaaaccaagaagtttgtcaacagaggacccctactccatgcaggacagggtctcctgctgcaagtcccaactttgaataaaacagatgatgtcctgtgactgccccacagagataaggggccaggagggattgaaaggcatcccagttctaaggctgctgctaattacagcccccaacctccaacccaccagctgacctagaagcagcatcttcccatttcctcagtacccacaaagtgcagcccacattggaccccagacacccctctgcagccattgactgcaacttgttcttttgcccattgaaaaaaaaaaaaaaaaaaaa

SEQ ID NO: 56236 - DNA, 1922 bp, Homo Sapiens; identical to SEQ ID NO: 23382

SEQ ID NO: 56237 - DNA, 5534 bp, Homo Sapiens; identical to SEQ ID NO: 24548

SEQ ID NO: 56238 - DNA, 1734 bp, Homo Sapiens
gagacagtgagtgcgcgccctgagtcgcaggccgaggagacagtgagtgcgcgccctgagtcgcaggccgaggagacatggctgcacttcgtgacgctgagatacagaaggacgtgcagacctactacgggcaggtgctgaagagatcggcagacctccagaccaacggctgtgtcaccacagccaggccggtccccaagcacatccgggaagccttgcaaaatgtacacgaagaagtagccctaagatattatggctgtggtctggtgatccctgagcatctagaaaactgctggattttggatctgggtagtggaagtggcagagattgctatgtacttagccagctggttggtgaaaaaggacacgtgactggaatagacatgaccaaaggccaggtggaagtggctgaaaagtatcttgactatcacatggaaaaatatggcttccaggcatctaatgtgacttttttccatggcaacattgagaagttggcagaggctggaatcaagaatgagagccatgatattgttgtatcaaactgtgttattaaccttgtgcctgataaacaacaagtgcttcaggaggcatatcgggtgctgaagcatggtggggagttatatttcagtgacgtctatacgagccttgaactgccagaagaaatcaggacacacaaagttttatggggtgagtgtctgggtggtgctttatactggaaggaacttgctgtccttgctcaaaaaattgggttctgccctccacgtttggtcactgccaatctcattacaattcaaaacaaggaactggaaagagttatcggtgactgtcgttttgtttctgcaacatttcgcctcttcaaacactctaagacaggaccaaccaagagatgccaagttatttacaatggaggaattacaggacatgaaaaagaactaatgtttgatgccaattttacatttaaggaaggtgaaattgttgaagtggatgaagaaacagcagctatcttgaagaattcaagatttgctcaagattttctgatcagaccaattggagagaagttgccaacatctggagctgttctgctttggagttaaaggatataatcacagatccatttaagcttgcagaagagtctgacagtatgaagtccagatgtgtccctgatgctgctggaggctgctgtggcacaaagaaaagctgctaaatctatagccaaccaggggaccacagtagtgggcaagagtgatctgcatgttttttaacctgcttttccccatagcacagaccataagaaacaacaaatgagccactgcgcccggccataaatgaattatttttaagaggcattgattaaagattcacagcaaatcactagttaagcagattttttttctatttcctacttcaaagttctggtgccacatagtggtcagaaatggaacagagaagctgtcttaagccttgttcaagaagcaggaaaggcatcagaagaagtaacagttggcagagggtctcaggaaaaacatcttccttctgatcttttgcatagcaccttttggaattttcatcatgtttgcttattaaacaaagctcctactgccatcatactaatcatgcaaaaagattgccaaatcatgtttggtaggaggacttttgaggtagcttttgaacaaatgtttttttcttttttctttttttttgcaataaagaaaacaaattaatcataaaaaaaaa

SEQ ID NO: 56239 - DNA, 2905 bp, Homo Sapiens; identical to SEQ ID NO: 24317

SEQ ID NO: 56240 - DNA, 1818 bp, Homo Sapiens
acctgactgaaggaggccgcggacctgactgaaggaggccacggccacttctggttggcctcggggcgcgctggctcggctcttcctccgccctcgaggcccccgcagtcccatcattcagttccgtagggtcaccggcgcggcagtggcctcgcagggcgctgggtccctctccccagctctcctccccctggccgcgtcgccccgccctcgccgggctgggctgcggggtcaggggccgagcggagagggttatcatttaacatggaagaagatgagttcattggagaaaaaacattccaacgttattgtgcagaattcattaaacattcacaacagataggtgatagttgggaatggagaccatcaaaggactgttctgatggctacatgtgcaaaatacactttcaaattaagaatgggtctgtgatgtcacatctaggagcatctacccatggacagacatgtcttcccatggaggaggctttcgagctacccttggatgattgtgaagtgattgaaactgcagcagcgtccgaagtgattaaatatgagtatcatgtcttatattcctgtagctaccaagtgcctgtactttactttagggcaagctttttagatgggagacctttaactctgaaggacatatgggaaggagttcatgagtgctataagatgcgactgctacagggaccatgggacactattacgcaacaggaacatccaatacttgggcaacccttttttgtacttcatccctgcaagacgaatgaattcatgactcctgtattaaagaattctcagaaaatcaataagaatgtcaactatatcacatcatggctgagcattgtagggccagttgttgggctgaatctacctctgagttatgccaaagcaacgtctcaggatgaacgaaatgtcccttaacaagattcttctattgagtttaggaattgcggcacgaagaatgccaagagtttacctggccagccctggctttaataggactgataccatggaatatttcatctcaccaagatgtgacatggattatttttcccttggacacaaatgtctacagcaactggtgtttgataggctgaatgtttagaagaaacacttcaaagggatacatcatggccaggcatggtggctcacacctgtaatccaagcactttgggaggccaaggtgggagcatcacttgatcctgggagttcgagaccagcctgggcaacatggtgaaaccctgtcggtacaaaaaaatacaaaaatttgcctgtttatggtggtgtgttcctgtagtcccagctccccaggaggctgaggtgggaggttggctttaacccaggaggcagaggttgcagtgagctgagactgtgccactgcagtccagcctgggtgacagagccagacactgtctcgggaaaaaaaaaaaaaaagacacatcactataaatagcaaaaaaacaaatctaacttattaatactaggaataccaacattattagggcacttgcaggttattcttttctaggccaagtacttcacttccatttgtctgacatggagattgagggagaaatgtatttgtgtgttcattttaatgtaagatatataaaaattaaattactggatttacctgtccctgaaactggtgttataaacatgacctatcttaagtgattttcccacaatcaaactcaggaacaatagattatttctgttttactccaaaagagagagagagagtgagtgtgagtgtgtgtgtgtgtgtgtgtgtatgtgtgggtgtttgtgtagatagttgtaaaaaaaaaa

SEQ ID NO: 56241 - DNA, 4006 bp, Homo Sapiens
tgccaaggctccagcccggccgggctccgaggcgagaggctgcatggagtggccggcgcggctctgcgggctgtgggcgctgctgctctgcgccggcggcgggggcgggggcgggggcgccgcgcctacggaaactcagccacctgtgacaaatttgagtgtctctgttgaaaacctctgcacagtaatatggacatggaatccacccgagggagccagctcaaattgtagtctatggtattttagtcattttggcgacaaacaagataagaaaatagctccggaaactcgtcgttcaatagaagtacccctgaatgagaggatttgtctgcaagtggggtcccagtgtagcaccaatgagagtgagaagcctagcattttggttgaaaaatgcatctcacccccagaaggtgatcctgagtctgctgtgactgagcttcaatgcatttggcacaacctgagctacatgaagtgttcttggctccctggaaggaataccagtcccgacactaactatactctctactattggcacagaagcctggaaaaaattcatcaatgtgaaaacatctttagagaaggccaatactttggttgttcctttgatctgaccaaagtgaaggattccagttttgaacaacacagtgtccaaataatggtcaaggataatgcaggaaaaattaaaccatccttcaatatagtgcctttaacttcccgtgtgaaacctgatcctccacatattaaaaacctctccttccacaatgatgacctatatgtgcaatgggagaatccacagaattttattagcagatgcctattttatgaagtagaagtcaataacagccaaactgagacacataatgttttctacgtccaagaggctaaatgtgagaatccagaatttgagagaaatgtggagaatacatcttgtttcatggtccctggtgttcttcctgatactttgaacacagtcagaataagagtcaaaacaaataagttatgctatgaggatgacaaactctggagtaattggagccaagaaatgagtataggtaagaagcgcaattccacactctacataaccatgttactcattgttccagtcatcgtcgcaggtgcaatcatagtactcctgctttacctaaaaaggctcaagattattatattccctccaattcctgatcctggcaagatttttaaagaaatgtttggagaccagaatgatgatactctgcactggaagaagtacgacatctatgagaagcaaaccaaggaggaaaccgactctgtagtgctgatagaaaacctgaagaaagcctctcagtgatggagataatttatttttaccttcactgtgaccttgagaagattcttcccattctccatttgttatctgggaacttattaaatggaaactgaaactactgcaccatttaaaaacaggcagctcataagagccacaggtctttatgttgagtcgcgcaccgaaaaactaaaaataatgggcgctttggagaagagtgtggagtcattctcattgaattataaaagccagcaggcttcaaactaggggacaaagcaaaaagtgatgatagtggtggagttaatcttatcaagagttgtgacaacttcctgagggatctatacttgctttgtgttctttgtgtcaacatgaacaaattttatttgtaggggaactcatttggggtgcaaatgctaatgtcaaacttgagtcacaaagaacatgtagaaaacaaaatggataaaatctgatatgtattgtttgggatcctattgaaccatgtttgtggctattaaaactcttttaacagtctgggctgggtccggtggctcacgcctgtaatcccagcaatttgggagtccgaggcgggcggatcactcgaggtcaggagttccagaccagcctgaccaaaatggtgaaacctcctctctactaaaactacaaaaattaactgggtgtggtggcgcgtgcctgtaatcccagctactcgggaagctgaggcaggtgaattgtttgaacctgggaggtggaggttgcagtgagcagagatcacaccactgcactctagcctgggtgacagagcaagactctgtctaaaaaacaaaacaaaacaaaacaaaacaaaaaaacctcttaatattctggagtcatcattcccttcgacagcattttcctctgctttgaaagccccagaaatcagtgttggccatgatgacaactacagaaaaaccagaggcagcttctttgccaagacctttcaaagccattttaggctgttaggggcagtggaggtagaatgactccttgggtattagagtttcaaccatgaagtctctaacaatgtattttcttcacctctgctactcaagtagcatttactgtgtctttggtttgtgctaggcccccgggtgtgaagcacagaccccttccaggggtttacagtctatttgagactcctcagttcttgccacttttttttttaatctccaccagtcatttttcagaccttttaactcctcaattccaacactgatttccccttttgcattctccctccttcccttccttgtagccttttgactttcattggaaattaggatgtaaatctgctcaggagacctggaggagcagaggataattagcatctcaggttaagtgtgagtaatctgagaaacaatgactaattcttgcatattttgtaacttccatgtgagggttttcagcattgatatttgtgcattttctaaacagagatgaggtggtatcttcacgtagaacattggtattcgcttgagaaaaaaagaatagttgaacctatttctctttctttacaagatgggtccaggattcctcttttctctgccataaatgattaattaaatagcttttgtgtcttacattggtagccagccagccaaggctctgtttatgcttttggggggcatatattgggttccattctcacctatccacacaacatatccgtatatatcccctctactcttacttcccccaaatttaaagaagtatgggaaatgagaggcatttcccccaccccatttctctcctcacacacagactcatattactggtaggaacttgagaactttatttccaagttgttcaaacatttaccaatcatattaatacaatgatgctatttgcaattcctgctcctaggggaggggagataagaaaccctcactctctacaggtttgggtacaagtggcaacctgcttccatggccgtgtagaagcatggtgccctggcttctctgaggaagctggggttcatgacaatggcagatgtaaagttattcttgaagtcagattgaggctgggagacagccgtagtagatgttctactttgttctgctgttctctagaaagaatatttggttttcctgtataggaatgagattaattcctttccaggtattttataattctgggaagcaaaacccatgcctccccctagccatttttactgttatcctatttagatggccatgaagaggatgctgtgaaattcccaacaaacattgatgctgacagtcatgcagtctgggagtggggaagtgatcttttgttcccatcctcttcttttagcagtaaaatagctgagggaaaagggagggaaaaggaagttatgggaatacctgtggtggttgtgatccctaggtcttgggagctcttggaggtgtctgtatcagtggatttcccatcccctgtgggaaattagtaggctcatttactgttttaggtctagcctatgtggattttttcctaacatacctaagcaaacccagtgtcaggatggtaattcttattctttcgttcagttaagtttttcccttcatctgggcactgaagggatatgtgaaacaatgttaacatttttggtagtcttcaaccagggattgtttctgtttaacttcttataggaaagcttgagtaaaataaatattgtctttttgtatgtca

SEQ ID NO: 56242 - DNA, 1968 bp, Homo Sapiens
cagccctcggcagacggccaatggcggcggtgctcggggcgctcggggcgacgcggcgcttgttggcggcgctgcgaggccagagcctagggctagcggccatgtcatcaggtactcacaggttgactgcagaggagaggaaccaagctatacttgaccttaaagcagcaggatggtcggaattaagtgagagagatgccatctacaaagaattctccttccacaattttaatcaggcatttggctttatgtcccgagttgccctacaagcagagaagatgaatcatcacccagaatggttcaatgtatacaacgtccagataactctcacctcacatgactgtggtgaactgaccaaaaaagatgtgaagctggccaagtttattgaaaaagcagctgcttctgtgtgatttcttccaaaatacatgtaaaatcttgtacacatcttagctgcaatgtatgttgaaggaaatttatgtgaacaaatagagttgttctttttctcttttttttaagacagagtgttgctctgtcgcccaggccagagtgcagtggtatgatctcggctcactgtaacctccgcctcccaggttcaggtgattctcctgcctcagcctcctgagtagctgggattacaagcacgtgtcaccacgcctggctaatttttgtatttttagtatagacagggttttaccacgttggtcaggctggtctcgaactcctgacctcgtgatccgcctgcctcagcctcccaaagtgctgggattacaggcatgagccaccatgcctggctgttgaattgttcttaaggcatcatatctagaagcaaagaaaaaagaaaaataacaatttaagttgtgtaaattgtttgcctttatatattacatttggtaaaatcagtgcttaaatacgcaatgatttaaactggaacctgaggtatttttcatgctatctaatcatatacctaagataaaccaacccagttacttatattaataatattcagaaaaaaaaaaaaagaaaaggaaaaagaaaaatatatattctatatttttttaacttatgagaatgtgttcatttcatttgtaacatataatgggaaacagtaatacgtactctgagaaaaattgcaaagcacagataaatggaaataaacaggaaaaagaatcacctataacctcaccatccatagacagacactgttaaaattttggcatatttcctgctgattttttctactgctgatttttgcacaggtgagataattttgaacagagaattttgtatctttggtttttgtgttttgctgcacacaaaaacaaaagatataaaaatggatcataaacatttttctaaatcctgaaaaatgcatagacatattttagtgcctgtatttcacaagatggacataccataatttacttacacagtcctttttgttagatgtttaagttgttttcaagcttctcagtgctggaaaaaatactgagatagacatgtttagttgaagttatttcatttcaggttatattatcttgggtcagagaatgaatggttctcaggcttttcaaaagagctggtcagtttttatgcctctggcagtttttgagagtgctcaatcatactacactgttgccagcattagatcttatcacatttaagtcattgctaattttataaacaaaaacaatggttttactttgcatctccctgattggtattgctgtagaacatatttggagaagtttgtttgtctttggtgtttatttcatgaatagattgtgtgcccattttctcttggggtattcagttttttattactgatgtgagcatgtgtatgggtgattatttgatgattatcagttttgcttagtagactggcaatatttagtcttgctgtcactgtgttcccagtgcctactagattgcttgatatgtagttgccactcaataaagatttgttgagtc

SEQ ID NO: 56243 - DNA, 2395 bp, Homo Sapiens
ctggggccgacgctctgcccggctgctgccgctgaggaaagccgggacgcggagccccgccgagagcttctttgctccggacgcccctggacgtggcgggcagccgcgagggtaaccaccatgatcccctgggtgctcctggcctgtgccctcccctgtgctgctgacccactgcttggcgcctttgctcgcagggacttccggaaaggctcccctcaactggtctgcagcctgcctggcccccagggcccacccggccccccaggagccccagggccctcaggaatgatgggacgaatgggctttcctggcaaagacggccaagatggacacgacggcgaccggggggacagcggagaggaaggtccacctggccggacaggtaaccggggaaagccaggaccaaagggcaaagccggggccattgggcgggctggcccccgtggccccaagggggtcaacggtacccccgggaagcatggcacaccaggcaagaaggggcccaagggcaagaaaggggagccaggcctcccaggcccctgcagctgtggcagtggccataccaagtcagctttctcggtggcagtgaccaagagctacccacgggagcggctgcccatcaagtttgacaagattctgatgaacgagggtggccactacaatgcttccagcggcaagttcgtctgcggcgtgcctgggatctactacttcacctacgacatcacgctggccaacaagcacctggccatcggcctggtgcacaacggccagtaccgcatccggacctttgatgccaacaccggcaaccacgatgtggcctcaggctccaccatcctggctctcaagcagggtgacgaagtttggctgcagatcttctactcagagcagaacgggctcttctatgacccttactggacagacagcctctttacgggcttcctaatctatgccgaccaggatgaccccaacgaggtatagacatgccacggcggtcctccaggcagggaacaagcttctggacttgggcttacagagcaagaccccacaactgtaggctgggggtggggggtcgagtgagcggttctagcctcaggctcacctcctccgcctctttttttccccttcattaaatccaaacctttttattcatccaaccatctatttattcacttctttttaaagtatctactgtgtaacaggcactatgctattctctgaaagatgcagcagtggacaagacagagtatctgtcctcatgcagcttacattctagcaggagatacaatttacaaatatacaagcaaataatataatattatgccaggatagaaatgaacatgccatggttgacagtaataggaataacaggagacagggaagaggtggaaatttgtttctttttttaagtttgtgtttttaggtttacttacatacagtgactctccagattttaagttgacaactcagtgaataatttttgcttatgtgcacactctgaaacctccatgtagatcaaagaacaagctatttccaacttctcacctcccttccccaaaagctctcttaagacccctctaagtcagtacctggaaaatttccatttttgagctgagttccaaagaaggaaatagagcaacacaaaggcctcgaaaagaggtctccagcaaaaggctctgcaagtgcaaagaccttgacaggaaagagggaggggccaaggtaagaactgagaagggaggcatgaggcgtgaggctggaagataatacagaatgtcccaggccatggcagagctcgttccattcacgaaggcttatcagaatacaaagtgacactgataggcggatcatcttgaatctgctcattgcatgagtcaagtcggccacagacttgagcgctttattattagttaatcttttgcaggcccgcttctcaatgaatgagatacaccaggatatgcacgtgcatctgagaaccgctgctctgagatggcaggaatggatcccacgcaaatgaatcgcaccccaagcacaggtgttgccagtatgcagggatctgggggcttaagaagctgcagtaaaagtgccaggtgctggcgggatgtggtagctcatgcctataatcccaggactttgggaagctgaggtggacggatcatttgaggtcaggagttcaagaccagcctgaccaacatggcaaaacatcgtctaaaaaaatacaaaaattagacaggcgtggtgttgggcgcctgtaatcccagctactggggaggctgaggcgggagaatcgcttgaacccaggaggtggaggttgcagttagctgagatcctgccactgcactccagcctgggcaacagagtgagactatctcaaaaaaaaccaaaaaaaaaaaaaaaaaaa

SEQ ID NO: 56244 - DNA, 2157 bp, Homo Sapiens
gctcccagccaagaacctcggggccgctgcgcggtggggaggagttccccgaaacccggccgctaagcgaggcctcctcctcccgcagatccgaacggcctgggcggggtcaccccggctgggacaagaagccgccgcctgcctgcccgggcccggggagggggctggggctggggccggaggcggggtgtgagtgggtgtgtgcggggggcggaggcttgatgcaatcccgataagaaatgctcgggtgtcttgggcacctacccgtggggcccgtaaggcgctactatataaggctgccggcccggagccgccgcgccgtcagagcaggagcgctgcgtccaggatctagggccacgaccatcccaacccggcactcacagccccgcagcgcatcccggtcgccgcccagcctcccgcacccccatcgccggagctgcgccgagagccccagggaggtgccatgcggagcgggtgtgtggtggtccacgtatggatcctggccggcctctggctggccgtggccgggcgccccctcgccttctcggacgcggggccccacgtgcactacggctggggcgaccccatccgcctgcggcacctgtacacctccggcccccacgggctctccagctgcttcctgcgcatccgtgccgacggcgtcgtggactgcgcgcggggccagagcgcgcacagtttgctggagatcaaggcagtcgctctgcggaccgtggccatcaagggcgtgcacagcgtgcggtacctctgcatgggcgccgacggcaagatgcaggggctgcttcagtactcggaggaagactgtgctttcgaggaggagatccgcccagatggctacaatgtgtaccgatccgagaagcaccgcctcccggtctccctgagcagtgccaaacagcggcagctgtacaagaacagaggctttcttccactctctcatttcctgcccatgctgcccatggtcccagaggagcctgaggacctcaggggccacttggaatctgacatgttctcttcgcccctggagaccgacagcatggacccatttgggcttgtcaccggactggaggccgtgaggagtcccagctttgagaagtaactgagaccatgcccgggcctcttcactgctgccaggggctgtggtacctgcagcgtgggggacgtgcttctacaagaacagtcctgagtccacgttctgtttagctttaggaagaaacatctagaagttgtacatattcagagttttccattggcagtgccagtttctagccaatagacttgtctgatcataacattgtaagcctgtagcttgcccagctgctgcctgggcccccattctgctccctcgaggttgctggacaagctgctgcactgtctcagttctgcttgaatacctccatcgatggggaactcacttcctttggaaaaattcttatgtcaagctgaaattctctaattttttctcatcacttccccaggagcagccagaagacaggcagtagttttaatttcaggaacaggtgatccactctgtaaaacagcaggtaaatttcactcaaccccatgtgggaattgatctatatctctacttccagggaccatttgcccttcccaaatccctccaggccagaactgactggagcaggcatggcccaccaggcttcaggagtaggggaagcctggagccccactccagccctgggacaacttgagaattccccctgaggccagttctgtcatggatgctgtcctgagaataacttgctgtcccggtgtcacctgcttccatctcccagcccaccagccctctgcccacctcacatgcctccccatggattggggcctcccaggccccccaccttatgtcaacctgcacttcttgttcaaaaatcaggaaaagaaaagatttgaagaccccaagtcttgtcaataacttgctgtgtggaagcagcgggggaagacctagaaccctttccccagcacttggttttccaacatgatatttatgagtaatttattttgatatgtacatctcttattttcttacattatttatgcccccaaattatatttatgtatgtaagtgaggtttgttttgtatattaaaatggagtttgtttgtaaaaaaaaaaaaaaaaaaaa

SEQ ID NO: 56245 - DNA, 1949 bp, Homo Sapiens
gcggaaggggctggggttgcggcgcggcggcgaggaccagaccgggggcggggccggtagtgggagtgcggggcgcgcggtgacagcgcggggttggcggcgtgggacccagggggcgacagaggcagcagcagcccgaggcctgaggagaggagaccggcggcggcggcaatgctggagacccttcgcgagcggctgctgagcgtgcagcaggatttcacctccgggctgaagactttaagtgacaagtcaagagaagcaaaagtgaaaagcaaacccaggactgttccatttttgccaaagtactctgctggattagaattacttagcaggtatgaggatacatgggctgcacttcacagaagagccaaagactgtgcaagtgctggagagctggtggatagcgaggtggtcatgctttctgcgcactgggagaagaaaaagacaagcctcgtggagctgcaagagcagctccagcagctcccagctttaatcgcagacttagaatccatgacagcaaatctgactcatttagaggcgagttttgaggaggtagagaacaacctgctgcatctggaagacttatgtgggcagtgtgaattagaaagatgcaaacatatgcagtcccagcaactggagaattacaagaaaaataagaggaaggaacttgaaaccttcaaagctgaactagatgcagagcacgcccagaaggtcctggaaatggagcacacccagcaaatgaagctgaaggagcggcagaagttttttgaggaagccttccagcaggacatggagcagtacctgtccactggctacctgcagattgcagagcggcgagagcccataggcagcatgtcatccatggaagtgaacgtggacatgctggagcagatggacctgatggacatatcggaccaggaggccctggacgtcttcctgaactctggaggagaagagaacactgtgctgtcccccgccttaggtagggttgacaaacttgcattagctgaaccagggcagtatcgatgccactcccctccaaaggtgagacgtgagaaccatctgccagtcacttacgcataaacccccaagctcacagccagctcctggctccctaaccccacggttccacacggctgtgtggcagctgcaacagtggtgtggttccgtcatgaattcttctcaaagatttgacatgctccactccggtaactttggtgagttgagagctttcttgtttgttttccctcctttaccacccagaaatccatttgagtctgctccttgtggttaaggactggcgtttgcagggaggtgcggactctcctgcggggctcacgggaaactcttccctcttcgtgcgacaggcatttaggggcgtgcctgccatgggcaaagccatggtgtgtgttcagctcttggcctgtgttgtaaacttagttgcacttcagttcctttcatcccttcacaaaattttgtttcacattcatgcagcaaatatgggctgaggtgccagacctgtacctgggcttggtgcgtttcaaatttcagaccagttctttgggctgggtcaaggcaaagctcagtcgtcccagcagcacctcagccatctgtagaaggttctaccattaccacggtttcagcttcctctaaacttctcacccgcttctcctggcaatctgtcagaacggtgtcatcctggggaagagaaggagcttgggtgcatttgccctcatcctgagaaggccagaatactggagaccagcgtgaaccctcacccagagtcaggggaagatttagaaacagtgacacctgcatatagaattttgattccttgaagagcctatttagttccataaaattggagaactgctgaaggtcagtaattccgactttctcagcagtggtgtctctgaattactgcaaagggtaaaaaaaaaaaaaagaaa

SEQ ID NO: 56246 - DNA, 1781 bp, Homo Sapiens
actcgggaagacttcagagaagtctcacaaaggactcggctggctgcttttctcagtgccgaagccgcgccatgctcgttctcagaagcggcctgaccaaggcgcttgcctcacggacgctcgcgcctcaggtgtgttcatcttttgctacgggccctagacaatacgatggaacgttctatgaatttcgtacttattaccttaaaccttcaaatatgaatgcgttcatggaaaatcttaagaaaaacattcatcttcggacctcttactctgaattggttggattctggagtgtagaatttggaggcagaacgaataaagtgtttcatatttggaagtatgataattttgctcatcgagctgaagttcggaaagccttagccaactgtaaggaatggcaagaacaatctatcattccaaatttggctcgcattgataaacaagagacggaaattacttacctgataccatggtccaaattagaaaagcctccaaaagaaggagtctatgaactagctgtttttcagatgaaacctggtgggccagctctgtggggtgatgcatttgaaagagcaattaatgcccatgtcaatttaggctacacaaaagtagttggtgttttccacacagaatatggagaactcaacagagttcatgttctttggtggaatgagagtgcagatagtcgtgcagctgggagacataagtcccatgaggatcccagagttgtggcggctgttcgggaaagtgtcaactacctagtttctcagcagaatatgcttctgattcctgcatcattttcaccattgaaatagttttctactgaaatacaaaacatttcattaactgctctaagatgtgtctgctaatggtgcttaaattctcccaagaggttctcgcttttatttgaaggaggtggtaagttaattagttaatttgctgtgcttcttgcatttttgaaagttacatattctccactgctttaagaaataattcagttcactttcaccttggcatttcagtatctgttacacattagaagtagttgtcactatttcatcatcttggtttttcatttgttttagaatacctcttctgtattttgataactcattgctttatagcattttcttttactcaaataaggattttacatttccttgcctgacagtatttttgaattatttatataaaatatctatcttttcatcatgtctatagttcctgagattttaaaaaaatttgcttagtaaaggttattttgtgatataaaatgggatttataaaaatattagattgtttatttctttactgtggaaaagtagaatgtcatctgtattaattattgcttttacattcattgattattagtcattctaacttggaaaataatgcaattgggtcacagtgttaaaaatctagaaaagacttgttggtttatatgctgaaattgttcatttataattaattttactaatttctccttagtttggatcactaacagagatcttgggacatttatttgttttaaagaaatatttatggttatggaaacgcttgccctaataaaaatcctgcatattcattgtttttttaaattcacattttatacttatatgatctctaaagctcttgctatgttgctataagacagtaatatagtgataatttaccaactttattgaaaatgttgttacatcaataaaatagcatgctgggaacctgagaaggaaggtttctttagtactgccaaaaaaaaaaaaaaaaaaaaaaaaaaaaaa

SEQ ID NO: 56247 - DNA, 14734 bp, Homo Sapiens
cggcggcagtggcggcaccgcctcctcctcacattcccggggtggcggggttagatgagcggccccagtcgcggcgccgggggcgctgttcatgccggttcccgacggctccgtggctgctgcggggctggggctggggctacccgccgcggactccccgggtcactaccagctgctgctgtcaggccgggccctggccgaccgctaccggaggatttataccgctgcgctcaatgacagggaccaggggggcggcagcgctggacacccagcctccaggaataagaaaattttaaataagaagaaattgaaaagaaaacagaagagcaaatcaaaagtgaagacaagaagcaagtctgaaaacttagagaatacagtaatcataccagatatcaaactacatagcaatccttctgctttcaatatttactgtaatgtacgccattgcgttctggaatggcagaaaaaggaaatatcattggcagccgcatctaagaactctgtgcagagtggagaatcagatagtgatgaagaagaggaatccaaagagccccctatcaagcttccaaagattattgaggttggcctttgtgaagtttttgaattgatcaaagagacacgattttctcatccatccctgtgtctcaggagtctccaagccctgctcaacgtgctgcagggccagcagccagaagtgctccagtctgagccacctgaggtcctagagtctctcttccagcttcttttggaaatcaccgttcgaagtactgggatgaatgacagcacaggacagtccttaacagcactttcctgtgcttgcctctttagtctggtggcttcttggggagaaacaggaaggacacttcaggccatctctgctatcctcaccaacaatggaagccatgcttgccaaactattcaggtgccaacaattctaaattcgctacagagaagtgtacaagcagttttggtgggaaaaattcaaattcaggactggtttagtaatggcattaagaaagcagctttaatgcacaagtggccattaaaagaaatatctgttgatgaagatgaccaatgtctacttcagaatgatggattttttctttatctattatgcaaggatggattatataaaataggctctggatacagtggaacagttaggggccatatatacaattctacatcccgtattagaaacagaaaagaaaaaaagtcttggttagggtatgctcagggttatttattatatagagatgtgaataaccacagcatgacagccataaggataagccctgaaacactggagcaagatggtactgtgatgttaccagattgccacactgaaggtcaaaatattttattcactgatggagaatatattaatcagatagctgcttcaagagatgatggctttgttgtcagaatatttgccacaagcactgaacctgttctacagcaagaattgcaacttaaactggctagaaaatgcttacatgcctgtggtatctcactattcgatctggaaaaggacttgcatattataagtacaggatttgatgaggagtcagcaattcttggtgcaggacgagagtttgcgctaatgaaaacagcaaatggaaagatatattacactggcaaataccagagtcttggaatcaaacaaggtggtccttcagcaggaaaatgggttgagctaccaattacaaaatctccaaagatagtacacttctcagttggacacgatggctctcacgcccttttagttgcagaagatgggagcatattctttacaggatctgctagtaaaggagaagatggagaatcaactaagagcagacggcaatccaaaccttataaacctaaaaagataattaagatggaaggaaagattgtggtatatacagcctgcaataatggaagtagttctgttatttctaaagatggagaactctacatgtttggaaaagatgccatttactctgatagttcaagtttggtaactgatttgaagggccattttgtaactcaggtagctatgggcaaagctcacacttgtgttttaatgaagaatggagaggtgtggacatttggtgtaaataataaaggacagtgtggacgagatactggtgccatgaaccaaggtgggaaagggtttggagttgaaaatatggcaacagcaatggatgaagacctggaagaagaactagatgaaaaagatgagaagtctatgatgtgccctccaggcatgcacaaatggaagctggagcagtgcatggtttgcactgtctgtggagactgtacaggttatggagccagctgtgtcagtagtggacggccagacagagtccccggagggatctgtggttgtggttccggagaatctggttgtgctgtgtgtggatgttgcaaggcctgtgcaagagagttagatggtcaagaggcaagacaaagaggaattcttgatgcagtgaaagaaatgatacctttagatcttcttttagctgtcccagtgcccggggttaacattgaagaacaccttcagttacgacaagaagaaaaacggcaacgtgtaatcagaaggcacagattagaggaaggaagaggcccccttgtatttgctggtcctatttttatgaaccatcgagaacaggctctagccagactcagatcccatccagcacagctaaagcataaacgggacaagcacaaagatggaagtggagaaagaggcgaaaaggatgcaagcaaaatcacaacataccctccaggctctgtgcgatttgactgtgagctccgggcagtccaagtcagctgtggatttcaccattcagtggttttaatggaaaatggagatgtctatacatttggttatgggcagcatgggcagctaggacatggagatgtcaactccaggggatgtcccactcttgttcaagcattgccaggccctagcacacaagtcactgcaggcagcaaccatacggcagtacttttaatggatggacaggtcttcacatttggaagtttttctaaaggacaactgggcagaccaattttggatgtgccatattggaatgcaaagccagctcccatgcctaacattggatcaaaatatggaagaaaagctacttggataggtgcaagtggggaccaaacttttttacgaattgatgaagcacttattaattctcatgtacttgctacatcagaaatttttgccagtaaacacataataggcttggtacctgcttctatatcagaacctcctccatttaaatgccttctgataaataaagtggatgggagttgtaaaacttttaatgactcagaacaagaggatctgcaaggatttggtgtgtgtcttgatcctgtatatgatgtaatttggaggtttcgaccaaatactagagagctgtggtgttacaatgcggtggttgctgatgccaggcttccctctgcagcagacatgcagtccagatgtagtatcctaagtcctgaacttgccttaccaacaggatcaagggccctcactacccgatctcatgcagctttgcacattttaggttgtcttgataccttggcagctatgcaggacttaaaaatgggtgttgcaagtacagaggaagagactcaagcagtaatgaaggtttattctaaagaagattatagtgtggtaaacaggtttgaaagtcatggaggaggctggggttattctgcccattcagtagaagctatacgtttcagtgccgacactgatattttacttggtggtcttggtctgtttggaggtagaggagaatatactgctaaaattaagctgtttgaattgggtcctgatggaggagatcatgaaactgatggtgaccttcttgcagagactgatgtattggcttatgactgtgctgctagagaaaaatatgcaatgatgtttgatgagcctgttctcctgcaagctgggtggtggtatgtggcatgggcccgagtgtcaggacccagcagtgactgtggatctcatggacaggcatctattaccacagatgatggggttgttttccagttcaagagttcaaagaaatcaaataatggtacagatgttaatgcgggtcagatacctcagttattatacagacttccaaccagtgatggcagtgcttcaaaaggcaaacagcaaaccagtgaacctgtacacattttaaagaggtcttttgcaagaactgtctcagtggaatgttttgagtcattgttgagtattcttcactggagctggaccaccttagtcttaggagttgaagaacttagaggattaaaaggattccagttcacagctacactcctagatttagagagactgcgctttgtgggtacctgttgtctgaggttattgcgtgtctatacctgtgaaatttacccagtgtcagctacaggaaaagcagttgtagaagaaactagcaaattagcagagtgtattggaaaaaccagaactttgttaagaaaaattttatcagaaggagttgatcactgcatggtgaaattggataatgatcctcaaggatatctcagtcaacccttgagtcttctagaagctgtccttcaggaatgtcataatactttcactgcctgctttcattctttctacccaactcctgccttacagtgggcttgcctttgtgatctgctgaattgtttggatcaggatatccaagaagcaaacttcaagacatcaagtagccgactccttgcagctgttatgtcagctctgtgtcacacgtctgttaagctgacttccatcttcccgattgcgtatgatggagaagtattactacgatcaattgttaaacaagttagtacagagaacgactcaacactagttcatcgttttccccttttggtggcacatatggaaaaactcagccagagtgaagagaatatctcagggatgacaagcttccgtgaagttctggagaaaatgctggtcattgttgtgctaccagtcaggaacagcctgaggagagaaaatgaactcttctcctcccacctcgtctctaacacctgtggattactggccagcattgtcagtgaactgacagcgtcagccctgggatctgaggttgatggacttaattctcttcactctgtaaaagctagtgctaaccgatttacaaaaacaagtcagggcagaagttggaacactgggaacgggtcccctgatgcaatctgtttttcagtagacaaacctggaatagttgtggttggtttctctgtctatggaggaggtggaattcatgaatatgaattagaggtgttggttgatgatagtgaacatgcaggagattcaactcattcccacagatggacatctctggaattagtgaaaggaacgtacacaacggatgactcacccagtgatatagctgagatcagacttgacaaagtggttcctttaaaggaaaatgttaaatatgctgtgcgcttgaggaactatggaagccgtacagccaatggagatggaggaatgaccacagttcagtgccctgatggtgtgacattcacattcagcacgtgcagcttgagcagtaacggcacaaaccaaaccagaggacagatcccacagatactctactataggagtgaatttgatggagatttacaatcccaacttctgagtaaagccaatgaagaagataaaaactgtagcagagcattgtctgttgtaagcactgtcgttcgagcctctaaggacctcctgcacagagctcttgctgtggatgctgatgacattccagaactgctgagttcttccagtctgttttccatgctgctcccccttattatagcctacataggaccagtagctgctgctattcccaaggtggctgtagaagtctttggccttgtccaacaattgcttccgtcagttgccattttgaatcagaagtatgcaccgcctgccttcaaccctaatcagtcgacagatagcaccacaggaaaccagcctgaacagggcctctctgcttgtacaacctccagtcactatgctgtcatagagagtgagcacccgtataaacctgcctgtgtgatgcattacaaggtgacattcccagaatgtgtgaggtggatgacaatcgaatttgaccctcagtgtggtactgcacagtcagaagatgtccttcgtttgttgattcctgtcagaactgttcagaattcaggatatggaccaaaattgacatctgttcatgaaaatcttaattcatggatagaattaaagaaattttcaggatcctctgggtggcctactatggttttggtgttgccaggaaatgaggcccttttttcattggagactgcatcagattatgtgaaagatgacaaagcttctttctatggttttaagtgttttgcaattggatatgaatttagccctggacctgatgagggagtcatccaattggaaaaagaattagccaatcttggtggggtttgtgcagcagctctgatgaagaaggacctagcacttcctattggtaatgaattagaagaagaccttgaaattcttgaggaggctgcattgcaggtgtgcaaaacccattctggaattcttggaaagggtctagctctttctcattcaccaactatattagaagcacttgagggaaatttaccactccaaatccaaagcaatgaacagtcttttctggatgattttattgcctgtgtcccaggatcaagtggtggaaggcttgcaaggtggcttcagccagattcatatgcggatcctcagaaaacatctttgatcctgaataaggatgatattcgttgtggttggcctaccaccataactgttcaaacaaaagaccagtatggggatgtggtacatgttcccaatatgaaggtggaagtgaaagctgtccctgtttctcagaaaaaaatgtctttacaacaagatcaagcaaagaaacctcaaaggattcctggcagtcctgcagtaacagctgcatcttctaatactgacatgacttatggagggctggcatcaccaaagctagatgtttcatatgaaccaatgatagtgaaggaagctcgatatattgccataacaatgatgaaggtttatgaaaattattcatttgaagaactacgttttgcatcaccaactcctaagagacccagtgagaatatgctgatccgtgtcaataatgatgggacttattgtgcaaattggactccaggggctattggactctacactcttcatgttaccattgatggcattgaaatcgatgctggtctggaagtaaaagtaaaagacccaccaaaagggatgataccaccaggaactcagttggtcaaaccaaagtctgaacctcagcctaataaggttcgaaaatttgtggccaaggacagtgcggggcttcgcatccgtagccacccttcccttcagagtgagcagataggcatagtgaaagtcaatggaactatcacttttattgatgagatccataatgatgatggtgtgtggctgaggctgaatgatgagacaataaagaagtatgtccctaacatgaatggttacactgaagcctggtgcctctcttttaatcaacatcttggcaagagtcttctggtccctgttgacgaatctaaaactaatactgatgactttttcaaagacataaactcctgctgcccacaggaagcaacaatgcaagaacaagatatgccattcttgcgaggagggccaggcatgtacaaggtagtgaagacgggaccttcaggtcacaacatcagaagctgccctaaccttagaggtatcccaattggaatgttagttctgggaaacaaagtcaaagcagtgggagaggtaaccaattctgaagggacatgggtgcaactggatcagaacagcatggtagagttctgtgagagtgatgaaggagaggcatggtccttagctagagacagaggcggaaaccagtacctccgacatgaagatgaacaagctcttctggatcagaattctcaaactcctcctccaagccctttctcagtgcaagcttttaataaaggggcaagttgcagtgcccaaggatttgattatggactcggaaatagcaaaggtgatcgaggaaacatctcaacatcttctaaaccagcctctacatcaggaaaatcagagctgtcctctaaacacagcagatcgcttaaacctgatggacgtatgagccggactactgctgatcagaagaagccaaggggcacagaaagtttatctgctagtgaatccctcatcttaaaatctgatgctgcaaagttgaggtcagattcccacagtaggtcattatcccccaaccataacaccttgcagacattgaaatctgatgggaggatgccttctagctccagagctgaatccccaggaccaggttctcggttgtcatctcctaagccaaagactctcccagccaataggtctagcccatcgggtgctagttctccacgctcctcctcaccacatgataaaaatctacctcaaaaaagtactgctcctgttaagacaaagcttgatcctcctcgggaacgttctaaatcagactcttacacacttgatccagataccctccgcaagaagaaaatgcccctcacagaacctttgagaggacggtcaacgtcaccaaaaccaaaatcagtaccaaaggattctacagattcccctggatctgaaaatagagctccctctccccatgtggtacaggaaaacctccacagtgaggtggtcgaagtctgcacctcaagtactttaaaaacaaatagtctaacagacagcacctgcgatgacagcagtgaatttaagagtgtggatgaaggttcaaataaagttcattttagcattggaaaagcaccactgaaagatgaacaggaaatgagagcatctcccaaaataagtcgaaaatgtgctaatagacacaccaggcccaaaaaagaaaaatcgagttttcttttcaaaggagatggatccaagcctttagagccagccaagcaagccatgtctccttctgtggccgaatgtgccagagctgtgtttgcttccttcctctggcatgaaggcatagtacatgatgcaatggcttgttcttctttcctaaagtttcatcctgaactttccaaagaacatgctcctataaggagtagtttaaatagccaacaacctacagaggaaaaagaaaccaagttaaaaaatagacattcattagaaatatcatctgcactgaatatgtttaatattgcaccccatggaccagatatatctaagatgggtagcatcaacaaaaacaaggtattgtctatgcttaaggaaccacctctgcatgaaaaatgtgaggatgggaaaaccgagaccacttttgaaatgtccatgcataacacaatgaagtctaagtctcctcttcccttaactttacaacatttagtggctttttgggaagacatctctttggctactatcaaagctgcttcccagaatatgatttttccaagtcctggttcctgtgcagttcttaaaaagaaagagtgtgagaaagagaataagaagtccaaaaaggaaaaaaagaaaaaagaaaaggcagaagttaggcccaggggtaatttgtttggagagatggcccagctggcagtaggaggaccagagaaagataccatctgtgaactgtgtggggagtcacatccatacccggtgacctatcacatgagacaagctcacccaggttgtggccgatatgctggtggacaaggttacaatagcattgggcatttttgtggaggatgggctggtaactgtggtgatggtggcataggaggaagcacttggtatctggtatgtgatcgctgtagagaaaaatacctccgcgaaaaacaggctgctgcaagggagaaggtcaaacaatctaggagaaaaccaatgcaagtcaagacccctcgtgccttgcccaccatggaagctcaccaggtgattaaagccaatgcactcttcctgctgtccctgagcagtgcagcagaaccgagcattctgtgttaccatcctgcaaagccattccaatctcagttgcccagtgtaaaagaaggcatttctgaggatcttcctgtgaaaatgccttgtctctacctgcagacattagctaggcatcatcatgaaaattttgtgggctatcaagatgacaatctattccaggatgaaatgagatatctacgttcaacatctgtacctgccccgtatatatcagtaactcctgatgcaagtcctaatgtatttgaagagccagagagcaatatgaagtctatgccaccaagtttagaaaccagtcccataactgatactgatcttgcaaagagaactgtcttccaaagatcatactcagttgttgcttccgaatatgataaacaacactccattttacctgcacgagttaaagctattcctagaagaagagttaacagtggagacactgaagttggttcttcccttttgagacatccgtctcctgagctttctcggctaatctcagcccacagctctctttctaaaggagaacgaaatttccagtggccagttttagcttttgttatacaacatcatgatctagaaggtcttgaaatagcaatgaaacaggccctaaggaaatctgcttgtcgagtttttgctatggaggctttcaactggcttctgtgtaatgtcatccaaaccacttctctccatgatattctgtggcattttgtggcatcactgactcctgcaccagtggaaccagaggaagaagaggatgaagaaaataaaacaagcaaagaaaattcagaacaagagaaagatacaagagtatgtgaacatccactctcagacatagtgattgccggggaagctgctcatcctttaccacacacctttcaccgcttgctgcagaccatctcagaccttatgatgtctctccccagcggcagttcattacagcaaatggccctgaggtgctggagtctcaaattcaagcaatctgatcaccagttccttcatcagagcaacgtctttcatcacattaacaatattttgtcaaagtcagatgatggcgatagtgaagagagttttagcatcagtatacagtctggctttgaagctatgagtcaggaattatgcatagtaatgtgcttaaaggacttaaccagcattgttgacataaaaacttcaagccgacctgccatgattggcagtttgacagacggctccacagaaaccttttgggaatcaggagatgaagataaaaacaaaactaagaacatcaccatcaactgtgtaaaaggaatcaatgcccgctatgtgtctgttcacgtggacaattcccgagatcttgggaataaagttacctcaatgaccttcttaactggcaaagcagtagaagatttgtgcagaataaagcaggttgatctggattccaggcacattggctgggtaacaagtgaacttccaggaggggataatcacatcataaaaattgaattaaaaggcccagaaaatacactgagagttcgacaagtcaaagtcctgggctggaaagatggtgaaagcacaaaaatagctggccagatttcagccagtgtggcccagcagaggaactgtgaagctgagactctgcgagtattcagactgattacgtctcaagtatttggaaagctcatctctggagatgctgaacctacaccagaacaagaggaaaaagcactattgtcatcacctgaaggagaagaaaaagtatacaatgcaacatcagatgctgacctgaaagaacatatggttggaatcatattcagcaggagtaagctgactaacttacaaaaacaggtgtgtgctcatattgtccaagctattcgcatggaagctaccagagtccgtgaagaatgggaacatgctatatcaagcaaagaaaatgccaattctcagccaaatgatgaagatgcctcctctgatgcctactgctttgagctgctctctatggttttagcactgagtggctctaacgttggccggcaatatctggctcaacagctaaccctgcttcaggatctcttctcgctgcttcacacagcctctcctagagtccagagacaggtaacctctttactaagaagagttttgcctgaagtaacccctagtcgtctggccagcatcataggagtgaaatccctccccccagcagatatcagtgatatcattcactcaacagagaaaggagactggaataagctgggtatcttggacatgtttctaggatgcattgccaaagcactcactgtacagctaaaagccaaaggaaccaccatcactggaacagctggtaccactgtgggcaaaggagttacaacagttactcttccgatgattttcaattccagttatctccgacgaggtgaaagtcattggtggatgaagggctcaacccctacccagatctcagagatcatcattaaacttatcaaggatatggcagcaggtcatctgtcagaagcttggtcccgagtgacaaaaaatgctattgcagaaaccatcattgccttgaccaagatggaagaagaatttaggtctccagtgagatgtattgcaacaactagactctggcttgctctcgcatccctatgtgttcttgatcaggaccacgtagatcgtctctcctcggggagatggatgggaaaggatggacaacaaaaacaaatgcctatgtgtgataaccatgatgatggtgaaactgcagcaatcattttatgcaatgtctgtggaaatttatgtacagactgtgacagattccttcaccttcatcgaagaaccaaaactcatcaaagacaggtcttcaaagaagaagaagaagctataaaggttgaccttcatgaaggttgtggtagaaccaaattgttctggttgatggcactggcagattctaaaacaatgaaggcaatggtggaattccgagaacacacaggcaaacccaccacgagtagctcagaagcatgtcgcttctgtggttccaggagtggaacagagttatctgctgttggcagtgtttgttctgatgcagattgccaggaatacgctaagatagcctgtagtaagacgcatccttgtggccatccatgcgggggtgttaaaaacgaagagcactgtctgccctgtctacacggctgtgacaaaagtgccacaagcctgaagcaagacgccgatgacatgtgcatgatatgtttcaccgaagcgctctcggcagcaccagccattcagctggattgtagtcacatattccacttacagtgctgtcggcgagtattagaaaatcgatggcttggcccaaggataacatttggatttatatcttgtcccatttgcaagaacaaaattaatcacatagtactaaaagacctacttgatccaataaaagaactctatgaggatgtcagaagaaaagccttaatgagattggaatatgaaggtctgcataagagtgaagctatcacaactcctggtgtgaggttttataatgacccagctggctatgcaatgaatagatatgcatattatgtgtgctacaaatgcagaaaggcatattttggtggtgaagctcgctgcgatgctgaggctggacggggagatgattatgatcccagagagctcatttgtggtgcctgttctgatgtttccagggctcagatgtgtcccaaacatggcacagactttttggaatataaatgtcgctactgctgttcagtggctgtttttttctgttttggaacaacacatttttgtaatgcttgtcatgatgattttcaaagaatgactagcattcctaaggaagaactaccacactgtcctgcaggtcccaaaggcaagcagttagaaggaactgaatgtccactccatgttgttcatccacccactggggaagagtttgctctgggatgtggagtgtgcagaaatgcccacactttttagaacacgcagatcctttgtctacagagagaaaaattgccttcatcccccaagaggatgcggtgaagtttaaactctgctcaggataaggacgggaccatttttacatccatgaaaatgaaccattcacagtgcaagaaggataccaaataccatgtacataattcttgctatgaaaagtttccccattattttggtttatcttcttttgaacaaatgacatcaaacttgtgaggtgtttgcatgtggccattaccgtcattggcctgtgaagcattggacatttatagataattgatataaaagaatcgccatgcccatggactaagaacgatgctggctttcaagcaaaaaagaaaaataatcattgtttattgtatactgcctttttgtaatcctgtacaattgcatcacgggtggggataaaaagaggaatattctggtttatttcctagactgttatttaaaaaaaaaaaaaacattgtgttaggacagcatataaatgtaataagtatcacactgtatataaacatatcaatgtttgtcctgtataagaattactaaattacaaatgcaatttcatttaaacttctaggttaagtttgagcctgaaattttaatgaagtgcaatactgagtgtgcctcattatcttgcagctgtaaacatattggaatgtacatgtcaataaaaccactgtacatttttatacagtgataaagtct

SEQ ID NO: 56248 - DNA, 1794 bp, Homo Sapiens
gaagtatactcattcaagtaaaggatcagtttcagggttcaggctgaagtgtcttaatgactagaattcaggttccaaggagaagcccacaaggctaagggtattggatataacggaaagtggaagctatacctgacttccagagaatgtggaccggatataagatcttaatcttctcttatcttactacagaaatctggatggagaagcggtatttatctcaaagagaagtggacctagaggcttatttcactaggaatcacaccgttttgcaaggtactcgattcaaaagagccattttccaagggcaatactgtagaaattttggctgttgtgaagacagagatgatggctgtgtcactgagttctatgcggcgaatgcgttgtgctactgtgataaattctgtgacagagaaaattctgattgctgtcctgactacaagtccttttgccgtgaagagaaagaatggcctcctcacacacagccttggtatccagaaggttgcttcaaagatggtcaacattatgaagagggatcagtaattaaagaaaactgcaactcctgcacatgctcaggacagcaatggaaatgttcccagcatgtatgccttgttcgttcagaattaattgaacaggtcaataaaggagactatggatggacagcacagaattacagccaattttggggaatgactttagaagatggttttaaatttcgccttggcactttgccacctagtctcatgctcctgagcatgaatgaaatgacagcttctttacctgcaacaactgatcttccagagttttttgttgcttcttataaatggcctggatggactcatggcccattggatcaaaaaaattgtgctgcatcctgggcattttccactgcaagtgtggctgctgaccgaatagcaattcagtctaagggtcgatacacggccaatctatcccctcagaatttgatctcttgctgtgccaagaaccgtcatggatgcaatagtggaagcatcgatagggcttggtggtacctgagaaaacgtggactggtatcccacgcatgctacccacttttcaaagaccaaaatgctaccaacaatggatgtgccatggcaagcaggtctgatgggcgaggaaaacggcatgccacgaagccatgtcccaacaacgtagaaaaatctaacaggatctatcaatgttctcctccatacagagtctcttccaacgaaactgagataatgaaagaaatcatgcaaaatggaccagttcaagccataatgcaagtccatgaagatttcttccattataagacagggatatacagacatgttaccagcacaaataaagaatcagaaaaatatcgaaagcttcagacacatgcagtcaaactcactggatggggcacactgagaggagcacaagggcagaaagaaaaattttggattgctgccaattcctggggaaagtcatggggagagaatggctatttcaggattcttcgaggagtaaatgagtccgacattgaaaagttgattatcgcagcttggggccaactgacgagttctgatgaaccataacatatcattaaatttccataaggtcatgcctttaagtaaccccctaaattgaagtttagcaatatgacattcttggtgacagtggaatctttgtctcttcaccgtgttaacataatctatctattttcttattttcccctctggtctatgcttctgcttccttcatattactgagcattaacaacaccaaaaaaaaaaaaaaaaaaaaaaaaaaaaa

SEQ ID NO: 56249 - DNA, 1691 bp, Homo Sapiens; identical to SEQ ID NO: 25199

SEQ ID NO: 56250 - DNA, 2630 bp, Homo Sapiens; identical to SEQ ID NO: 30546

SEQ ID NO: 56251 - DNA, 6636 bp, Homo Sapiens; identical to SEQ ID NO: 30035

SEQ ID NO: 56252 - DNA, 7011 bp, Homo Sapiens
agtgtgggcgggggccggggggccgagaggtaccgccgccaccgcgcggggagccgcagcggttccgagcggggcccaacatggcggagagagaggtggagtccggcccccgaaagaggtttgaacaaaaaagtggtgcagtttttgatgaaattgtagagaactgtggtggtatcatggatacagaaatgtctgaagatatagaccacaacttaactcctacccttgacagcatgtcttatggaatgccgaatcaaacaggatctgaaaattcattgctggatgaagatgattattttttgaactctggggatcttgcaggaattccagtcgttggtagtgacaatgaggatgaacaggattttagttcaaaggacaatcttgtttcttcaattcatactgatgatagcttggaagtagagagaagagtcacacagcatgaatcagacaatgaaaatgaaatacaaattcaaaataagttaaaaaaagactttcctaaacaatttgatcaggtttctgtctttaaatcaatacggaaagattttagtctagtaagagaaaacagcaaagagacattttctggaaaggagaaaaatagagacctaacttatgaacgtgaaaaacggttggataaaccccataaagatttggattcaaggttgaaaagcagtttttttgataaagcagctaatcaagttgaagaaacattacatacccatttaccacaaaccccagaaacaaactttagggattccagctacccatttgccaataaagaatccattggttcggaactggggaattcctttgcatcaaatattagaattaaagaagaacctttggatgatgagtatgacaaagcaatggcaccacagcagggactactagacaaaataaaagatgaacctgacaatgctcaagagtatagtcatggccaacagcaaaaaactcaagagggggaactgaaaattagtgctgtgttttcagtcagtggcagccctcttgctccacagttgactactggctttcagccctcactggcgtcatctggcatgaataaaatgcttccttcagttccagccacagctgttcgagtttcctgttctggttgtaaaaaaatcctccagaaggggcaaactgcttatcagaggaaagggtctactcagctattctgctccacactgtgcctcactggatatacagttccacctgcccgcccaccgcctcctctcaccaagaaaacttgttcaagttgctcaaaagacattttaaatccaaaggatgtgatcagtgcccagtttgaaaacaccaccactagtaaagatttttgcagtcagtcatgtttgtcaacatatgaactgaaaaaaaaacctattgttaccataaatacaaatagtatttcaaccaaatgcagcatgtgtcagaagaatgctgttattcgacatgaagttaattaccagaatgtggtccataaactttgcagtgatgcctgcttctctaagtttcgttctgctaacaacctcaccatgaactgttgtgagaactgtgggggttactgttacagtgggtcgggacaatgccacatgcttcagatagagggacagtctaagaagttttgtagttcatcgtgtatcacggcatacaagcagaaatcagccaaaattacaccgtgtgcgctttgcaaatcattgagatcctcagcagaaatgattgaaaataccaatagcttggggaagacagagcttttctgttctgttaattgcttatctgcttacagagttaaaatggttacttctgcaggtgtacaagttcagtgtaacagttgtaaaacctcagcaattcctcagtatcacctagccatgtcagatggaagtatacgcaacttctgcagctacagctgtgtggtagctttccagaatttattcaacaaaccaactggaatgaattcttcagtagtgcccttgtctcagggccaagtaattgtaagcatccccacaggttccacagtgtcagccggaggaggtagcacatctgctgtttctcccacctccatcagtagctctgctgcagctggtctccagcgtctcgctgcccagtcccagcatgttgggtttgcacgaagtgttgtgaaactcaaatgtcaacactgtaaccgtctttttgccacaaaaccagaacttcttgactataagggcaaaatgtttcagttctgtggcaagaattgttctgatgaatataagaaaataaataatgtaatggcaatgtgtgaatattgtaaaattgagaaaattgtaaaggagactgttcggttctcaggtgctgacaagtcattctgtagtgaaggttgcaaattgctttataaacatgacttggcaaaacgctggggaaatcactgtaaaatgtgcagttattgtttacagacatctcccaaattggtacagaataatttaggagggaaagtggaagagttctgttgtgaagaatgcatgtccaaatatacagttttgttctatcagatggccaaatgtgatgcttgtaagcgacagggtaaactcagtgagtccttgaaatggcgaggggaaatgaaacatttctgtaacctgctttgtatcttgatgttctgtaatcagcaaagtgtatgtgacccgccttcacaaaataatgcagcaaatatttccatggttcaagctgcttcagcaggacccccatctctgagaaaagattcgactccagttatagccaatgtagtatcattggcaagtgcccctgctgctcagcctacagtgaattctaacagtgtcttacaaggtgcagttccaacagtaacagcgaaaatcatcggtgatgcaagtactcaaacagatgccctgaaactgccaccttcccaacctccaaggcttttgaagaacaaagctttattatgcaaacccatcacacagactaaagccacctcttgcaaaccacatacccaaaacaaagaatgccagacagaagacactccaagtcagccccagattattgtggtgccagttcccgtaccagtgtttgttcccatacctcttcacctttatactcaatatgctccagtcccatttggaattccagttccaatgcctgtccctatgcttattccatcttcaatggatagtgaagataaagtcacagagagtattgaagacattaaagaaaagcttcccacacatccatttgaagctgatctccttgagatggcagaaatgattgcagaagatgaagagaagaagactctatctcagggagagtcccaaacttctgaacacgaactctttctagacaccaagatatttgaaaaagaccaaggaagtacatacagtggtgatcttgaatcagaggcagtatctactccacatagctgggaggaagagctgaatcactatgccttaaagtcaaatgctgtgcaagaggctgattcagaattgaagcagttctcaaaaggggaaactgaacaggacctggaagcagattttccatcagactcctttgacccacttaataaaggacagggaatccaggcacgttcccgaacaagacgacgacacagagatggcttcccccaacccagacgaagaggacggaagaagtctatagtggctgtggagcccaggagtcttattcaaggagcctttcaaggctgctcagtgtccgggatgacactgaaatacatgtatggggtaaatgcttggaagaactgggttcagtggaaaaatgccaaggaagagcagggggatctaaaatgtggaggggttgaacaggcctcatctagcccacgttctgaccccttaggaagtactcaagaccatgcactctctcaagaatcctcagagccaggctgtagagtccgctctatcaagctgaaggaagacattctgtcctgcacttttgctgagttgagtttgggcttatgccagtttatccaagaggtgcggagaccaaatggtgaaaaatatgatccagacagtatcttatacttgtgccttggaattcaacagtacctgtttgaaaatggtagaatagataacatttttactgagccctattccagatttatgattgaacttaccaaactcttgaaaatatgggaacctacaatacttcctaatggttacatgttctctcgcattgaggaagagcatttgtgggagtgcaaacagctgggcgcttactcaccaatcgtccttttaaacaccctccttttcttcaataccaaatacttccaactaaagaatgttactgagcacttgaagctttcctttgcccatgtgatgagacggaccaggactctgaagtacagtaccaagatgacatatctgaggttcttcccacctttacagaagcaggagtcagaaccagataaactgactgttggcaagaggaaacgaaatgaagatgatgaggttccagtgggggtggagatggcagagaatactgacaatccactaagatgcccagtccgactttatgagttttacctgtcaaaatgttctgaaagtgtgaagcaaaggaatgatgtgttttaccttcaacctgagcgctcctgtgtcccgaatagccccatgtggtactccacattcccgatagaccctggaaccctggacaccatgttaacacgtattctcatggtgagggaggtacatgaagaacttgccaaagccaaatctgaagactctgatgttgaattatcagattaaaacggaagtgaggttcttattttcatacatattggtatgcaccaaactgtgaatgcatccagctgttggaaaatgatgtataagtctaagtcctcttgacttgaccataagatcatggaaaacagatgacttgtgaaccccacagtgtggatgtgcaaatgaaaattgaaggaaagaatatgaactgagaaatgttctttggcagtgatatagttcttagacatcttcagaatgactaatttctccgagtggtgcataatcttattttgtttgggagtaacaaatcgtggaatatttttaaggaaaactgttgtataaaactttaccatagtaaccttagaccttagagaggtagctttggagtgaaactttggctgcaataggctactttggcaagccctccgtaaaagtcagaggagagatcagtacagagctaagagtgacatcaaatgaggactgtgggacccagatttgaagacccaataaaaatactcaactttttaaaaaagatagtgaagtggtcttgattgattttgattttcactgccaagccaatcatgtgaaggacagaagcttttgccatgggcccctcacatcagggaaaatgaccttcactgctgttaacagtaatgtgtccctttcattttctggatcaagccttctcagcggtgggtctggatgtgggtaaactaaggtaaaggggatgatattccacaaactaattatgcacacagaaaatctgtggagcctatcagaccccaagtgtcttgaaatgtttgtagaaacccactaaaatgccccttctctgggtgtgggcccttattgcagctgtctcacagcctgagctgtggtacagagaaatgggggttctccttttattttcattttttttccccaatggcagcttttctcccgttgttttaccttcctatttcccaaacagttcctcttattttgtcttttgcaccagtttctggaggcccttgtcatttcaaaaaggatagtctcttttcttactctggcaaacctgtgagtgattccacaaagatacagtattacttagctatctgaattatgatagaaaaggtcctagttaggttcctatataaagcatttggaagatgaccttgttgcccttgaaacttgaaaatagggattctggggtgaggatacaaagacattgtcttgcatatccataagcaggtcttagagcattattccaaactctagctgtttcagtagttctatgaggattgcaagtcataggtgtgtgtggcatatcagtccatctccctcatctccattctcagtttcttccccacaaaatttggaatcaaagcttttatgacgtttgccaattgcagaacttcttcagctaaggttaatttgacgctatgataaaactgagagatgtcaaaaagcctcttagaaattttaatcttgaaagacttttcagggtatctcattttttaggtgggggtggcaggtgtatttcttttttaacaaataaaaggcatttaagtaaaactaaaatgaaaaaagtaggccttctgacattgtgtacttggtggttctgtccctctgcctgtaacaaatctcatttttgttaccaagaactgtatgaaagaagtaaatccaccccgattctgtatgattaattccatctgtgtttgtcatttctgactggaaaacttcttactccataccttgttcgatatggaggacaaataattggattgtctgataagtctgccaataaactatccagaaatagcaagtgtaatagtccccactatacgaattttatggtttgtataaacactaacattttccccttctgtagttgtatgaaaaaacaaatattgttagcatagtagataaattgttatgaaataccagaaaaaaaaatctgtatcttttactgagaacacccaatacccagataaatgactgtatcaggatttcatttgcatgttagtccacagagttgcccagaaccctaaatttattcataagagaaaatattgattaattattggtcattcctcataagtgtagctgttgatgtgtgcgtctgattattgcttttttaattttatgaaaattgtgtaaaattacattttttttccaggggagaaaaaaacatcaaacaaaaacatctaaatcatcctttttgttctttttcagtttttaaccacttttaggttttccccttacagaaaccacagaaatattcccttagaataaaatagtatatttgtatttgaaaaaaaaaaaaaaaaaa

SEQ ID NO: 56253 - DNA, 2940 bp, Homo Sapiens
ctaacttcagcggtggcaccgggatcggttgccttgagcctgaaatatgaccaccccaggaaaagagaactttcgcctgaaaagttacaagaacaaatctctgaatcccgatgagatgcgcaggaggagggaggaagaaggactgcagttacgaaagcagaaaagagaagagcagttattcaagcggagaaatgttgctacagcagaagaagaaacagaagaagaagttatgtcagatggaggctttcatgaggctcagattagtaacatggagatggcaccaggtggtgtcatcacttctgacatgattgagatgatattttccaaaagcccagagcaacagctttcagcaacacagaaattcaggaagctgctttcaaaagaacctaaccctcctattgatgaagttatcagcacaccaggagtagtggccaggtttgtggagttcctcaaacgaaaagagaattgttcactgcagtttgaatcagcttgggtactgacaaatattgcttcaggaaattctcttcagacccgaattgtgattcaggcaagagctgtgcccatcttcatagagttgctcagctcagagtttgaagatgtccaggaacaggcagtctgggctcttggcaacattgctggagatagtaccatgtgcagggactatgtcttagactgcaatatccttccccctcttttgcagttattttcaaagcaaaaccgcctgaccatgacccggaatgcagtatgggctttgtctaatctctgtagagggaaaagtccacctccagaatttgcaaaggtttctccatgtctgaatgtgctttcctggttgctgtttgtcagtgacactgatgtactggctgatgcctgctgggccctctcatatctatcagatggacccaatgataaaattcaagcggtcatcgatgcgggagtatgtaggagacttgtggaactgctgatgcataatgattataaagtggtttctcctgctttgcgagctgtgggaaacattgtcacaggggatgatattcagacacaggtaattctgaattgctcagctctgcagagtttattgcatttgctgagtagcccaaaggaatctatcaaaaaggaagcatgttggacgatatctaatattacagctggaaatagggcacagatccagactgtgatagatgccaacattttcccagccctcattagtattttacaaactgctgaatttcggacaagaaaagaagcagcttgggccatcacaaatgcaacttctggaggatcagctgaacagatcaagtacctagtagaactgggttgtatcaagccgctctgtgatctcctcacggtcatggactctaagattgtacaggttgccctaaatggcttggaaaatatcctgaggcttggagaacaggaagccaaaaggaacggcactggcattaacccttactgtgctttgattgaagaagcttatggtctggataaaattgagttcttacagagtcatgaaaaccaggagatctaccaaaaggcctttgatcttattgagcattacttcgggaccgaagatgaagacagcagcattgcaccccaggttgaccttaaccagcagcagtacatcttccaacagtgtgaggctcctatggaaggtttccagctttgaagcaatactctgctttcacgtacctgtgctcagaccaggctacccagtcgagtcctcttgtggagcccacagtcctcatggagctaacttctcaaatgttttccataatactgtttgcgctcatttgcttgccttgcgcacctgctctcttacacacatctggaaaacctccggctctctgtggtgggatacccttctaataaaagggtaaccagaacggcccactctcttttacggaaaaatccctaggctttggagatccgcacttacattagagttatgggaatatacacatattaatgtggctccctttttcttgtgggggaataaaagaggactcctcctcattccctttaacatgggggaaaaaactgacattaaaagatgagactaaatctttatcttgaattttacacaactacttacgacaagggagatgtttagacctgttggtatacttcagagtacttttcatgagttcttccacagtgaacccttggattacctggtggctttttctagccagattgcattaatccttactgagattggatggttttctttcctctattggcgccattcttcagatattaaagttaaaccatccactccctcaccttcagccttcagtgaatgtgctttctagttgtcaggaatgctgaagaattaacactttgactcctaaatgtgatactggtgggtaagagcagggcacatttaatttgttcgcttttgcttctctttggtctgggcacatttaatttgttcgcttttgcttctctttggtcttttcgaatacttagtaatcgaaaaccatatcctgtaatttaataaaaaaaactaaggacgaaaaaacccctccaattttcccaaatgcaatcagtgtaactaggggctgtgtttctgcattaaaataaatgtttcaggctttgtggtcctgatcaaggtcctcattaaaaaattggagttcaccctaggcttttcccctctgtgactggcagataacacatacttttgaaagtaactttgggattttttttcttaggtgcagctcgattctaatcttttcatgctgcacacgattcctttaatcgatagcatccttatctgaaagaaataaccatcttctcaacatgacctgcttaacccaaataagaacagtgatcttataacctcattgtttcctaatctattttatttcatctcctgctagtactgtgccgcttccccctccccccacacaaaataaaaacagtatctcgcttctggctcatttt

SEQ ID NO: 56254 - DNA, 7885 bp, Homo Sapiens; identical to SEQ ID NO: 22391

SEQ ID NO: 56255 - DNA, 3278 bp, Homo Sapiens; identical to SEQ ID NO: 23407

SEQ ID NO: 56256 - DNA, 4616 bp, Homo Sapiens
gctgttggctgggctcgggagggaacgctccaggtaaagcgctgggggaggaagcgacgccgaggagctacggtttcctccagaggtctccgcccctctgcccctatattcccagagctcgagtctgatccgggccttgccgggcaccctggaaaggcgggggtgatagtacagatggagacgcaactgcagagcattttcgaagaggtggtgaaaacggaagttatagaagaggcttttcctggcatgtttatggatactcctgaagatgagaaaacaaaactaattagctgtttgggggccttcagacagttttggggtggtctttctcaggagtctcatgaacagtgtatccagtggattgttaagtttattcatggtcagcatagtcctaaaagaatttcttttctttatgactgcttagcaatggcagttgagactggtctccttccacccaggctggtttgtgaatccctgataaactctgacactcttgagtgggaaagaacacagctttgggccttaacatttaaactggttcggaaaataattgggggagtggattacaagggtgttcgagatctcttaaaagtgattttggagaagattttgacaattcctaatacagtgagctctgctgttgtacagcagcttctggcagcaagagaggttatagcatatatcttggaaagaaatgcctgcttattaccagcctattttgcagtcactgagatcaggaaactgtatcctgaaggcaaacttccacactggttacttggaaacctagtatcagactttgtggataccttcaggcccacagcaaggataaactccatttgtggtcgctgtagtcttctgccagttgtaaataattcgggtgccatttgtaattcatggaaactggatcctgctactcttcgttttcctttgaaaggccttttgccatatgataaggatctgtttgaaccacagactgctttgttgagatatgtattggagcagccttattccagggatatggtctgcaatatgctaggtttaaataagcagaccttgaacattgctcagcacaagcagcgctgccctgtgctggaggaccagttggtggatctggttgtttatgccatggagcgatctgagaccgaggagaagtttgacgatgggggaacaagccaactcctgtggcagcatctctcaagtcagctcattttctttgtgcttttccagtttgcaagttttccacatatggtgctttctcttcatcagaagttagcagggcgaggactgattaaaggcagagatcatcttatgtgggttctcctgcaattcatttctggaagtattcagaaaaatgcactagctgattttctccctgtgatgaagctcttcgacttgctatacccagaaaaagaatatatcccagttcctgatattaacaaaccccagtcaacccatgcctttgcaatgacctgtatttggattcatctcaatagaaaagctcaaaatgacaactccaagctacagattccaatacctcattccctaagacttcaccatgagttcctgcagcagagtctaagaaataaaagtttacagatgaatgactataagattgctctattgtgtaatgcatactctacaaattcagaatgttttacattacccatgggagctctggtagaaactatttatggaaatggaattatgaggatacctctccctggaacaaactgtatggcttcaggatctattacccccttacctatgaacctcctggattcactgacagttcatgccaaaatgagccttattcacagcattgcaaccagggtgataaaacttgctcatgcaaagtccagtgtggccttggctccagccctagtggaaacttacagtcgtttattggtctatatggaaatagagtctttgggcatcaaaggatttatcagtcagcttttgccaactgttttcaaatcacatgcatgggggatcttacacacactccttgagatgtttagctaccggatgcatcatattcagcctcattacagagttcagctcctgagtcatcttcatactttggctgcagttgcacaaacaaaccagaaccagctccatctttgtgtcgagagcactgctctcaggcttataacagcattaggtagctcagaggtacaaccgcagtttacacgcttccttagtgatcccaaaacagtgctctcagcagaatctgaagaactgaaccgagccttgatattgaccttggctagagcaactcatgtaacagatttttttacaggctctgattcaattcagggaacttggtgtaaagacatacttcagaccatcatgagtttcactcctcataattgggcttcacacaccctgagctgttttccaggcccactacaggcattcttcaaacaaaataatgtgcctcaggaaagccgttttaatctgaaaaaaaatgtggaggaggagtataggaagtggaagtcaatgagcaacgaaaacgacattattacccacttctctatgcagggctcccctcctctctttctttgtcttctctggaaaatgctcttggaaacagatcatattaatcagattggctatagagtattagagagaattggagccagggccttggtagcccatgtgaggacatttgcagatttcctggtatatgagttttctacatcagcagggggtcagcaactcaataaatgcattgaaattcttaatgacatggtatggaagtataacattgttacactggacagattaattctctgcctggccatgcgtagtcacgaaggaaatgaagcccaggtttgttatttcataattcagttgctgttactcaaaccaaacgattttagaaatcgagtaagtgactttgtgaaggaaaattccccagagcactggttacagaatgactggcacaccaagcacatgaattatcacaagaaatatccagagaagttgtattttgagggcctcgcggaacaggtggatcctcctgtacagatccagtctccctatctgcccatctattttgggaatgtgtgtcttcgattccttccagtatttgatatagtaatccacagatttttagagttgcttccggtatccaaatcactggagactctactggatcatctaggaggcttatataaatttcatgatcgtccagtgacttatctgtataacactctgcactattatgaaatgcacctgagagaccgcgcatttctcaaacgaaaactcgtccatgcgatcattggctctctgaaggataatcgaccgcagggctggtgtctaagtgacacttacctgaaatgcgctatgaatgcacgagaggaaaatccttgggttccagatgacacctactattgcagattgattggcagactagtcgatacgatggctggcaaatctcctggtccctttccaaactgtgactggagattcaatgagtttcccaacccagctgcccatgctctccatgttacttgtgtggagctcatggccttggcagtttcaggcaaagaagttgggaatgcccttctaaatgttgtcctaaaaagtcagcctttagtgccaagagagaacattacagcatggatgaatgcaattggtttgatcatcactgccctaccagagccatattggattgttcttcatgatcgaattgtgagtgtcatcagcagccccagcttgacgtctgaaacagagtgggttggctatccattccgcctctttgatttcactgcctgtcatcagtcctactctgagatgagttgtagctatacgttagctcttgcacatgctgtgtggcaccattctagcatcggacaactttctctcattccaaagtttcttactgaagtacttcttcctatagtgaagaccgaattccagttgctttatgtataccatcttgttggaccatttttacaaagatttcagcaagagagaactcgttgtatgatagagattggtgtggcgttttatgacatgctgctgaatgttgaccagtgtagcacccatttaaattacatggatcccatctgtgacttcctctatcacatgaagtatatgtttactggtgacagcgtgaaagagcaagtagagaagattatctgtaacttaaaaccagctttaaaacttcgtcttcgattcatcacacacattagcaagatggagccagctgcagtgcctccacaagccatgaacagtgggtctccagcacctcagtctaatcagtaaaaagtcagagtacacagcaagggttccaaattaagaggaagcaaaacgctgcccagatcctgagaaacctggagaaaatcaaccttagtagtttcaactcatacattgtcttgtttgattttgttctttgttttttatcctctttaagcacagatgcgtgttgaagtctaaggtgttctgtcatcacactctctttactagaataagtgtgcccaggcagaaaaaaaagtgtattcaatgttgctggcatgtgtggattcacagctcgtggctgtaaggaaatctgggggtttcataaatccattaaaatccttttagagttgccaaaaaaaaaaaaaaaaaaa

SEQ ID NO: 56257 - DNA, 1359 bp, Homo Sapiens
accgggcaccggacggctcgggtactttcgttcttaattaggtcatgcccgtgtgagccaggaaagggctgtgtttatgggaagccagtaacactgtggcctactatctcttccgtggtgccatctacatttttgggactcgggaattatgaggtagaggtggaggcggagccggatgtcagaggtcctgaaatagtcaccatgggggaaaatgatccgcctgctgttgaagcccccttctcattccgatcgctttttggccttgatgatttgaaaataagtcctgttgcaccagatgcagatgctgttgctgcacagatcctgtcactgctgccattgaagttttttccaatcatcgtcattgggatcattgcattgatattagcactggccattggtctgggcatccacttcgactgctcagggaagtacagatgtcgctcatcctttaagtgtatcgagctgatagctcgatgtgacggagtctcggattgcaaagacggggaggacgagtaccgctgtgtccgggtgggtggtcagaatgccgtgctccaggtgttcacagctgcttcgtggaagaccatgtgctccgatgactggaagggtcactacgcaaatgttgcctgtgcccaactgggtttcccaagctatgtgagttcagataacctcagagtgagctcgctggaggggcagttccgggaggagtttgtgtccatcgatcacctcttgccagatgacaaggtgactgcattacaccactcagtatatgtgagggagggatgtgcctctggccacgtggttaccttgcagtgcacagcctgtggtcatagaaggggctacagctcacgcatcgtgggtggaaacatgtccttgctctcgcagtggccctggcaggccagccttcagttccagggctaccacctgtgcgggggctctgtcatcacgcccctgtggatcatcactgctgcacactgtgtttatgacttgtacctccccaagtcatggaccatccaggtgggtctagtttccctgttggacaatccagccccatcccacttggtggagaagattgtctaccacagcaagtacaagccaaagaggctgggcaatgacatcgcccttatgaagctggccgggccactcacgttcaatggtacatctgggtctctatgtggttctgcagctcttcctttgtttcaagaggatttgcaattgctcattgaagcattcttatgatggctgctttataatccttgtcagatattaataattccaactcctgattcatgttggtgttggcatcagttgattatcttttctcattaaaattgtgatgctcctaaaaaaaaaaaaaaaaaa

SEQ ID NO: 56258 - DNA, 2431 bp, Homo Sapiens
gttttgcctgctagcatctccctgtaactctcccaatcttgaggagtgatccctgtcccagcccctggaaaggggcaggaacgacaaactcaaagtccaggatgttcaccatgacaagagccatggaagaggctctttttcagcacttcatgcaccagaagctggggatcgcctatgccatacacaagccatttcccttctttgaaggcctcctagacaactccatcatcactaagagaatgtacatggaatctctggaagcctgtagaaatttgatccctgtatccagagtggtgcacaacattctcacccaactggagaggacttttaacctgtctcttctggtgacattgttcagtcaaattaacctgcgtgaatatcccaatctggtgacgatttacagaagcttcaaacgtgttggtgcttcctatgaacggcagagcagagacacaccaatcctacttgaagccccaactggcctagcagaaggaagctccctccataccccactggcgctgcccccaccacaaccccctcaaccaagctgttcaccctgtgcgccaagagtcagtgagcctggaacatcctcccagcaaagcgatgagatcctgagtgagtcgcccagcccatctgaccctgtcctgcctctccctgcactcatccaggaaggaagaagcacttcagtgaccaatgacaagttaacatccaaaatgaatgcggaagaagactcagaagagatgcccagcctcctcactagcactgtgcaagtggccagtgacaacctgatcccccaaataagagataaagaagaccctcaagagatgccccactctcccttgggctctatgccagagataagagataattctccagaaccaaatgacccagaagagccccaggaggtgtccagcacaccttcagacaagaaaggaaagaaaagaaaaagatgtatctggtcaactccaaaaaggagacataagaaaaaaagcctcccaagagggacagcctcatctagacacggaatccaaaagaagctcaaaagggtggatcaggttcctcaaaagaaagatgactcaacttgtaactccacggtagagacaagggcccaaaaggcgagaactgaatgtgcccgaaagtcgagatcagaggagatcattgatggcacttcagaaatgaatgaaggaaagaggtcccagaagacgcctagtacaccacgaagggtcacacaaggggcagcctcacctgggcatggcatccaagagaagctccaagtggtggataaggtgactcaaaggaaagacgactcaacctggaactcagaggtcatgatgagggtccaaaaggcaagaactaaatgtgcccgaaagtccagatcgaaagaaaagaaaaaggagaaagatatctgttcaagctcaaaaaggagatttcagaaaaatattcaccgaagaggaaaacccaaaagtgacactgtggattttcactgttctaagctccccgtgacctgtggtgaggcgaaagggattttatataagaagaaaatgaaacacggatcctcagtgaagtgcattcggaatgaggatggaacttggttaacaccaaatgaatttgaagtcgaaggaaaaggaaggaacgcaaagaactggaaacggaatatacgttgtgaaggaatgaccctaggagagctgctgaagcggaaaaactcggatgaatgcgaggtgtgctgtcaagggggacaacttctctgctgcggtacttgtccacgagtcttccatgaggactgtcacatcccccctgtggaagccaagaggatgctgtggagttgcaccttctgcaggatgaagaggtcttcaggaagccaacagtgccatcatgtatctaagaccctggagaggcagatgcagcctcaggaccagctgaaatgtgagttcctcctcttgaaggcctactgtcatccacaaagctccttttttacgggcatcccatttaatattcgagattacggtgagccctttcaggaagcaatgtggttggacctggttaaggaaaggctgattacggaaatgtacacggtggcatggtttgtgcgagacatgcgcctgatgtttcgcaaccataaaacattttacaaggcttctgactttggccaggtaggacttgacttagaggcagaatttgaaaaagatctcaaagacgtgctcggttttcatgaagccaatgacggcggtttctggactcttccttgaccctgttctgtaaagactgaagcatccccacctcaggattcagctgatgggaccctggcttggactgttgattgccagtgagtctgggatgtaattggctgccctcaggacccaaacccagacacttcataggattatcacaccctccatctttattctttctttttacctttaaaagtctatatcta

SEQ ID NO: 56259 - DNA, 6297 bp, Homo Sapiens
agaaggtaaaaagggagtggtgagaatgaatgtgagaaggaagccaggacagcgcagtccccagtcccgaacggccagggagaggaggtggcctagcgctggcggggctcaccccaatccgtctgccttttgatgccgtactctgctggttgcgcagccacctcgggatactgcacacggagaggagggaaaataagcgaggcaccgccgcaccacgcgggagacctacggagacccacagcgcccgagccctggaagagcactactggatgtcagcggagaaatggctttgagctcagcctggcgctcggttctgcctctgtggctcctctggagcgctgcctgctcccgcgccgcgtccggggacgacaacgcttttccttttgacattgaagggagctcagcggttggcaggcaagacccgcctgagacgagcgaaccccgcgtggctctgggacgcctgccgcctgcggccgagaaatgcaatgctggattctttcacaccctgtcgggagaatgtgtgccctgcgactgtaatggcaattccaacgagtgtttggacggctcaggatactgtgtgcactgccagcggaacacaacaggagagcactgtgaaaagtgtctggatggttatatcggagattccatcaggggagcaccccaattctgccagccgtgcccctgtcccctgccccacttggccaattttgcagaatcctgctataggaaaaatggagctgttcggtgcatttgtaacgaaaattatgctggacctaactgtgaaagatgtgctcccggttactatggaaaccccttactcattggaagcacctgtaagaaatgtgactgcagtggaaattcagatcccaacctgatctttgaagattgtgatgaagtcactggccagtgtaggaattgcttacgcaacaccaccggattcaagtgtgaacgttgcgctcctggctactatggggacgccaggatagccaagaactgtgcagtgtgcaactgcgggggaggcccatgtgacagtgtaaccggagaatgcttggaagaaggttttgaaccccctacaggctgtgataagtgcgtctgggacctgactgatgacctgcggttagcagcgctctccatcgaggaaggcaaatccggggtgctgagcgtatcctctggggccgccgctcataggcacgtgaatgaaatcaacgccaccatctacctcctcaaaacaaaattgtcagaaagagaaaaccaatacgccctaagaaagatacaaatcaacaatgctgagaacacgatgaaaagccttctgtctgacgtagaggaattagttgaaaaggaaaatcaagcctccagaaaaggacaacttgttcagaaggaaagcatggacaccattaaccacgcaagtcagctggtagagcaagcccatgatatgagggataaaatccaagagatcaacaacaagatgctctattatggggaagagcatgaacttagccccaaggaaatctctgagaagctggtgttggcccagaagatgcttgaagagattagaagccgtcaaccatttttcacccaacgggagctcgtggatgaggaggcagatgaggcttacgaactactgagccaggctgagagctggcagcggctgcacaatgagacccgcactctgtttcctgtcgtcctggagcagctggatgactacaatgctaagttgtcagatctccaggaagcacttgaccaggcccttaaccatgtcagggatgccgaagacatgaacagggccacagcagccaggcagcgggaccatgagaaacaacaggaaagagtgagggaacaaatggaagtggtgaacatgtctctgagcacatctgcggactctctgacaacacctcgtctaactctttcagaacttgatgatataataaagaatgcgtcagggatttatgcagaaatagatggagccaaaagtgaactacaagtaaaactatctaacctaagtaacctcagccatgatttagtccaagaagctattgaccatgcacaggaccttcaacaagaagctaatgaattgagcaggaagttgcacagttcagatatgaacgggctggtacagaaggctttggatgcatcaaatgtctatgaaaatattgttaattatgttagtgaagccaatgaaacagcagaatttgctttgaacaccactgaccgaatttatgatgcggtgagtgggattgatactcaaatcatttaccataaagatgaaagtgagaacctcctcaatcaagccagagaactgcaagcaaaggcagagtctagcagtgatgaagcagtggctgacactagcaggcgtgtgggtggagccctagcaaggaaaagtgcccttaaaaccagactcagtgatgccgttaagcaactacaagcagcagagagaggggatgcccagcagcgcctggggcagtctagactgatcaccgaggaagccaacaggacgacgatggaggtgcagcaggccactgcccccatggccaacaatctaaccaactggtcacagaatcttcaacattttgactcttctgcttacaacactgcagtgaactctgctagggatgcagtaagaaatctgaccgaggttgtccctcagctcctggatcagcttcgtacggttgagcagaagcgacctgcaagcaacgtttctgccagcatccagaggatccgagagctcattgctcagaccagaagtgttgccagcaagatccaagtctccatgatgtttgatggccagtcagctgtggaagtgcactcgagaaccagtatggatgacttaaaggccttcacgtctctgagcctgtacatgaaaccccctgtgaagcggccggaactgaccgagactgcagatcagtttatcctgtacctcggaagcaaaaacgccaaaaaagagtatatgggtcttgcaatcaaaaatgataatctggtatacgtctataatttgggaactaaagatgtggagattcccctggactccaagcccgtcagttcctggcctgcttacttcagcattgtcaagattgaaagggtgggaaaacatggaaaggtgtttttaacagtcccgagtctaagtagcacagcagaggaaaagttcattaaaaagggggaattttcgggagatgactctctgctggacctggaccctgaggacacagtgttttatgttggtggagtgccttccaacttcaagctccctaccagcttaaacctgcctggctttgttggctgcctggaactggccactttgaataatgatgtgatcagcttgtacaactttaagcacatctataatatggacccctccacatcagtgccatgtgcccgagataagctggccttcactcagagtcgggctgccagttacttcttcgatggctccggttatgccgtggtgagagacatcacaaggagagggaaatttggtcaggtgactcgctttgacatagaagttcgaacaccagctgacaacggccttattctcctgatggtcaatggaagtatgtttttcagactggaaatgcgcaatggttacctacatgtgttctatgattttggattcagcagtggccgtgtgcatcttgaagatacgttaaagaaagctcaaattaatgatgcaaaataccatgagatctcaatcatttaccacaatgataagaaaatgatcttggtagttgacagaaggcatgtcaagagcatggataatgaaaagatgaaaataccttttacagatatatacattggaggagctcctccagaaatcttacaatccagggccctcagagcacaccttcccctagatatcaacttcagaggatgcatgaagggcttccagttccaaaagaaggacttcaatttactggagcagacagaaaccctgggagttggttatggatgcccagaagactcacttatatctcgcagagcatatttcaatggacagagcttcattgcttcaattcagaaaatatctttctttgatggctttgaaggaggttttaatttccgaacattacaaccaaatgggttactattctattatgcttcagggtcagacgtgttctccatctcactggataatggtactgtcatcatggatgtaaagggaatcaaagttcagtcagtagataagcagtacaatgatgggctgtcccacttcgtcattagctctgtctcacccacaagatatgaactgatagtagataaaagcagagttgggagtaagaatcctaccaaagggaaaatagaacagacacaagcaagtgaaaagaagttttacttcggtggctcaccaatcagtgctcagtatgctaatttcactggctgcataagtaatgcctactttaccagggtggatagagatgtggaggttgaagatttccaacggtatactgaaaaggtccacacttctctttatgagtgtcccattgagtcttcaccattgtttctcctccataaaaaaggaaaaaatttatccaagcctaaagcaagtcagaataaaaagggagggaaaagtaaagatgcaccttcatgggatcctgttgctctgaaactcccagagcggaatactccaagaaactctcattgccacctttccaacagccctagagcaatagagcacgcctatcaatatggaggaacagccaacagccgccaagagtttgaacacttaaaaggagattttggtgccaaatctcagttttccattcgtctgagaactcgttcctcccatggcatgatcttctatgtctcagatcaagaagagaatgacttcatgactctatttttggcccatggccgcttggtttacatgtttaatgttggtcacaaaaaactgaagattagaagccaggagaaatacaatgatggcctgtggcatgatgtgatatttattcgagaaaggagcagtggccgactggtaattgatggtctccgagtcctagaagaaagtcttcctcctactgaagctacctggaaaatcaagggtcccatttatttgggaggtgtggctcctggaaaggctgtgaaaaatgttcagattaactccatctacagttttagtggctgtctcagcaatctccagctcaatggggcctccatcacctctgcttctcagacattcagtgtgaccccttgctttgaaggccccatggaaacaggaacttacttttcaacagaaggaggatacgtggttctagatgaatctttcaatattggattgaagtttgaaattgcatttgaagtccgtcccagaagcagttccggaaccctggtccacggccacagtgtcaatggggagtacctaaatgttcacatgaaaaatggacaggtcatagtgaaagtcaataatggcatcagagatttttccacctcagtaacacccaagcagagtctctgtgatggcagatggcacagaattacagttattagagattctaatgtggttcagttggatgtggactctgaagtgaaccatgtggttggacccctgaatccaaaaccaattgatcacagggagcctgtgtttgttggaggtgttccagaatctctactgacaccacgcttggcccccagcaaacccttcacaggctgcatacgccactttgtgattgatggacacccagtgagcttcagtaaagcagccctggtcagcggcgccgtaagcatcaactcctgtccagcagcctgacatgacagagcacagctgcccaaatacaaagttctttagagcactgaaagaaacacaaagccagccaggaggaacagtaactcttccttcgggtggaagctttcatcgagttgaacaggacttaaacgaatcatcagggaccggatatttcttatttctcatttggattcttaaccttgaatccaaagtgtctgcaatggacaacaattgaaggagaggcaaacttacttgtattgagagcacacgcaattcctactggtgaaattactgtttctgtttctaataaaatagaagggattccaaataaacacttgcacacatttttgaagtgcggctagattctcagattcacctttcttccagggaagataactttcaatctatataaaaatctctgtcctaaaactacctttctttattttgaagagacttactaacttacatataatctaaattagatgatagatttctttttagcccttttgtttggtctatcagtataagaagaatattttaggtttatagctgaagttatcaaggtttaataaagtaaatttctaaca

SEQ ID NO: 56260 - DNA, 4024 bp, Homo Sapiens; identical to SEQ ID NO: 29647

SEQ ID NO: 56261 - DNA, 2200 bp, Homo Sapiens
cccaagccagagcggcgcggcctggaagaggccagggcccgggggaggcggcggcagcggcggcggctggggcagcccgggcagcccgagccccgcagcctgggcctgtgctcggcgccatgagcggcggcgggccttcgggaggcggccctgggggctcgggcagggcgcggactagctcgttcgcggagcccggcggcggaggcggaggaggcggcggcggccccggaggctcggcctccggcccaggcggcaccggcggcggaaaggcatctgtcggggccatgggtgggggcgtcggggcctcgagctccgggggtggacccggcggcagcggcggaggaggcagcggaggccccggcgcaggcactagcttcccgccgcccggggtgaagctgggccgtgacagcgggaaggtgaccacagtcgtagccactctaggccaaggcccagagcgctcccaagaagtggcttacacggacatcaaagtgattggcaatggctcatttggggtcgtgtaccaggcacggctggcagagaccagggaactagtcgccatcaagaaggttctccaggacaagaggttcaagaaccgagagctgcagatcatgcgtaagctggaccactgcaatattgtgaggctgagatactttttctactccagtggcgagaagaaagacgagctttacctaaatctggtgctggaatatgtgcccgagacagtgtaccgggtggcccgccacttcaccaaggccaagttgaccatccctatcctctatgtcaaggtgtacatgtaccagctcttccgcagcttggcctacatccactcccagggcgtgtgtcaccgcgacatcaagccccagaacctgctggtggaccctgacactgctgtcctcaagctctgcgattttggcagtgcaaagcagttggtccgaggggagcccaatgtctcctacatctgttctcgctactaccgggccccagagctcatctttggagccactgattacacctcatccatcgatgtttggtcagctggctgtgtactggcagagctcctcttgggccagcccatcttccctggggacagtggggtggaccagctggtggagatcatcaaggtgctgggaacaccaacccgggaacaaatccgagagatgaaccccaactacacggagttcaagttccctcagattaaagctcacccctggacaaaggtgttcaaatctcgaacgccgccagaggccatcgcgctctgctctagcctgctggagtacaccccatcctcaaggctctccccactagaggcctgtgcgcacagcttctttgatgaactgcgatgtctgggaacccagctgcctaacaaccgcccacttccccctctcttcaacttcagtgctggtgaactctccatccaaccgtctctcaacgccattctcatccctcctcacttgaggtccccagcgggcactaccaccctcaccccgtcctcacaagctttaactgagactccgaccagctcagactggcagtcgaccgatgccacacctaccctcactaactcctcctgagggccccaccaagcacccttccacttccatctgggagccccaagaggggctgggaaggggggccatagcccatcaagctcctgccctggctgggcccctagactagagggcagaggtaaatgagtccctgtccccacctccagtccctccctcaccagcctcacccctgtggtgggctttttaagaggattttaactggttgtggggagggaagagaaggacagggtgttggggggatgaggacctcctacccccttggccccctcccctcccccagacctccacctcctccagaccccctcccctcctgtgtcccttgtaaatagaaccagcccagcccgtctcctcttcccttccctggcccccgggtgtaaatagattgttataatttttttcttaaagaaaacgtcgattcgcaccgtccaacctggccccgcccctcctacagctgtaactcccctcctgtcctctgcccccaaggtctactccctcctcaccccaccctggagggccaggggagtggagagagctcctgatgtcttagtttccacagtaaggtttgcctgtgtacagacctccgttcaataaattattggcatgaaaacctgaaaaaaaaaaaaaaaaaaaaa

SEQ ID NO: 56262 - DNA, 1349 bp, Homo Sapiens
cctgatcgaacagcctcacttgtgttgctgtcagtgccagtagggcaggcaggaatgcagcagagaggactcgccatcgtggccttggctgtctgtgcggccctacatgcctcagaagccatacttcccattgcctccagctgttgcacggaggtttcacatcatatttccagaaggctcctggaaagagtgaatatgtgtcgcatccagagagctgatggggattgtgacttggctgctgtcatccttcatgtcaagcgcagaagaatctgtgtcagcccgcacaaccatactgttaagcagtggatgaaagtgcaagctgccaagaaaaatggtaaaggaaatgtttgccacaggaagaaacaccatggcaagaggaacagtaacagggcacatcaggggaaacacgaaacatacggccataaaactccttattagagagtctacagataaatctacagagacaattcctcaagtggacttggccatgattggttagtctcactctatcacacaggctggagggcagtggcaggatctcagttcaccccaacctttgcctcacgggttcaagggattctcgtgcctcagccttccaagtagctgggattacaggtgtgcgccagtacgcctggctagttttagtattttttgttacagacggggtttcaccatgttggctgggctggtctcaaacttctgatctcaagtgatccatctgccttggcctcccaaagtgctgggattacaggcatgagccactgcacctggcctacgtattaggctttatgtaagatgtacatagtactccatactcctttccttttcctcctattgaaactgttcctataaactttataaaattaatcagagaagaagagagggtgagaaacataaataatccaagcttgcaccacattcagcattaatcactaggtcactttgcttgctgaccccttcctcatagttgtttggctattgcttcagaattatgtggagtctgttacaagattatagttccccttaactgctctatagataacagcttgaacattatgaaatgctaagttttcccttcgagacattctttcaggtcctgcatactgatgaaactactgatgtcagctggtctgaaggaccctaccagaagctaaatcatcaaagaatgcaatttccatatcctaatgattcaatctcccttaccctgaccaatcagtggcccaaattttccagccccttgcctcccagaaccccagcccagaactcttcagagatttaagaatctcctcctacctcctgactcagcaccatgtaatcattaaactctctgctgcaaaaaaaaaaaaaaa

SEQ ID NO: 56263 - DNA, 1739 bp, Homo Sapiens
ggggatcactgttggaaggcagctgcttgaggtccaaggcagtcagtgtcccctctcttttgcctcgggacagctggtatttatcagactcctaagaagttttccttgctccctagtagaagagagagattatgcagcgggcttttgattgatccaatgggaattacattgatctggtgtctggccttggttcttatcaagtggatcacctctaagaggcgtggagctatttcctatgacagttctgatcagactgcattatacattcgtatgctaggagatgtacgtgtaaggagccgagcaggatttgaatcagaaagaagaggttctcacccatatattgattttcgtattttccactctcaatctgaaattgaagtgtctgtctctgcaaggaatatcagaaggctactaagtttccagcgatatcttagatcttcacgcttttttcgtggtactgcggtttcaaattccctaaacattttagatgatgattataatggacaagccaagtgtatgctggaaaaagttggaaattggaattttgatatctttctatttgatagactaacaaatggaaatagtctagtaagcttaacctttcatttatttagtcttcatggattaattgagtacttccatttagatatgatgaaacttcgtagatttttagttatgattcaagaagattaccacagtcaaaatccttaccataacgcagtccacgctgcggatgttactcaggccatgcactgttacttaaaggaacctaagcttgccaattctgtaactccttgggatatcttgctgagcttaattgcagctgccactcatgatctggatcatccaggtgttaatcaacctttccttattaaaactaaccattacttggcaactttatacaagaatacctcagtactggaaaatcaccactggagatctgcagtgggcttattgagagaatcaggcttattctcacatctgccattagaaagcaggcaacaaatggagacacagataggtgctctgatactagccacagacatcagtcgccagaatgagtatctgtctttgtttaggtcccatttggatagaggtgatttatgcctagaagacaccagacacagacatttggttttacagatggctttgaaatgtgctgatatttgtaacccatgtcggacgtgggaattaagcaagcagtggagtgaaaaagtaacggaggaattcttccatcaaggagatatagaaaaaaaatatcatttgggtgtgagtccactttgcgatcgtcacactgaatctattgccaacatccagattggttttatgacttacctagtggagcctttatttacagaatgggccaggttttccaatacaaggctatcccagacaatgcttggacacgtggggctgaataaagccagctggaagggactgcagagagaacagtcgagcagtgaggacactgatgctgcatttgagttgaactcacagttattacctcaggaaaatcggttatcataacccccagaaccagtgggacaaactgcctcctggaggtttttagaaatgtgaaatggggtcttgaggtgagagaacttaactcttgactgccaaggtttccaagtgagtgatgccagccagcattatttatttccaagatttcctctgttggatcatttgaacccacttgttaattgcaagacccgaacatacagcaatatgaatttggcttt

SEQ ID NO: 56264 - DNA, 5175 bp, Homo Sapiens
acagcggagcgcagagtgagaaccaccaaccgaggcgccgggcagcgacccctgcagcggagacagagactgagcggcccggcaccgccatgcctgcgctctggctgggctgctgcctctgcttctcgctcctcctgcccgcagcccgggccacctccaggagggaagtctgtgattgcaatgggaagtccaggcagtgtatctttgatcgggaacttcacagacaaactggtaatggattccgctgcctcaactgcaatgacaacactgatggcattcactgcgagaagtgcaagaatggcttttaccggcacagagaaagggaccgctgtttgccctgcaattgtaactccaaaggttctcttagtgctcgatgtgacaactctggacggtgcagctgtaaaccaggtgtgacaggagccagatgcgaccgatgtctgccaggcttccacatgctcacggatgcggggtgcacccaagaccagagactgctagactccaagtgtgactgtgacccagctggcatcgcagggccctgtgacgcgggccgctgtgtctgcaagccagctgttactggagaacgctgtgataggtgtcgatcaggttactataatctggatggggggaaccctgagggctgtacccagtgtttctgctatgggcattcagccagctgccgcagctctgcagaatacagtgtccataagatcacctctacctttcatcaagatgttgatggctggaaggctgtccaacgaaatgggtctcctgcaaagctccaatggtcacagcgccatcaagatgtgtttagctcagcccaacgactagaccctgtctattttgtggctcctgccaaatttcttgggaatcaacaggtgagctatgggcaaagcctgtcctttgactaccgtgtggacagaggaggcagacacccatctgcccatgatgtgattctggaaggtgctggtctacggatcacagctcccttgatgccacttggcaagacactgccttgtgggctcaccaagacttacacattcaggttaaatgagcatccaagcaataattggagcccccagctgagttactttgagtatcgaaggttactgcggaatctcacagccctccgcatccgagctacatatggagaatacagtactgggtacattgacaatgtgaccctgatttcagcccgccctgtctctggagccccagcaccctgggttgaacagtgtatatgtcctgttgggtacaaggggcaattctgccaggattgtgcttctggctacaagagagattcagcgagactggggccttttggcacctgtattccttgtaactgtcaagggggaggggcctgtgatccagacacaggagattgttattcaggggatgagaatcctgacattgagtgtgctgactgcccaattggtttctacaacgatccgcacgacccccgcagctgcaagccatgtccctgtcataacgggttcagctgctcagtgatgccggagacggaggaggtggtgtgcaataactgccctcccggggtcaccggtgcccgctgtgagctctgtgctgatggctactttggggacccctttggtgaacatggcccagtgaggccttgtcagccctgtcaatgcaacaacaatgtggaccccagtgcctctgggaattgtgaccggctgacaggcaggtgtttgaagtgtatccacaacacagccggcatctactgcgaccagtgcaaagcaggctacttcggggacccattggctcccaacccagcagacaagtgtcgagcttgcaactgtaaccccatgggctcagagcctgtaggatgtcgaagtgatggcacctgtgtttgcaagccaggatttggtggccccaactgtgagcatggagcattcagctgtccagcttgctataatcaagtgaagattcagatggatcagtttatgcagcagcttcagagaatggaggccctgatttcaaaggctcagggtggtgatggagtagtacctgatacagagctggaaggcaggatgcagcaggctgagcaggcccttcaggacattctgagagatgcccagatttcagaaggtgctagcagatcccttggtctccagttggccaaggtgaggagccaagagaacagctaccagagccgcctggatgacctcaagatgactgtggaaagagttcgggctctgggaagtcagtaccagaaccgagttcgggatactcacaggctcatcactcagatgcagctgagcctggcagaaagtgaagcttccttgggaaacactaacattcctgcctcagaccactacgtggggccaaatggctttaaaagtctggctcaggaggccacaagattagcagaaagccacgttgagtcagccagtaacatggagcaactgacaagggaaactgaggactattccaaacaagccctctcactggtgcgcaaggccctgcatgaaggagtcggaagcggaagcggtagcccggacggtgctgtggtgcaagggcttgtggaaaaattggagaaaaccaagtccctggcccagcagttgacaagggaggccactcaagcggaaattgaagcagataggtcttatcagcacagtctccgcctcctggattcagtgtctcggcttcagggagtcagtgatcagtcctttcaggtggaagaagcaaagaggatcaaacaaaaagcggattcactctcaacgctggtaaccaggcatatggatgagttcaagcgtacacaaaagaatctgggaaactggaaagaagaagcacagcagctcttacagaatggaaaaagtgggagagagaaatcagatcagctgctttcccgtgccaatcttgctaaaagcagagcacaagaagcactgagtatgggcaatgccactttttatgaagttgagagcatccttaaaaacctcagagagtttgacctgcaggtggacaacagaaaagcagaagctgaagaagccatgaagagactctcctacatcagccagaaggtttcagatgccagtgacaagacccagcaagcagaaagagccctggggagcgctgctgctgatgcacagagggcaaagaatggggccggggaggccctggaaatctccagtgagattgaacaggagattgggagtctgaacttggaagccaatgtgacagcagatggagccttggccatggaaaagggactggcctctctgaagagtgagatgagggaagtggaaggagagctggaaaggaaggagctggagtttgacacgaatatggatgcagtacagatggtgattacagaagcccagaaggttgataccagagccaagaacgctggggttacaatccaagacacactcaacacattagacggcctcctgcatctgatggaccagcctctcagtgtagatgaagaggggctggtcttactggagcagaagctttcccgagccaagacccagatcaacagccaactgcggcccatgatgtcagagctggaagagagggcacgtcagcagaggggccacctccatttgctggagacaagcatagatgggattctggctgatgtgaagaacttggagaacattagggacaacctgcccccaggctgctacaatacccaggctcttgagcaacagtgaagctgccataaatatttctcaactgaggttcttgggatacagatctcagggctcgggagccatgtcatgtgagtgggtgggatggggacatttgaacatgtttaatgggtatgctcaggtcaactgacctgaccccattcctgatcccatggccaggtggttgtcttattgcaccatactccttgcttcctgatgctgggcaatgaggcagatagcactgggtgtgagaatgatcaaggatctggaccccaaagaatagactggatggaaagacaaactgcacaggcagatgtttgcctcataatagtcgtaagtggagtcctggaatttggacaagtgctgttgggatatagtcaacttattctttgagtaatgtgactaaaggaaaaaactttgactttgcccaggcatgaaattcttcctaatgtcagaacagagtgcaacccagtcacactgtggccagtaaaatactattgcctcatattgtcctctgcaagcttcttgctgatcagagttcctcctacttacaacccagggtgtgaacatgttctccattttcaagctggaagaagtgagcagtgttggagtgaggacctgtaaggcaggcccattcagagctatggtgcttgctggtgcctgccaccttcaagttctggacctgggcatgacatcctttcttttaatgatgccatggcaacttagagattgcatttttattaaagcatttcctaccagcaaagcaaatgttgggaaagtatttactttttcggtttcaaagtgatagaaaagtgtggcttgggcattgaaagaggtaaaattctctagatttattagtcctaattcaatcctacttttcgaacaccaaaaatgatgcgcatcaatgtattttatcttattttctcaatctcctctctctttcctccacccataataagagaatgttcctactcacacttcagctgggtcacatccatccctccattcatccttccatccatctttccatccattacctccatccatccttccaacatatatttattgagtacctactgtgtgccaggggctggtgggacagtggtgacatagtctctgccctcatagagttgattgtctagtgaggaagacaagcatttttaaaaaataaatttaaacttacaaactttgtttgtcacaagtggtgtttattgcaataaccgcttggtttgcaacctctttgctcaacagaacatatgttgcaagaccctcccatgggggcacttgagttttggcaaggctgacagagctctgggttgtgcacatttctttgcattccagctgtcactctgtgcctttctacaactgattgcaacagactgttgagttatgataacaccagtgggaattgctggaggaaccagaggcacttccaccttggctgggaagactatggtgctgccttgcttctgtatttccttggattttcctgaaagtgtttttaaataaagaacaattgttagatgcc

SEQ ID NO: 56265 - DNA, 1048 bp, Homo Sapiens
gccaggtgtgcaggccgctccaagcccagcctgccccgctgccgccaccatgacgctcctccccggcctcctgtttctgacctggctgcacacatgcctggcccaccatgacccctccctcagggggcacccccacagtcacggtaccccacactgctactcggctgaggaactgcccctcggccaggcccccccacacctgctggctcgaggtgccaagtgggggcaggctttgcctgtagccctggtgtccagcctggaggcagcaagccacagggggaggcacgagaggccctcagctacgacccagtgcccggtgctgcggccggaggaggtgttggaggcagacacccaccagcgctccatctcaccctggagataccgtgtggacacggatgaggaccgctatccacagaagctggccttcgccgagtgcctgtgcagaggctgtatcgatgcacggacgggccgcgagacagctgcgctcaactccgtgcggctgctccagagcctgctggtgctgcgccgccggccctgctcccgcgacggctcggggctccccacacctggggcctttgccttccacaccgagttcatccacgtccccgtcggctgcacctgcgtgctgccccgttcagtgtgaccgccgaggccgtggggcccctagactggacacgtgtgctccccagagggcaccccctatttatgtgtatttattgttatttatatgcctcccccaacactacccttggggtctgggcattccccgtgtctggaggacagccccccactgttctcctcatctccagcctcagtagttgggggtagaaggagctcagcacctcttccagcccttaaagctgcagaaaaggtgtcacacggctgcctgtaccttggctccctgtcctgctcccggcttcccttaccctatcactggcctcaggcccccgcaggctgcctcttcccaacctccttggaagtacccctgtttcttaaacaattatttaagtgtacgtgtattattaaactgatgaacacatccccaaaa

SEQ ID NO: 56266 - DNA, 2057 bp, Homo Sapiens; identical to SEQ ID NO: 30471

SEQ ID NO: 56267 - DNA, 3323 bp, Homo Sapiens
tgcgttgtacccttttacgtgaggcggtgacggcggttcggaagtcgtctggcctccccgcggccgctcgcagcttgctggcctctcccgcgcctcacgtcggactccgtctccgcggcagggaagcagcatggaagctgaggacatccaggaggagttgacctgccccatctgcctggactatttccaggacccggtgtccatcgagtgcggccacaacttctgccgcggctgcctgcaccgcaactgggcgccgggcggcggcccgttcccctgccccgaatgtcggcacccatcggcgcccgccgcgctgcgacccaactgggccctggccaggctgactgagaagacgcagcgccggcgcctgggccccgtgcccccgggcctgtgcggccgccactgggagccgctgcggctcttctgcgaggacgaccagcggccagtgtgcctggtgtgcagggagtcccaggagcaccagactcacgccatggcacccatcgacgaggccttcgagagctaccgggagaaacttcttaagtctcagcgtaatctcgtggccaagatgaagaaagtcatgcatttacaggatgtagaagtgaagaacgccacacagtggaaggataagataaagagtcagcgaatgagaatcagcacggagttttcaaagctgcacaacttcctggttgaagaagaggacctgtttcttcagagattgaacaaagaagaagaagagacgaagaagaagctgaatgagaacacgttaaaactcaatcaaactatcgcttcattgaagaagctcatcttagaggtgggggagaagagccaggctcccaccctggagctgcttcagaatccaaaagaagtgttgaccaggagtgagatccaggatgtgaactattcccttgaagctgtgaaggtgaagacagtgtgccagataccattgatgaaggaaatgctaaagcgattccaagtggctgtaaacctagctgaagacacagctcatcccaaactcgtcttctcccaggaagggagatacgtgaaaaatacagcatcagccagttcttggccagtgttttcttcagcatggaactactttgctggatggaggaatcctcagaagactgcttttgtagagagatttcagcacttaccctgtgttctgggaaaaaacgttttcacctcagggaaacattactgggaagttgagagtagagatagtctggaggttgctgttggggtgtgtcgggaggacgtcatgggaattactgatcgttcaaaaatgtccccagatgtgggcatctgggcgatttattggagtgctgctggctattggcccttgataggcttccctggaactcccacccagcaagagccagctctccaccgagtgggggtttacctggatcgtgggactgggaatgtctccttctacagcgctgtggacggagtgcacctgcacaccttttcttgttcttctgtctcacgcctccggccatttttttggttgagtccattagcatctttagtcattccaccagtgactgataggaaatgaggcttttcttcccctgaccaaaactccttccctgtagtccagctgagggacacacatccctgggccctcttctgcccttcatgtctctatcctggatggtccatcttctgggtctccctaacggtaccgtttggtatctgccctttgtgtgcttcacaagaggcagtcccatgggaggtgggtctggccaatggagatgggacaggaaattttccaagacgcttttgggaaatctttttgtagcttttaaagagatgtgcggggaagacatatggatgttagcagccatattggaactgagaacacaggaatggtggaaaggtagaagaaacagagtttttgttgccgttgtgaaattgttgaaatttccttcatgccaagcttcttgttatatgagataattacgcccttattgtataagacaattttagttgtatttggttacttgcagcctgaagtaccgtaactgcactaaagggacgtagtgtgaacatcccgcagtataggcttaagtcacttttgtgaaatttgacaaaggcatagaatctttttctatccagtcaggcattgcctattctttccagtaactactgattcccccacttttctgtcttagaaaattgtgggaatcccccctcactctgcctatgttgcactctctctcttcccaaccataactctgccctcagctattaactgtgctgtgtatttatcaagttggtatgttgtatgtacagtgttattcatgtcatcatgagaatgttgaacgcttgttaaataccttttgctagcctcttcatatgctgttgcatatgactctcatcacaactcagtgagatggaaagacaaatcctatttgtacaaatgagaaaactgaactctttagagtaactagctcagtattggccagctggtaaatggcagtgttgggattaaaatccagttcttatctactctccctttattcagaagcatttattggatgttgatctttgtttcaggttttgattttgttacttttttatactgtgtatattttcctcagtctacccttctgctctagattgtctggactcaggagattgtggcagttactggatagttatttttaagataatgattgcttttctctgtttatataagtcatgtgtacttattgtagaaagtttgtaagatgcaaaaagtataaaaattaaagttatgcactactaacatttcaatatattttctcccagattttcaataaagactttcaggcagtgatttaacgaggattttattttaacttatattttagtttaaggggaacacgtgcaggtttgttctatagatcaattacatgtcacaggggtttggtgtacatattatttcattacccaggtaataagcatagtacccaatagatacttttttgataccccaccctcctccaccctctaccctcaagtagtccctggtgtctgttgttcccttttttgtgtccatgggtactcaatgtttagctctcccttatacgtgagaacatgtgatgtttggttttctgttcatgtgttggtttgcttagggtaatggcctccagctccatccatgttgctgcaaagacatgatctcattctttttttatggctgcatagtattccatggtgtatatgtactatgttttctttatccagtctactgttgatgggcatttaggttgattccatgtctttgctattgtgaatagtgctgcaatgaatatatacatgcaaaaaaaaaaaaaaaaaaa

SEQ ID NO: 56268 - DNA, 3617 bp, Homo Sapiens
acccgtggtgccccatccctataggagctggtgagattgcagcctgctgcctcccctccatcagccacagctattggatttcccacccagaatctttaggtaaatgagatcatgattctggaaggaggtggtgtaatgaatctcaaccccggcaacaacctccttcaccagccgccagcctggacagacagctactccacgtgcaatgtttccagtgggttttttggaggccagtggcatgaaattcatcctcagtactggaccaagtaccaggtgtgggagtggctccagcacctcctggacaccaaccagctggatgccaattgtatccctttccaagagttcgacatcaacggcgagcacctctgcagcatgagtttgcaggagttcacccgggcggcagggacggcggggcagctcctctacagcaacttgcagcatctgaagtggaacggccagtgcagtagtgacctgttccagtccacacacaatgtcattgtcaagactgaacaaactgagccttccatcatgaacacctggaaagacgagaactatttatatgacaccaactatggtagcacagtagatttgttggacagcaaaactttctgccgggctcagatctccatgacaaccaccagtcaccttcctgttgcagagtcacctgatatgaaaaaggagcaagacccccctgccaagtgccacaccaaaaagcacaacccgagagggactcacttatgggaattcatccgcgacatcctcttgaacccagacaagaacccaggattaataaaatgggaagaccgatctgagggcgtcttcaggttcttgaaatcagaggcagtggctcagctatggggtaaaaagaagaacaacagcagcatgacctatgaaaagctcagccgagctatgagatattactacaaaagagaaattctggagcgtgtggatggacgaagactggtatataaatttgggaagaatgcccgaggatggagagaaaatgaaaactgaagctgccaatactttggacacaaaccaaaacacacaccaaataatcagaaacaaagaactcctggacgtaaatatttcaaagactacttttctctgatatttatgtaccatgaggggaacaagaaactacttctaacgggaagaagaaacactacagtcgattaaaaaaattattttgttacttcgaagtatgtcctatatggggaaaaaacgtacacagttttctgtgaaatatgatgctgtatgtggttgtgattttttttcacctctattgtgaattctttttcactgcaagagtaacaggatttgtagccttgtgcttcttgctaagagaaagaaaaacaaaatcagagggcattaaatgttttgtatgtgacatgatttagaaaaaggtgatgcatcctcctcacataagcatccatatggcttcgtcaagggaggtgaacattgttgctgagttaaattccagggtctcagatggttaggacaaagtggatggatgccgggaagtttaacctgagccttaggatccaatgagtggagaatggggacttccaaaacccaaggttggctataatctctgcataaccacatgacttggaatgcttaaatcagcaagaagaataatggtggggtctttatactcattcaggaatggtttatctgatgccagggctgtcttcctttctcccctttggatggttggtgaaatactttaattgccctgtctgctcacttctagctatttaagagagaacccagcttggttcttttttgctccaagtgcttaaaaataagttggaaaaaggagacggtggtgtggaaatggctgaagagtttgctcttgtatccctatagtccaaggtttctcaatctgcacaattgacatttttggccggagtgttctttgtggtgagggctttcctgtgcattgtaagatgttcagcagtatccactcatggtctctaaccacttgacaccagaaaccccccagctgtgataacgcaaaatgtctctagacatcaccaaatgttccctgggggtggcaaatttgcccttgattgagaaccaccagtttagctagtcaatatgaggatggtggtttattctcagaagaaaaagatatgtaaggtcttttagctccttagagtgaagcaaaagcaagacttcaacctcaacctatctttatgttttaaatgttagggacaataagttgaaatagctagaggagcttcttttcagaaccccagatgagagccaatgtcagataaagtaagcatagtaatgtagcaggaactacaatagaagacattttcactggaattacaaagcagaattaaaattatattgtagaaggaaacaccaagaaaagaatttccagggaaaatcctctttgcaggtattaattcttataattttttgtcttttggattatctgtttactgtctcatctgaactgatcccaggtgaacggtttattgcctagatttgtactcagaggaattttttttgttttgttttgtcttttaagaaaggaaagaaaggatgaaaaaaataaacagaaaactcagctcaggcacaattgtcaccaaggagttaaaagcttcttcttcaatagaggaattgttctgggggtcctggagacttaccattgagccatgcaatctgggaagcacaggaataagtagacactttgaaaatggatttgaatgttctcatcccttttgcagcttttctttttggctctctcatgtccttggcttgctcctctattctacctctctttctccagcaataatatgcaaatgaagacatgtatccataagaaggagtgctcttcatcaactaatagagcacctaccacagtgtcatacctggtagaggtgagcaattcatattcaaaggttgcaaagtgtttgtaatatattcatgaggctggaagtaagaagaattaaaaatttgtcctaattacaatgagaaccattctaggtagtgatcttggagcacacatgaataactttctgaaggtgcaaccaaatccatttttatttctgcctggcttggtcacctctgtaaaggtttaacttagtgttgtcaagtaacagttactgaaagagctgagaaaaagaacaatgaacagcaacgatcttgactgtgcaactcagacattcctgcagaaaagacatatgttgctttacaagaaggccaaagaactatggggccttcccagcatttgactgttcattgcatagaatgaattaaatatccagttacttgaatgggtataacgcatgaatatttgtgtgtctgtgtgtgtgtctgagttgtgtgattttattaggggcatctgccaattctctcactgtggttccttctctgactttgcctgttcatcatctaaggaggctagatccttcgctgacttcaccattcctcaaacctgtaagtttctcacttcttccaaattggctttggctctttctgcaacctttccattcaagagcaatctttgctaaggagtaagtgaatgtgaagagtaccaactacaacaattctacagataattagtggattgtgttgtttgttgagagtgaaggtttctt

SEQ ID NO: 56269 - DNA, 4465 bp, Homo Sapiens
atggtttccagatgtagctgcctgggggtccagtgtctgctgctctcgcttcttctcctcgcagcctgggaggtggggagcggccagctccactactcagtctacgaggaggccagacacggcaccttcgtgggccgcatcgcgcaggacctggggctggagctggcggagctggtgcagcgcctgttccgggtggcgtccaaaagacacggggaccttctggaggtaaatctgcagaatggcattttgtttgtgaattctcggattgaccgcgaggagctgtgcgggcggagcgtggagtgcagcatccacctggaggtgatcgtggacaggccgctgcaggttttccatgtggacgtggaagtgaaggacattaacgacaacccgcccaggttctccgtaacagaacaaaagctctcaatacctgaatccagactgcttgactctcgatttccactagaaggcgcatctgatgcggatgttggagagaacgcattgcttacttacaaactcagtccaaatgagtattttgttcttgatattataaacaaaaaagacaaagacaaattcccagtgcttgttctgcggaagctgctggatcgtgaagaaaatcctcagctaaagttgttgttgacagcaactgatggaggcaaacctgaatttaccggatctgtttctctgctgatcctggtgttagatgccaatgataacgcccctatctttgacagaccggtttatgaagttaagatgtatgaaaatcaagtgaaccaaacattagtaatacggctcaacgcttctgattcggatgaaggaataaacaaggaaatgatgtattcatttagctctttggtcccacccacgataagaaggaaattttggataaacgaaaggacgggagaaataaaagtaaatgatgctattgactttgaggacagtaacacttatgaaattcatgtagatgttacagataagggaaacccacctatggttggtcactgcacggtcctagtggaactactggatgaaaatgataattcacctgaggtgattgtcacttctctgtctctcccagtgaaagaagatgctcaagtgggcaccgtcattgccctaatcagcgtttctgaccatgattcaggagccaacggacaggtcacctgctctctgacgcctcacgttccgttcaagctggtgtccacctacaagaattactactcattggtgctggacagcgctctggaccgcgagagggtgtcggcctatgagctggtggtgaccgcgcgggacgggggctcgcctccgctgtgggccacggccagcgtgtctgtggaggtggccgacgtgaacgacaacgcgcctgcgttcgcgcagtccgagtacacggtgttcgtgaaggagaacaacccgccaggctgccacatcttcacggtgtctgcgtgggacgcggacgcgcaggagaacgccctggtgtcctactctctggtggagcggcggttgggcgagcgctcgctgtcgagctacgtgtcggtgcacgcggagagcggcaaggtgtacgcgctgcagccgctggaccacgaggagctggagctgctacagttccagccacgacagcccaaccctgactggcgttactctgcctccctgagagcaggcatgcacagctctgtgcacctagaggaggctggcattctacgggctggtccaggagggcctgatcagcagtggccaacagtatccagtgcaacaccagaaccagaggcaggagaagtgtcccctccagtcggtgcgggtgtcaacagcaacagctggacctttaaatacggaccaggcaaccccaaacaatccggtcccggtgagttgcccgacaaattcattatcccaggatctcctgcaatcatctccatccggcaggagcctactaacagccaaattgacaaaagtgacttcataaccttcggcaaaaaggaggagaccaagaaaaagaagaaaaagaagaagggtaacaagacccaggagaaaaaagagaaagggaacagcacgactgacaacagtgaccagtgaggtcctcaaatggaaacaagccacttagccagtttttgtaataatggcaaatctctcccatgtagcaattccctgctcctttttcctatctacatgagccctcttagagacctcagaaatctgcagaaagttccctgtgtctgtctagaacgcatttaacaggttttgtcgtaaaagctttactaagtctggtgttaactctttctctccactctggcttgttttcagaacctaaaaagcagacccaagtttcctttctcctccgccgcaaaggagaggcttcccagccccgccagtgagaggttggactctctgccctgtgctccggggatcctgtcttgatgacacttgcagggcaggctgaaaagttttgagattgagcagcttgggagtttgtggccactgggtatgtgtggctaccgcgggtatgcgagtgccagatattggctgagacgagccagcttagactaattggtacaaggaaggcaagaaaacaaagacaaataaacagcggaagttatcagtatggaggggaagtgtaaacttaaagggaccagactttctaaatcttacaactcaagaggtggcagccaccctctaggagacaaaactacccccactgacaaggctttaggagaccctaaagtctgttggctgtgacgtcattatacctaaaatctgcatcatacctgcaagccaacagttcagtgttttaacagagaaccaccctgggaaacagaagcagatctgatgtgtttcctatacatgtcctgtgctcactttattaaaaattcttttgcacacaatgtttatgaaaaggccagatccttttccaatacttatgcaaaagcaaaagaaaaccccgacacctcacctttcgctgtttgttgtttcatagatttatttaaaaaaagagaaagtctatagctataaatctttaaagagaaatatgaatacaattcccctaaactctcctcaaaagagaattcagtctacagccatttaaatgatcattgctgctacagaagtgctttaagagaattgcctgaaacatctgtattatatcggccacctgccaatcacagctttactctttcaggtcactctggggctgcctcttgcatgtattactaaataaaatgatctctctttctctctctctctctcttttctaagaaacaattatgtgcactttgatacacaaccttctctaaccaactatatatcaagacccaaaaattgaagaaaaatattgttttctcatacagtgagcagatttttcaatctactaattctgtgacttgtcttggtgtgctagcctacaccttctctttggtttagttttccttttctataacactctgaattgctaatcttactaacacctatgatgttacctgaaatcaatctcccatatgtatgctgtatgctatgctaagactcctgaaatatacttactctgtgcttgtgtatgtgaatgttaatgcaactattacctagagtgaactttaagctttattgttgaatgtaattccattatatttccttttgtacacctgtgaaaaagtggagtagtgtttttttaaccattgttaatcagcttttgtgtatgaaagacacagtaaaatttctttcttaaatcaagatactggtgattcaaggaattttatttatggtccagccaagagccatctcgtgccaagacttctgctggcaagggaatggataaagctgttttgttctagtaacaattttggaatgaatactgacaatattccatgagggtgtgcaagcacaaattttaccaatctgacctctttgaagttgcagaatgctttgaaattctaatggtatctgaaatatcagctcatagaaagtaacaaaatttgctgtcaccttaaataagacattttaattttgttataatgtacaatttagaagtttgattaattatattatctatttaggcattaatataaaagaggtaggagtctgttatttaaaaaaagcattaaatttaaaaaaaaactgtcttgtctacttttagcttcattctcccatattttgaagggtgtgtaacttcagctctgcaggattgcatggggtaaaacttgttaccaacacatgtgaaccattgctacattgtaggttgtgatcattttgccccactgaagcccatgtatctgaccttacgtgccttttgaactaggagaatcgggctaatttattaatgatgataattataatgtatctgtacagcactttttacatttgcgaagtgctttccaatccatgttagttactagttattacagctgtaaggataaaacacgtcatgtggattcattttgaattggtgctattggtatttcctctgttattgctaataaatgaaaatggtggtatg

SEQ ID NO: 56270 - DNA, 2272 bp, Homo Sapiens
aggcgcccgcccgccgcgcgtgattctcgcctcgccgcagcccagccctgcgcgccttgcccggcggcccccgcccggccgctccgggcccctggccccgcggagcgatgctgctgctggctgccgccttcctcgtggccttcgtgctgctgctgtacatggtgtctccgctcatcagccccaagcccctcgccctgcccggggcgcatgtggtggttacaggaggttccagtggcatcgggaagtgcattgctatcgagtgctataaacaaggagcttttataactctggttgcacgaaatgaggataagctgctgcaggcaaagaaagaaattgaaatgcactctattaatgacaaacaggtggtgctttgcatatcagttgatgtatctcaagactataaccaagtagagaatgtcataaaacaagcacaggagaaactgggtccagtggacatgctggtaaattgtgcaggaatggcagtgtcaggaaaatttgaagatcttgaagttagtacctttgaaaggttaatgagcatcaattacctgggcagcgtgtaccccagccgggccgtgatcaccaccatgaaggagcgccgggtgggcaggatcgtgtttgtgtcctcccaggcaggacagttgggattattcggtttcacagcctactctgcatccaagtttgccataaggggattggcagaagctttgcagatggaggtgaagccatataatgtctacatcacagttgcttacccaccagacacagacacacctggctttgccgaagaaaacagaacaaagcctttggagactcgacttatttcagagaccacatctgtgtgcaaaccagaacaggtggccaaacaaattgttaaagatgccatacaaggaaatttcaacagttcccttggctcagatgggtacatgctctcggccctgacctgtgggatggctccagtaacttctattactgaggggctccagcaggtggtcaccatgggccttttccgcactattgctttgttttaccttggaagttttgacagcatagttcgtcgctgcatgatgcagagagaaaaatctgaaaatgcagacaaaactgcctaatcttcttaccccttggaagaagactgtttccaaataatttgaacagcttgctgctaaatgggacccaatttttggcctatagacacttatgtattgttttcgaatacgtcagattggaccagtgctcttcaggaatgtggctgcaagcaaggggctagaagttcacctcctgacagtattattaatactatgcaaatatggaataggagaccatttgattttctaggctttgtggtagagaggtgaaggtatgagaattaatagcgtgtgaacaaagtaaagaacaggattccagaatgatcattaaatttgtttctatttattcttttttgcccccctagagattaagtccagaaatgtactttctggcacataaagaaatcttgaggactttgtttaaaccttccataaaaaaacaattttcggtttctcgggttctctctctctgtctctctgtctctctgtctctctgtctctctgtctctctctctctctctctttctttctttgtgtattttattcaagatgagttggacccattgccagtgagtctgaatgtcactgacagccctgtgttgtgctcaggactcactctgctgctggtggaaactcatggcttctctctctctttgatcccataaagctacgagggggacgggagagggcagtgcaatgggaagtaaagagatattttccagtaggaaaagcaatgctttcttgtctttagactcaaatgcttagggaacgtttcatttctcattcatggggaaaggcagcctccttaaatgttttctgaagagcggtaaaatctagaagcttaagaatttacagttccttcaataaccatgatgacctgaagttcacctatcccattttagcatctacttgtttttcccatctcttcctttccaattttgcttatactgctgtaatatttttgtaaaaaaaaaaaaaaaggaaaaaaaagaccagctaaaattttcgacttgactttttaacttaactcatgaattaattaaagcaaatgaaaaaattaaaaagtgtgactttttctcggagcatatatgtagcttttaggaaaggctgatgatggtataaagtttgctcattaagaaaaaaagacaaggctgattttgaagagagttgcttttgaaataaaatgatca

SEQ ID NO: 56271 - DNA, 1042 bp, Homo Sapiens
ggtcagcagataaacaagtgaacaaaggtctctggttttcctaggcagaggaccctgcggccttccgcagtgtttgtgtccctgggtacttgagattagggagtggtgatgactcttaaggagcatgctgccttcaagcatctgtttaacaaagcacatcttgcaccgcccttaatccattcaaccctgagtggatacagcacatgtttcagatagcacagggttgggggtaaggtcacagatcaacaggatcccaaggcagaagaatttttcttagtacagaacaaaatgaaaagtctcccatgtctacttctttctacacagacacggcaaccatccgatttctcaatcttttccccacctttcccccctttctattccacaaaaccgccattgtcatcatggccagttctcaatgagctgttgggtacacctcccagatggggtggcggccggacagaggggctcctcacttcccagtaggggcggccgggcagaggcgcccctcacctcccggacggggcggctggccgggcggggggctgaacccccccacctccctcctggactgagcggctggccgggcagaggggctcctcacttcccagtaggggcggccgggcagaggcgcccctcacctcccggacggggcggctggccgggcggggggctgacccccccacctccctgccggacgagaatgatgccaggaggattaataggtggaagtaatcagagctctggtttcatggtcatgtcattcgttcttccagcagcttgtatagtgcagccatcaaaagtgatacctgaattatgtcgtgtctacagatcccatgagtatgtagccatagcaatgaacaacacagactgcatttgcaacgatgcatgtctgcaagaccccatggacaactttcatctgatgcacgcactcattcttgctttgacactccaagccaagtcacatttgtttccaccaagtcagacaacttcgatggctctctgcatctcactatatctctgtcctgctgatgccaccaaatga

SEQ ID NO: 56272 - DNA, 2584 bp, Homo Sapiens
gggggcgtggccccgagaaggcggagacaagatggccgcccatagcgcttggaggacctaagaggcggtggccggggccacgccccgggcaggagggccgctctgtgcgcgcccgctctatgatgcttgcgcgcgtcccccgcgcgccgcgctgcgggcggggcgggtctccgggattccaagggctcggttacggaagaagcgcagcgccggctggggagggggctggatgcgcgcgcacccggggggaggccgctgctgcccggagcaggaggagggggagagtgcggcgggcggcagcggcgctggcggcgactccgccatagagcaggggggccagggcagcgcgctcgccccgtccccggtgagcggcgtgcgcagggaaggcgctcggggcggcggccgtggccgggggcggtggaagcaggcgggccggggcggcggcgtctgtggccgtggccggggccggggccgtggccggggacggggacggggccggggccggggccgcggccgtcccccgagtggcggcagcggccttggcggcgacggcggcggctgcggcggcggcggcagcggtggcggcggcgccccccggcgggagccggtccctttcccgtcggggagcgcggggccggggcccaggggaccccgggccacggagagcgggaagaggatggattgcccggccctcccccccggatggaagaaggaggaagtgatccgaaaatctgggctaagtgctggcaagagcgatgtctactacttcagtccaagtggtaagaagttcagaagcaagcctcagttggcaaggtacctgggaaatactgttgatctcagcagttttgacttcagaactggaaagatgatgcctagtaaattacagaagaacaaacagagactgcgaaacgatcctctcaatcaaaataagggtaaaccagacttgaatacaacattgccaattagacaaacagcatcaattttcaaacaaccggtaaccaaagtcacaaatcatcctagtaataaagtgaaatcagacccacaacgaatgaatgaacagccacgtcagcttttctgggagaagaggctacaaggacttagtgcatcagatgtaacagaacaaattataaaaaccatggaactacccaaaggtcttcaaggagttggtccaggtagcaatgatgagacccttttatctgctgttgccagtgctttgcacacaagctctgcgccaatcacagggcaagtctccgctgctgtggaaaagaaccctgctgtttggcttaacacatctcaacccctctgcaaagcttttattgtcacagatgaagacatcaggaaacaggaagagcgagtacagcaagtacgcaagaaattggaagaagcactgatggcagacatcttgtcgcgagctgctgatacagaagagatggatattgaaatggacagtggagatgaagcctaagaatatgatcaggtaactttcgaccgactttccccaagagaaaattcctagaaattgaacaaaaatgtttccactggcttttgcctgtaagaaaaaaaatgtacccgagcacatagagctttttaatagcactaaccaatgcctttttagatgtatttttgatgtatatatctattattcaaaaaatcatgtttattttgagtcctaggacttaaaattagtcttttgtaatatcaagcaggaccctaagatgaagctgagcttttgatgccaggtgcaatctactggaaatgtagcacttacgtaaaacatttgtttcccccacagttttaataagaacagatcaggaattctaaataaatttcccagttaaagattattgtgacttcactgtatataaacatatttttatactttattgaaaggggacacctgtacattcttccatcatcactgtaaagacaaataaatgattatattcacagactgattggaattctttctgttgaaaagcacacacaataaagaacccctcgttagccttcctctgatttacattcaactctgatccctgggccttaggtttgacatggaggtggaggaagatagcgcatatatttgcagtatgaactattgcctctggacgttgtgagaattgtgctttcaccagaatttctaagaatttctgctaaatatcacctagcatgtgtaattttttttccttgcctgtgacttggacttttgatagttctataagaataaggctttttcttcccttgggcatgagtcagatacacaaggacccttcaggtgttactagaaggcgtccatgtttattgttttttaaagaatgtttggcactctctaacgtccactagcttactgagttatcaggtgcaggtcagactcttggctacagtgagaggcagcttctaggcagagttgcttaatgaaagggtttgtaatactttacaaaccattacctgtacctggcctggcctccaaaatattaacattctttttctgttgaaactcgcgagtgtaactttcataccacttgaatttattgatatttaattatgaaaactagcattacattattaaacgatttctaaaatc

SEQ ID NO: 56273 - DNA, 5917 bp, Homo Sapiens
agtgctgcggctgcctagttgacgcacccattgagtcgctggcttctttgcagcgcttcagcgttttcccctggagggcgcctccatccttggaggcctagtgccgtcggagagagagcgggagccgcggacagagacgcgtgcgcaattcggagccgactctgggtgcggactgtgggagctgactctgggtagccggctgcgcgtggctggggaggcgaggccggacgcacctctgtttgggggtcctcagagattaatgattcatcaagggatagttgtacttgtctcgtgggaatcacttcatcatgcgaaatctgaaattatttcggaccctggagttcagggatattcaaggtccagggaatcctcagtgcttctctctccgaactgaacaggggacggtgctcattggttcagaacatggcctgatagaagtagaccctgtctcaagagaagtgaaaaatgaagtttctttggtggcagaaggctttctcccagaggatggaagtggccgcattgttggtgttcaggacttgctggatcaggagtctgtgtgtgtggccacagcctctggagacgtcatactctgcagtctcagcacacaacagctggagtgtgttgggagtgtagccagtggtatctctgttatgagttggagtcctgaccaagagctggtgcttcttgccacaggtcaacagaccctgattatgatgacaaaagattttgagccaatcctggagcagcagatccatcaggatgattttggtgaaagcaagtttatcactgttggatggggtaggaaggagacacagttccatggatcagaaggcagacaagcagcttttcagatgcaaatgcatgagtctgctttgccctgggatgaccatagaccacaagttacctggcggggggatggacagttttttgctgtgagtgttgtttgcccagaaacaggggctcggaaggtcagagtgtggaaccgagagtttgctttgcagtcaaccagtgagcctgtggcaggactgggaccagccctggcttggaaaccctcaggcagtttgattgcatctacacaagataaacccaaccagcaggatattgtgttttttgagaaaaatggactccttcatggacactttacacttcccttccttaaagatgaggttaaggtaaatgacttgctctggaatgcagattcctctgtgcttgcagtctggctggaagaccttcagagagaagaaagctccattccgaaaacctgtgttcagctctggactgttggaaactatcactggtatctcaagcaaagtttatccttcagcacctgtgggaagagcaagattgtgtctctgatgtgggaccctgtgaccccataccggctgcatgttctctgtcagggctggcattacctcgcctatgattggcactggacgactgaccggagcgtgggagataattcaagtgacttgtccaatgtggctgtcattgatggaaacagggtgttggtgacagtcttccggcagactgtggttccgcctcccatgtgcacctaccaactgctgttcccacaccctgtgaatcaagtcacattcttagcacaccctcaaaagagtaatgaccttgctgttctagatgccagtaaccagatttctgtttataaatgtggtgattgtccaagtgctgaccctacagtgaaactgggagctgtgggtggaagtggatttaaagtttgccttagaactcctcatttggaaaagagatacaaaatccagtttgagaataatgaagatcaagatgtaaacccgctgaaactaggccttctcacttggattgaagaagacgtcttcctggctgtaagccacagtgagttcagcccccggtctgtcattcaccatttgactgcagcttcttctgagatggatgaagagcatggacagctcaatgtcagttcatctgcagcggtggatggggtcataatcagtctatgttgcaattccaagaccaagtcagtagtattacagctggctgatggccagatatttaagtacctttgggagtcaccttctctggctattaaaccatggaagaactctggtggatttcctgttcggtttccttatccatgcacccagaccgaattggccatgattggagaagaggaatgtgtccttggtctgactgacaggtgtcgctttttcatcaatgacattgaggttgcgtcaaatatcacgtcatttgcagtatatgatgagtttttattgttgacaacccattcccatacctgccagtgtttttgcctgagggatgcttcatttaaaacattacaggccggcctgagcagcaatcatgtgtcccatggggaagttctgcggaaagtggagaggggttcacggattgtcactgttgtgccccaggacacaaagcttgtattacagatgccaaggggaaacttagaagttgttcatcatcgagccctggttttagctcagattcggaagtggttggacaaacttatgtttaaagaggcatttgaatgcatgagaaagctgagaatcaatctcaatctgatttatgatcataaccctaaggtgtttcttggaaatgtggaaaccttcattaaacagatagattctgtgaatcatattaacttgttttttacagaattgaaagaagaagatgtcacgaagaccatgtaccctgcaccagttaccagcagtgtctacctgtccagggatcctgacgggaataaaatagaccttgtctgcgatgctatgagagcagtcatggagagcataaatcctcataaatactgcctatccatacttacatctcatgtaaagaagacaaccccagaactggaaattgtactgcaaaaagtacacgagcttcaaggaaatgctccctctgatcctgatgctgtgagtgctgaagaggccttgaaatatttgctgcatctggtagatgttaatgaattatatgatcattctcttggcacctatgactttgatttggtcctcatggtagctgagaagtcacagaaggatcccaaagaatatcttccatttcttaatacacttaagaaaatggaaactaattatcagcggtttactatagacaaatacttgaaacgatatgaaaaagccattggccacctcagcaaatgtggacctgagtacttcccagaatgcttaaacttgataaaagataaaaacttgtataacgaagctctgaagttatattcaccaagctcacaacagtaccaggatatcagcattgcttatggggagcacctgatgcaggagcacatgtatgagccagcggggctcatgtttgcccgttgcggtgcccacgagaaagctctctcagcctttctgacatgtggcaactggaagcaagccctctgtgtggcagcccagcttaactttaccaaagaccagctggtgggcctcggcagaactctggcaggaaagctggttgagcagaggaagcacattgatgcggccatggttttggaagagtgtgcccaggattatgaagaagctgtgctcttgctgttagaaggagctgcctgggaagaagctttgaggctggtatacaaatataacagactggatattatagaaaccaacgtaaagccttccattttagaagcccagaaaaattatatggcatttctggactctcagacagccacattcagtcgccacaagaaacgtttattggtagttcgagagctcaaggagcaagcccagcaggcaggtctggatgatgaggtaccccacgggcaagagtcagacctcttctctgaaactagcagtgtcgtgagtggcagtgagatgagtggcaaatactcccatagtaactccaggatatcagcgagatcatccaagaatcgccgaaaagcggagcggaagaagcacagcctcaaagaaggcagtccgctggaggacctggccctcctggaggcactgagtgaagtggtgcagaacactgaaaacctgaaagatgaagtataccatattttaaaggtactctttctctttgagtttgatgaacaaggaagggaattacagaaggcctttgaagatacgctgcagttgatggaaaggtcacttccagaaatttggactcttacttaccagcagaattcagctaccccggttctaggtcccaattctactgcaaatagtatcatggcatcttatcagcaacagaagacttcggttcctgttcttgatgctgagctttttataccaccaaagatcaacagaagaacccagtggaagctgagcctgctagactgagtgactgcagttaggagggatccgacagagaagaccatttccactcattcctgttgtcctaccaccccttgctctttgagggctggctattgagaactggaaagagtaaaatgataacttaccttagcattgccaagaacttcagcagacaacaagcaattctatttattttatgttgtgtatacatcttgatcattagcaagacattaagctttaaccattatggcaccattttgtgagaatgattgttctttcacttgggctgtttgagagcataattatggtaatcatgagattaatgtttcatgatttctacctccaaagtgtgaagacaagtaaaacaatgtttctaaattgtcttattttgttggcggagaagattacaatggctattagtgctacatttggtcaaatgtaatcacttaaatagcttcttgtcaccttaaactaaagcagaataaaaagtatcctttgaaattataagccctcctttgctgacagctattattttgtaacatcttaccaggtcatgtgctttcagttataactgggctgagcctcctataattacaatgtctatagggactgttttactgcctgtgtattttctgctagagagttagcaatgttagagctagaacagattagaatttctaaacagtatcatgcacagttggtgtgagtgatcagtgtgcattgtatggcatgcatggttgtgaattattctctgttctccaaatactgtttctttaactcagatatttttgttagtgtctaggccacttcatttatttttcgtcatggtactttactgacttctctttattcaattctccacgccctcaccaaaaaaaactgtctcaaaatgagaatattttattttcatggtgagtctagaaaacgcccacttcattctgattaaaaattcttccatgttttaaatatcagaaccagacctttcttactgtgtatcttagcccatttgtgtctctataacaacaaccagctttcaaaggaactaatagagtgaaaactcactcattaccacgaggatggcacaagcgattcacgtaggatctgcccctgtgaccaaaacacctcccattgggccccacttccaacactggtgatcacatttcaacatgaggtttagggaaacaaatgcctaaactacagcactgtacataaactaacaggaaatgctgcttttgatcctcaaagaagtgatatagccaaaattgtaatttaagaagcctttgtcagtatagcaagatgttaactatagaatcaatctaggagtattcactgtaaaattcaacttttctgtatgtttgaacattttcacaatctcataggagtttttaaaaagaagagaaagaagatatactttgctttggagaaatctactttttgacttacatgggtttgctgtaattaagtgcccaatattgaaaggctgcaagtactttgtaatcactctttggcatgggtaaataagcatggtaacttatattgaaatatagtgctcttgctttggataactgtaaagggacccatgctgatagactggaaatagaagtaaatgtgtttattgaaaaaaaaaaaaaaaa

SEQ ID NO: 56274 - DNA, 6522 bp, Homo Sapiens
ccgagccgggagccgagcgcgctgggcgcggccgtcccgctgccgccgccaagcccggagtgcgccagcggccatggttcccgcggcggcgccgggcgcctgagccccgggacgcaagcgctggaggcgggctgccggctgtgcgggcgctccggagagaccgacagaaggtgagcactgtgggctatgggatggatgaggtggagcaggaccagcatgaggcccgactcaaggagctgtttgacagttttgacacgacgggcacagggtccctggggcaggaggaactcaccgacctttgccacatgttgagcttggaggaggtggccccagtgctgcagcagacattacttcaggacaacctcttgggcagggtacattttgaccaatttaaagaagcattaatactcatcttgtccagaactctgtcaaatgaagaacactttcaagaaccagactgctcactagaagctcagcccaaatatgttagaggtgggaagcgttacggacgaaggtccttgcccgagttccaagagtccgtggaggagtttcctgaagtgacggtgattgagccactggatgaagaagcgcggccttcacacatcccagccggtgactgcagtgagcactggaagacgcaacgcagtgaggagtatgaagcggaaggccagttaaggttttggaacccagatgacttgaatgcttcacagagtggatcttcccctccccaagactggatagaagagaaactgcaagaagtttgtgaagatttggggatcacccgtgatggtcacctgaaccggaagaagctggtctccatctgtgagcagtatggtttacagaatgtggatggagagatgctcgaggaagtattccataatcttgatcctgacggtacaatgagtgtagaagattttttctatggtttgtttaaaaatggaaaatctcttacaccatcagcatctactccatatagacaactaaaaaggcacctttccatgcagtctttcgatgagagtggacgacgtaccacaacctcatcagcaatgacaagtaccattggctttcgggtcttctcctgcctggatgatgggatgggccatgcatctgtggagagaatactggacacctggcaggaagagggcattgagaacagccaggagatcctgaaggccttggatttcagcctcgatggaaacatcaatttgacagaattaacactggcccttgaaaatgaacttttggttaccaagaacagcattcaccaggcggctctggccagctttaaggctgaaatccggcatttgttggaacgagttgatcaggtggtcagagaaaaagagaagctacggtcagatctggacaaggccgagaagctcaagtctttaatggcctcggaggtggatgatcaccatgcggccatagagcggcggaatgagtacaacctcaggaaactggatgaagagtacaaggagcgaatagcagccttaaaaaatgaactccgaaaagagagagagcagatcctgcagcaggcaggcaagcagcgtttagaacttgaacaggaaattgaaaaggcaaaaacagaagagaactatatccgggaccgccttgccctctctttaaaggaaaacagtcgtctggaaaatgagcttctagaaaatgcagagaagttggcagaatatgagaatctgacaaacaaacttcagagaaatttggaaaatgtgttagcagaaaagtttggtgacctcgatcctagcagtgctgagttcttcctgcaagaagagagactgacacagatgagaaatgaatatgagcggcagtgcagggtactacaagaccaagtagatgaactccagtctgagctggaagaatatcgtgcacaaggcagagtgctcaggcttccgttgaagaactcaccgtcagaagaagttgaggctaacagcggtggcattgagcccgaacacgggctcggttctgaagaatgcaatccattgaatatgagcattgaggcagagctggtcattgaacagatgaaagaacaacatcacagggacatatgttgcctcagactggagctcgaagataaagtgcgccattatgaaaagcagctggacgaaaccgtggtcagctgcaagaaggcacaggagaacatgaagcaaaggcatgagaacgaaacgcacaccttagaaaaacaaataagtgaccttaaaaatgaaattgctgaacttcaggggcaagcagcagtgctcaaggaggcacatcatgaggccacttgcaggcatgaggaggagaaaaaacaactgcaagtgaagcttgaggaggaaaagactcacctgcaggagaagctgaggctgcaacatgagatggagctcaaggctagactgacacaggctcaagcaagctttgagcgggagagggaaggccttcagagtagcgcctggacagaagagaaggtgagaggcttgactcaggaactagagcagtttcaccaggagcagctgacaagcctggtggagaaacacactcttgagaaagaggagttaagaaaagagctcttggaaaagcaccaaagggagcttcaggagggaagggaaaaaatggaaacagagtgtaatagaagaacctctcaaatagaagcccagtttcagtctgattgtcagaaagtcactgagaggtgtgaaagcgctctgcaaagcctggaggggcgctaccgccaagagctgaaggacctccaggaacagcagcgtgaggagaaatcccagtgggaatttgagaaggacgagctcacccaggagtgtgcggaagcccaggagctgctgaaagagactcttaagagagagaaaacaacttctctggtcctgacccaggagagagagatgctggagaaaacatacaaagaacatttgaacagcatggtcgtcgagagacagcagctactccaagacctggaagacctaagaaatgtatctgaaacccagcaaagcctgctgtctgaccagatacttgagctgaagagcagtcacaaaagggaactgagggagcgtgaggaggtcctgtgccaggcaggggcttcggagcagctggccagccagcggctggaaagactagaaatggaacatgaccaggaaaggcaggaaatgatgtccaagcttctagccatggagaacattcacaaagcgacctgtgagacagcagatcgagaaagagccgagatgagcacagaaatctccagacttcagagtaaaataaaggaaatgcagcaggcaacatctcctctctcaatgcttcagagtggttgccaggtgataggagaggaggaggtggaaggagatggagccctgtccctgcttcagcaaggggagcagctgttggaagaaaatggggacgtcctcttaagcctgcagagagctcatgaacaggcagtgaaggaaaatgtgaaaatggctactgaaatttctagattgcaacagaggctacaaaagttagagccagggttagtaatgtcttcttgtttggatgagccagctactgagttttttggaaatactgcggaacaaacagagccgtttttacagcaaaaccgaacgaagcaagtagaaggtgtgaccaggcggcatgtcctaagtgacctggaagatgatgaggtccgggacctgggaagtacagggacgagctctgttcagagacaggaagtcaaaatagaggagtctgaagcttcagtagagggtttttctgagcttgaaaacagtgaagagaccaggactgaatcctgggagctgaagaatcagattagtcagcttcaggaacagctaatgatgttatgtgcggactgtgatcgagcttctgaaaagaaacaggacctactttttgatgtttctgtgctaaaaaagaaactgaagatgcttgagagaatccctgaggcttctcccaaatataagctgttgtatgaagatgtgagccgagaaaatgactgccttcaggaagagctgagaatgatggagacacgctacgatgaggcactagaaaataacaaagaactcactgcagaggttttcaggttgcaggatgagctgaagaaaatggaggaagtcactgaaacattcctcagcctggaaaagagttacgatgaggtcaaaatagaaaatgaggagctgaatgttctggttttgagacttcaaggcaagattgagaagcttcaggaaagcgtggtccagcggtgtgactgctgcttatgggaagccagtttagagaacctggaaatcgaacctgatggaaatatactccagctcaatcagacactggaagagtgtgtgcccagggttaggagtgtacatcatgtcatagaggaatgtaagcaagaaaaccagtaccttgaggggaacacacagctcttggaaaaagtaaaagcacatgaaattgcctggttacatggaacaattcagacacatcaagaaaggccaagagtacagaatcaagttatactggaggaaaacactactctcctaggctttcaagacaaacattttcagcatcaggccaccatagcagagttagaactggagaaaacaaagttacaggagctgactaggaagttgaaggagagagtcactattttagttaagcaaaaagatgtactttctcacggagaaaaggaggaagagctgaaggcaatgatgcatgacttgcagatcacgtgcagtgagatgcagcaaaaagttgaacttctgagatatgaatctgaaaagcttcaacaggaaaattctattttgagaaatgaaattactactttaaatgaagaagatagcatttctaacctgaaattagggacattaaatggatctcaggaagaaatgtggcaaaaaacggaaactgtaaaacaagaaaatgctgcagttcagaagatggttgaaaatttaaagaaacagatttcagaattaaaaatcaaaaaccaacaattggatttggaaaatacagaacttagccaaaagaactctcaaaaccaggaaaaactgcaagaacttaatcaacgtctaacagaaatgctatgccagaaggaaaaagagccaggaaacagtgcattggaggaacgggaacaagagaagtttaatctgaaagaagaactggaacgttgtaaagtgcagtcctccactttagtgtcttctctggaggcggagctctctgaagttaaaatacagacccatattgtgcaacaggaaaaccaccttctcaaagatgaactggagaaaatgaaacagctgcacagatgtcccgatctctctgacttccagcaaaaaatctctagtgttctaagctacaacgaaaaactgctgaaagaaaaggaagctctgagtgaggaattaaatagctgtgtcgataagttggcaaaatcaagtcttttagagcatagaattgcgacgatgaagcaggaacagaaatcctgggaacatcagagtgcgagcttaaagtcacagctggtggcttctcaggaaaaggttcagaatttagaagacaccgtgcagaatgtaaacctgcaaatgtcccggatgaaatctgacctacgagtgactcagcaggaaaaggaggctttaaaacaagaagtgatgtctttacataagcaacttcagaatgctggtggcaagagctgggccccagagatagctactcatccatcagggctccataaccagcagaaaaggctgtcctgggacaagttggatcatctgatgaatgaggaacagcagctgctttggcaagagaatgagaggctccagaccatggtacagaacaccaaagccgaactcacgcactcccgggagaaggtccgtcagttggaatccaatcttcttcccaagcaccaaaaacatctaaacccatcaggtaccatgaatcccacagagcaagaaaaattgagcttaaagagagagtgtgatcagtttcagaaagaacaatctcctgctaacaggaaggtcagtcagatgaattcccttgaacaagaattagaaacaattcatttggaaaatgaaggcctgaaaaagaaacaagtaaaactggatgagcagctcatggagatgcagcacctgaggtccactgcgacgcctagcccgtcccctcatgcttgggatttgcagctgctccagcagcaagcctgtccgatggtgcccagggagcagtttctgcagcttcaacgccagctgctgcaggcagaaaggataaaccagcacctgcaggaggaacttgaaaacaggacctccgaaaccaacacaccacagggaaaccaggaacaactggtaactgtcatggaggaacgaatgatagaagttgaacagaaactgaaactagtgaaaaggcttcttcaagagaaagtgaatcagctcaaagaacaagtgagcctacccggtcatctctgttcacccacctcacattccagctttaactccagttttacatccctttattgccattaactcgttaacttatgttgtctaataaaggcaaattctattataaaaaaaaaaaaaaaaa

SEQ ID NO: 56275 - DNA, 3195 bp, Homo Sapiens
acagcatggagtggggttacctgttggaagtgacctcgctgctggccgccttggcgctgctgcagcgctctagcggcgctgcggccgcctcggccaaggagctggcatgccaagagatcaccgtgccgctgtgtaagggcatcggctacaactacacctacatgcccaatcagttcaaccacgacacgcaagacgaggcgggcctggaggtgcaccagttctggccgctggtggagatccagtgctcgcccgatctcaagttcttcctgtgcagcatgtacacgcccatctgcctagaggactacaagaagccgctgccgccctgccgctcggtgtgcgagcgcgccaaggccggctgcgcgccgctcatgcgccagtacggcttcgcctggcccgaccgcatgcgctgcgaccggctgcccgagcaaggcaaccctgacacgctgtgcatggactacaaccgcaccgacctaaccaccgccgcgcccagcccgccgcgccgcctgccgccgccgccgcccggcgagcagccgccttcgggcagcggccacggccgcccgccgggggccaggcccccgcaccgcggaggcggcaggggcggtggcggcggggacgcggcggcgcccccagctcgcggcggcggcggtggcgggaaggcgcggccccctggcggcggcgcggctccctgcgagcccgggtgccagtgccgcgcgcctatggtgagcgtgtccagcgagcgccacccgctctacaaccgcgtcaagacaggccagatcgctaactgcgcgctgccctgccacaacccctttttcagccaggacgagcgcgccttcaccgtcttctggatcggcctgtggtcggtgctctgcttcgtgtccaccttcgccaccgtctccaccttccttatcgacatggagcgcttcaagtacccggagcggcccattatcttcctctcggcctgctacctcttcgtgtcggtgggctacctagtgcgcctggtggcgggccacgagaaggtggcgtgcagcggtggcgcgccgggcgcggggggcgctgggggcgcgggcggcgcggcggcgggcgcgggcgcggcgggcgcgggcgcgggcggcccgggcgggcgcggcgagtacgaggagctgggcgcggtggagcagcacgtgcgctacgagaccaccggccccgcgctgtgcaccgtggtcttcttgctggtctacttcttcggcatggccagctccatctggtgggtgatcttgtcgctcacatggttcctggcggccggtatgaagtggggcaacgaagccatcgccggctactcgcagtacttccacctggccgcgtggcttgtgcccagcgtcaagtccatcgcggtgctggcgctcagctcggtggacggcgacccggtggcgggcatctgctacgtgggcaaccagagcctggacaacctgcgcggcttcgtgctggcgccgctggtcatctacctcttcatcggcaccatgttcctgctggccggcttcgtgtccctgttccgcatccgctcggtcatcaagcaacaggacggccccaccaagacgcacaagctggagaagctgatgatccgcctgggcctgttcaccgtgctctacaccgtgcccgccgcggtggtggtcgcctgcctcttctacgagcagcacaaccgcccgcgctgggaggccacgcacaactgcccgtgcctgcgggacctgcagcccgaccaggcacgcaggcccgactacgccgtcttcatgctcaagtacttcatgtgcctagtggtgggcatcacctcgggcgtgtgggtctggtccggcaagacgctggagtcctggcgctccctgtgcacccgctgctgctgggccagcaagggcgccgcggtgggcgggggcgcgggcgccacggccgcggggggtggcggcgggccggggggcggcggcggcgggggacccggcggcggcggggggccgggcggcggcgggggctccctctacagcgacgtcagcactggcctgacgtggcggtcgggcacggcgagctccgtgtcttatccaaagcagatgccattgtcccaggtctgagcggaggggagggggcgcccaggaggggtggggaggggggcgaggagacccaagtgcagcgaagggacacttgatgggctgaggttcccaccccttcacagtgttgattgctattagcatgataatgaactcttaatggtatccattagctgggacttaaatgactcacttagaacaaagtacctggcattgaagcctcccagacccagccccttttcctccattgatgtgcggggagctcctcccgccacgcgttaatttctgttggctgaggagggtggactctgcggcgtttccagaacccgagatttggagccctccctggctgcacttggctgggtttgcagtcagatacacagatttcacctgggagaacctctttttctccctcgactcttcctacgtaaactcccacccctgacttaccctggaggaggggtgaccgccacctgatgggattgcacggtttgggtattcttaatgaccaggcaaatgccttaagtaaacaaacaagaaatgtcttaattatacaccccacgtaaatacgggtttcttacattagaggatgtatttatataattatttgttaaattgtaaaaaaaaaaagtgtaaaatatgtatatatccaaagatatagtgtgtacatttttttgtaaaaagtttagaggcttacccctgtaagaacagatataagtattctattttgtcaataaaatgacttttgataaatgatttaaccattgccctctcccccgcctcttctgagctgtcacctttaaagtgcttgctaaggacgcatggggaaaatggacattttctggcttgtcattctgtacactgaccttaggcatggagaaaattacttgttaaactctagttcttaagttgttagccaagtaaatatcattgttgaactgaaatcaaaattgagtttttgcaccttccccaaagacggtgtttttcatgggagctcttttctgatccatggataacaactctcactttagtggatgtaaatggaacttctgcaaggcagtaattccccttaggccttgttatttatcctgcatggtatcactaaaggtttcaaaaccctgaaaaaaaa

SEQ ID NO: 56276 - DNA, 5392 bp, Homo Sapiens; identical to SEQ ID NO: 30853

SEQ ID NO: 56277 - DNA, 8429 bp, Homo Sapiens; identical to SEQ ID NO: 30275

SEQ ID NO: 56278 - DNA, 4244 bp, Homo Sapiens
ccacgcgtccgccggatcagagagtgctccgagctgggttgccccactgtgcttgtatctgcactctccaacactaggcatcattgacatgttaaagcttagccaaatagaattgttctttgtcattctttttttaacttttacttattcattaggatgatttcataatatatttcctggtttagaggaaacaggaacaatggctaccgagagtactccctcagagatcatagaaagagaaagaaaaaagttgcttgaaatccttcaacatgatcctgattctatcttagacacgttaacttctcggaggctgatttctgaggaagagtatgagactctggagaatgttacagatctcctgaagaaaagtcggaagctgttaattttggtacagaaaaagggagaggcgacctgtcagcattttctcaagtgtttatttagtacttttccacagtcagctgccatttgcggcttaaggcatgaagttttaaaacatgagaatacagtacctcctcaatctatgggggcaagcagtaattcagaagatgctttttctcctggaataaaacagcctgaagcccctgagatcacagtgttcttcagtgagaaggaacacttggatttggaaacctctgagtttttcagggacaagaaaactagttatagggaaacagctttgtctgccaggaagaatgagaaggaatatgacacaccagaagtcacattatcatattcagttgagaaagttggatgtgaagttccagcaactattacatatataaaagatggacagagatatgaggagctagatgattctttatacttaggaaaagaggaatatctaggatctgttgacacccctgaagatgcagaagccactgtggaagaggaggtttatgatgacccagagcacgttggatatgatggtgaagaggacttcgagaattcagaaaccacagagttctctggtgaagaaccaagttatgagggatcagaaaccagcctttcattggaggaggaacaggagaaaagtatagaagaaagaaaaaaggtgtttaaagatgtcctgttatgtttgaacatggatagaagcagaaaggttctgccagattttgttaaacaattctccttagatcgaggatgtaagtggacccctgagagtccaggagacttagcctggaatttcctgatgaaagttcaagcacgagatgtgacggctagggattcaatcctcagtcacaaggttctggatgaagatagcaaggaggatttgctggctggagtggagaatttggaaattcgagacatacaaaccattaatccccttgacgtgctttgtgccaccatgctgtgttcagatagctctttgcaacgccaagtcatgtcaaacatgtatcagtgccagtttgctcttcccctgctactgccagatgcagaaaacaacaaaagcatcttaatgctgggggccatgaaagacattgtgaagaagcagtcaacacagttttcaggggggcctacagaggatacagaaaagtttctgactctcatgaagatgcctgtcatctcttttgtgcgtctaggatactgtagcttctctaagtccagaatcctcaacacacttctcagccctgcccagttgaaattacacaaaatctttcttcatcaagatttgcctcttttggtgcttccccggcaaatctctgatggcctggttgagataacatggtgttttcctgatagcgatgatagaaaggaaaacccctttttccaaaagcctgttgctctggctaatctccgtggaaatctagaaagtttttggactcagtttggttttttgatggaagtttcttcagctgtgttttttttcactgactgtttaggtgagaaggaatgggacttgctaatgtttttaggagaggctgccattgaaagatgctactttgttctcagttcccaagccagggagagtgaagaggctcaaatttttcagaggatactgaacttgaagccagcacagctactgttttgggagaggggagatgctggggatagaaggaagaacatggagggccttcaagctgccctccaggaagtgatgttctcttcttgcctcagatgtgtgtctgtggaggatatggccgccctggccagggagctggggattcaggtagatgaagactttgaaaacactcagagaattcaagtttcctctggagaaaacatggctgggacagctgaaggtgagggtcagcaaagacacagtcagctaaaaagctcatctaaaagccaggctctaatgccaattcaagagcctgggactcaatgtgagctcagccagaatcttcagaatctctatggtaccccagtattcaggcctgttctagagaactcctggctctttccaaccagaattggaggtaactttaaccatgtttccttgaaagcctcctgggttatgggccgcccctttgggtcagagcagaggcctaagtggttccatcctttgccttttcagaatgcaggggcccagggccgaggtaaaagttttggtattcaatccttccatccccagatattttattcaggtgaaagattcatgaaattttccagagttgctcggggatgtcactcgaatggaacatttgggagactgccaagacccatttgtcagcatgtacaggcctgccctgagagaccacaaatgatgggaactcttgaaaggtctagggcagtagcctccaagataggtcactcctattccctggattcacagccagcaagagcagtagggaagccatggcctcagcaagcttgcaccagggtaacagagttaactgaagcaactggaaaactgataagaacatcccatattggaaagcctcaccctcagtcctttcaaccagcagcagccacacaaaaactaagacctgcttctcagcaaggagtccagatgaagacacaaggtggggcttcaaatccagctctccaaatagggtcccatcccatgtgcaagagctctcagttcaaatccgatcagtccaacccatccacagtcaaacactcccagcctaaacccttccattctgtgccctctcaacctaaatcctctcagacaaaatcctgtcagtcccagccctcccaaactaaaccttctccatgcaaatctactcagcctaagccaagccagccctggcctccccagtctaagccttctcagcccagaccccctcaacctaagtcatcctcaaccaatccttcacaagctaaggcacaccactcaaaagcagggcagaagaggggagggaagcattaaagagctaactccagagatctataaagcatatcctttacccaggccattcctatcatatagtaagcagaagagttgccatgaaagtaaaagactactgtcattagcatgtaaaacaaagaaagatatacatgaccgaattggatatctttgtttgtttgtttgagacagagtttcactcttgttgcccaggctggagtgcaatggcacgatctcggctcaccgcaacctctgcttcctggcttaaagtgattctcctgcctcagcctctcgagtagctgggattacaggcatgcaccaccacacccagctaattttgtatttttagtagaggcagggtttctccatgttggtcaggctggtcttgaactcccgacctcaggtgatccgcccacctaggcctctcaaagtgttgggattacgtgtgtaagccacagtgcccagcccgaattggatatctttaagatatctgtaagtgttatatccctaaccaagaagaaaaatatgaaaataattaagactagaatcaagcagtagataattgaatccaatcttgggtattattagataatgtataacttgcacccagggaatgggggtctatgagacaaccccacttggagaagaatggggttagggtctctaattgcaaagtgactgtacaataggacgaaagttgcctctgtgtctgagaaagtatcttagttgttggctgctccagaggtatctttgtcaaaagcttctggttcaatatcagccactgagcagataaccctgcttatttggtgtggttaaatcaactagcttctgctaatagccccaatttgcttgaatgggaaaactctctcatttgacccttataggtagaaataatgaattaacaaccaataaaattaatcatttggcattaaaaaaaaaaaaaaaaaaaaaaaaa

SEQ ID NO: 56279 - DNA, 7984 bp, Homo Sapiens
cggcccggcggtaggcggtggcgactctgcccgctcccgtttcggcgcggtgaccgagcgcccgggaggctcgaggaccgcatcgtgtgccgttgcgccaagcccggtcctgcgccgccatggccccagtgcagctggagaaccaccagctggtcccgcccggaggcggcggcgggggcagcggcggacccccgtcagccccagcccctcctcccccgggagccgccgtggcggcggccgctgcagctgcggctagcccgggctaccggctgagcaccctcattgaatttctgctgcaccgggcctactcggagcttatggtgttgacggacctactgccaaggaaatctgatgtggaaaggaaaatagaaatagtgcagtttgctagccggacacgccaactcttcgttcgattattagctttagtgaaatgggctaataatgctggcaaagtggaaaaatgtgcgatgatttcaagctttttagatcagcaagccatcctgtttgtggacactgctgatcgcctggcctcgttagctagagatgctctggtccatgcacgcctgcctagttttgccatcccatatgccattgatgtactaactactggatcttacccacggctgccaacctgcattagggataaaattattcctccagacccaattaccaaaattgaaaaacaagccacactccatcagctgaatcagattcttagacatcggcttgtaaccacagatcttcctcctcagttagcaaatcttacagttgcaaatggccgggtgaagtttcgtgttgaaggagaatttgaagccaccttgactgtgatgggagatgaccctgatgttccatggcgtcttctcaagctagaaattctagttgaggataaggaaacaggagatgggcgagctttggttcatagcatgcaaatcagcttcatccatcaactggtgcagtctaggctctttgctgatgagaaacctcttcaggatatgtacaactgcctacattctttctgtttatcacttcagttagaagtgttacattcccaaactctaatgttaatccgagaacggtggggagaccttgtgcaggtggaaaggtatcatgctggaaagtgcctctccctttcagtttggaatcaacaggttcttgggagaaaaactggaacagcatctgttcacaaagttacaattaaaattgatgagaatgatgtctccaagcctttacagatttttcacgatcctcctttgccagcttctgattccaaattagtagaaagagccatgaagatcgaccacttatcaatagaaaaactcctgattgacagtgtccatgcaagagctcatcagaagctccaagaactgaaggccattcttagaggcttcaatgccaatgaaaactcttccatagagactgcactcccagctcttgttgttcccatcttggagccctgtggtaattcagagtgtctgcacatttttgtagatttacattctggaatgtttcaattgatgctttatggacttgaccaggccactctggatgacatggagaagtctgtgaatgatgatatgaaacgaatcataccctggattcagcaacttaagttttggcttggacaacagcgttgcaagcagtctataaaacatctgcctacgataagcagtgaaacattgcagctttccaattactcaactcatcctattggaaacctttctaagaataaactgttcattaaacttacccgccttccacaatactacattgttgtggagatgttggaggttcccaataaacccacacaactgtcgtacaagtactactttatgtctgtgaatgctgcagatcgtgaagacagccctgcaatggcattgctgctgcagcagttcaaggaaaacattcaggacttggtttttcgtacaaaaaccgggaaacagaccagaaccaatgccaagcgcaagttgtctgatgatccatgtccagtagaatccaagaaaacaaaacgagcaggagaaatgtgtgccttcaataaagttttagcccacttcgtcgctatgtgtgatacaaatatgccatttgtaggacttcggttggagttgtccaatctggagattccacatcaaggagtgcaagtggaaggtgatggcttcagccatgcaattcgcttattaaaaattcctccctgtaagggtataactgaggaaacccaaaaggctctggaccgctctcttcttgattgcactttccgattacaaggtagaaataaccgcacttgggtagcagagttagtgtttgcaaattgtccacttaatggcacttctactagggagcaaggaccatcccggcacgtttacctgacatatgaaaatctgttgtctgagcctgttggtggtagaaaggtggttgaaatgtttcttaatgactggaatagcattgcacgattatatgagtgtgtgttggaatttgcacgttctctaccagacatacctgctcatctaaatattttctcagaagttcgtgtttataattaccgaaaacttatcttgtgttatggaaccaccaagggaagctcaattagtatccaatggaattcgatccatcaaaaattccacatttctttgggaactgttggcccaaactcaggttgcagtaactgtcacaataccattctccatcagcttcaagaaatgttcaacaaaacaccaaatgtggttcagttattacaggtactgtttgatactcaggctccattaaatgccatcaacaaactccccactgtgccgatgttgggcttgacccagagaaccaatactgcctaccagtgcttctccattctgccacagtcgtccacccacatcagactggccttcaggaacatgtattgcattgatatatactgccggagtcgaggtgttgtggcaatacgggatggtgcctatagtctttttgataacagcaaactagttgaaggtttctatcctgcaccaggactaaagacgttcctgaatatgtttgttgacagcaatcaggatgctcgaagaaggtctgtaaatgaggacgataatcccccttctcctataggaggagatatgatggattctttaatatcgcagctccagccaccaccccagcaacagccatttccaaagcagccaggaacatcaggtgcttatcctcttacttcaccccctacatcttatcatagcacagtcaatcagtctccctcaatgatgcacacacagtctccaggaaatctgcatgctgccagctcccccagtggggctttgagagccccatcaccagcgtcatttgttccaactcctcccccatcctcgcatggaatctcaataggaccaggggccagttttgctagtccacatggaactcttgaccctagttccccatacactatggtgtcaccaagtggacgagcagggaactggccaggatctcctcaagtgtctggcccctcaccagcagcacgcatgcctggaatgtcaccagccaacccctcactacattctccggttccagatgcttctcattcccctcgagctggaacaagttctcaaacaatgccaacaaacatgcctccacctcgtaaactacctcagcgctcttgggcggcatccatacctaccatcctcactcacagtgccttgaacattttactgctgccctctccaactccaggccttgtgcccggcctggcaggtagttacctttgttctccacttgagagattccttggatcagtcatcatgagacgacatcttcaaagaattattcaacaagaaacgctgcagctgataaattctaatgaacccggagtgatcatgtttaagactgatgcactgaaatgcagagtagctcttagtcccaaaaccaaccaaacgcttcagctaaaagtgacacctgaaaatgcaggacagtggaaacctgatgaacttcaagttttggagaaattctttgaaacaagagttgcaggaccaccatttaaagctaatacgttaatagccttcaccaagctattaggagctcctacacacatcctcagggattgtgtgcacattatgaagctggagctgttccctgaccaagcaacacagctaaaatggaatgttcagttttgcctgacgatccctcccagcgcgccgccgattgcacctcctgggacgcctgctgtggtgctgaaatccaaaatgctattttttcttcaactaactcagaaaacatcggtccctccccaagaacctgttagtattatagttccaatcatttatgacatggcttcaggtacaacccagcaggcagacattcccagacagcagaactcttctgttgctgctcccatgatggtcagcaacattctgaagaggtttgcagagatgaatccaccacgacaaggtgaatgcacaatatttgcagctgttcgtgatttaatggctaatcttacactgccccctggtgggcgtccatagacactattgtttttaaaccaggaaggctgacagatgagacaacaaaaaaaatctgaattcagccttcagtttaaaaaaggaaaaggactttttttttaaactttaagagctaaatattctaaactggcaaaaattttcagggtgcacttctttcatcaaaatgatcatccatcttttgtataatgaacttgtatagtgtgtttaaatgggacacatttcaaaggaaataaatcagtgtccgtttgccagtaataaatttaatattctgttttatactataaagttatgaaaatgccaaacttgtttatttaattgttttcttatgttttgggtgtaatagtccttttttggtttttgttttgttttttaaggcaggtctgtcatttttgaatactgtaaaactgtgataaactttatattgaagctgtattttaatatgaccgctttgaatccttacatgaaatgttctgggagttgttataaacacaccccaaggaagcaatatttaataaaactaggtcaaaaacaaaacaaaacagtgacactcacttgtgtgtatataaactctagagacatcttaggccctcccttcatctttaacctggtggatggagccagttattaatttataataatacatgtctgaaatttgaccaaaaacatcttctttatgtcaaggttaatatattttcttcagacattcctaacttgactagtggttaacatttagcaccttggttgtctttcaatatataggatttgggtgaaaaataaggaacttagtctttgagaagggacagtatgtggttcgtattgatcaaggatcccaaataatgcaatcattctcatctgttgaggatgtgggaacttttctgtcaggaaaatttagtttacagaatacttctgcatacaacattaattaggaaacaaagaactttaatgctgtacctctgcatgaagtttctgtgagctttctttatcttgcttaacttatcctcctttccttccccaccaaaattgggattgttctaaacaatttcaatttaattcattgtcaacaaaacgatagaatgttttgcttggaagaaacctggtccattcccctcattgtgaagaatcccgaatcctgggcctgtccagggtcaaatggagtttttggtattaatacatctctgcagggtttctttttggagcactgtgctgtctttcctagtcagtcagggacttttttaagcttcaaagaacatggtctgatgcaaaggtcttctaccgacttcatggtatttaggaaaaatttttaagtgataataccatgccgagttacctggtcactgtaatactggttctccattaaaatgtagatgctttgtctaattccacttcaagatgatttaattgagcttctataactatcaactatcaaattctagtttcaagtatctcactgtacctatatcatatctgttctcaactttgtttgattctccactcattttcaatcagagttgaagccttctttgcctttcttctttgtcttatttctgccttcatctcccacttctcacccaactctgccactgttcaggagcagttgactaaacttttatccttcctttaacttaatctttttatccttctgtttttagttcttacagtggtaatcacatcagtttggcaatctaagatgtctttatcaagggtcagcccttttctatttggagctgaatcttttctttcatgtagaaatctacatgtatatacaagaaatgtatttttatctgcaggataatattgtttcaaataattttattaagagttaactttttaggtattttcccttttaatgtggttttgaaatgttaattgcatttttacacatgatgcattcagtggacactcttttttcctaattataactcatctctgaatgcattgtgccaatcaagagtaagataggattcagtgcgcaaaatttgcttttgatgcttattaagagtaaacccatgaatttgaatttttatattatgcttggtacttggaattgatatataccttattaaagcttgaaaacatttagcatttgaatagtaagtttcatcacaaatcatgtcttttgcctcttttgttacccaggttcgatcaaggggactggatgcccaagtgattttctctaataatcgggttgggacttaactttaaggtgttttcaatgtgattttagtatttacagtaataaataaaatttatacaaagtttcagagaactaccaactctctagttaattttgatgaagatgttttcattaatagtctggtttagtattaatttaaccttgaaataagaaattggtcctgatttgccaccttcatttttccatctgctgaaatgccatttcagaatgtataaaagtactttcagaattagaagaaaagtgagagcttcagcagaacgtgtcaagtcgctaataacaggagtcgaaccttatgtttgaaaattaactgagtgagttaagtgcaagcataaactaaaatttatatgactttgaatttaagaaccactaataactgtgttctaattaacacagtaatctgttcagccaaaggatactaacagccattctttggactgtggttaatttgataacttcaagaagttataactttgctaccctggattctgatgcaatttcaatataaaaagttgttcctttcatagtttttccccccaaaagaagtgcctattacattttaccttaatgtttatttatcatccaagtgttcttgatataaaatcagtatacagaaaattttaagagaacttacattcaagggacatagagggaaaatgttaatgtgtatttcattgtttcttgtggaatttttttttcattcggtttgagaatggacagtgtgtctaaggatgtgatttaaatttacttaggatggatttagcattgaggttattaagacaaagttagcagaggccagccagcactgtgctgcacaactccaggaactccatggtatgctcacaattttctgcaagttgcctccacttccaagtggccagtgatttgttaaaataccttgcccaagaatataactgattgatgaaagggcatatttaggtcaatataaaataatagcaagtatttactgagagcttactgtgtgctaggcattttcttaatatttcaatgtgtatttaatcctcacaacaacccaatgtggtaggttattgatatcctcttcttaaaaatgagtaaatggaggcccagagaaatgtaatttgcctgagatcaaattaaggttgcttaagatcaaactgctaagaaggggcagtttgagtctgagctagtgctcctaaacactggacatttttgctgtgaaccacagtcgggaaggtttaatgtttagactctttcctcagaggcttttaactacacacaattttgacatgttttccaagctcagaaagctcattaaaaacaactaaaactg

SEQ ID NO: 56280 - DNA, 10182 bp, Homo Sapiens; identical to SEQ ID NO: 23188

SEQ ID NO: 56281 - DNA, 6468 bp, Homo Sapiens
gagatcagcgctgggacggaacccgggttcctctcgaaccgggattgtgacgcttttggcctggctggccgctgttttctgtcccactttttactcgggcctgcgtccgctgccgccgtccctcagtttgcccccggaggaggcagggcggccgtgccttctgccgtgcgcccgcgtggctgccaccgcccctccgaatcctccggggccgcagaggggttcgctacggagggaggtgggggccttcgggaggaggaggcggaggaggcggaggaggagggaaggaagatggcggccgtggaactagagtggatcccagagactctctataacaccgccatctccgctgtcgtggacaactacatccgctcccgccgagacatccgctccttgcccgagaacatccagtttgatgtttactacaagctttaccaacagggacgcttatgtcaactgggcagtgaattttgtgaattggaagtttttgctaaagtactgagagctttggataaaagacatttgcttcatcattgttttcaggctttgatggatcatggtgttaaagttgcttcagtcttggcctactcattcagtaggcggtgctcttatatagcagaatcagatgctgcagtaaaggaaaaagccattcaggttggctttgttttaggtggctttctttcagatgcaggctggtacagtgatgctgagaaagtttttctgtcctgccttcagttgtgtactctacacgatgagatgcttcattggtttcgtgcagtagaatgttgtgtgaggttgcttcatgtgcgaaatggaaactgcaaatatcatttgggtgaagaaacatttaaattagctcagacatatatggataaactatcaaaacatggccagcaagcaaataaagctgcactctatggagaactgtgtgcactcctatttgcaaaaagtcactatgatgaggcatacaaatggtgcatcgaggcaatgaaagaaattacagcaggcttaccagtgaaagttgtggtggatgtcttaagacaagcttctaaggcttgtgtagtaaaacgtgaatttaagaaggcagaacagttaattaaacatgcagtgtatttggcacgggatcattttggatccaaacacccaaaatattctgatacactgctagattatgggttctacttactcaatgtagataatatctgtcagtctgttgcaatttatcaggcagcccttgacattagacagtcagtgtttggtggcaaaaatatccacgtagcaacagctcatgaagatttggcctactcttcttatgtccaccagtatagctctgggaaatttgacaatgcactatttcatgcagaaagagctattggtatcattacccacatcctacctgaagatcatcttcttttggcttcttcaaagagggtgaaagcacttattttagaggagattgcaattgattgtcataataaggaaactgaacagaggctgcttcaagaagctcatgatttgcacctgtcttcactccaactagctaaaaaagcttttggggaatttaatgtacagactgcaaaacactatggaaaccttggaagactttatcagtcaatgagaaaatttaaggaagctgaagaaatgcacatcaaagcaattcagattaaagaacaacttcttggtcaagaagattatgaagtagccctttcagtgggacatctggcttctttatataattatgacatgaatcagtatgaaaatgctgagaaactttatttgcgatctatagcaattgggaagaaactttttggtgagggctacagtggactagaatatgattatcgaggtctcattaaactttacaactccattggaaattacgagaaagtgtttgaatatcacaatgttctgtctaactggaaccggttgcgagatcggcaatattcagtgacagatgctcttgaagatgtcagcaccagcccccagtccactgaagaagtggtgcagtccttcctgatttctcagaatgtcgagggaccgagctgctgagggaggacctcagttaaccaattaccttttcccggattccagggaattcatactgtgaaatcaaaaccatgttgttttggggggctggaatttgcattgaaacactggtccagtccattgaagaccctattttgggtgatccctatcttgcagaatgtctgtaggaataagcatatattcagttatattcagcatgtaccgcatgtgtaagtagtctggcccacattttcaacctagtagaacaaacaacaggaaatcttttttttgttgtttttaaaaaattcattttgcagaaagcctgaaagaaaaaaaatacccctaaataaaactatttaagagtttaaaagagttgcattcttattatgtaaggatgattttaacaactttttaatatgtaattcttccatgtggaggtattcaatactgtagtgtaaagaaattttatgcggaaaatctttatatgcagtatagaaaagttaacacaagtactaataaaagagggacatcccgacttacgtttttctaccttgcccagataagtggatacaaccactctatattacaaggaaaggactgtcagattcatctgaactggaccagtgttgatctgtaatgtaatagaaaatctgatagaccagcacttctgacttttttttttttggtacaacaatgcaagatgctctgatagcatttgctaacaggaccaggaggatctaaaaaggaccagcctaatgtagaaggtggttatttggaccagaggctttagattattattttagatcctacatatacttttatcagtagaatgatttcatttagatgtataatgaaaaaggataatgcaaaaattatgtaatagataccaaattagggaagtttggcaatttcaatggcatatttttagtcaaggtacacagatggcagtgccataagcaagtctataaatatcggctgcagccatccccctcattttaaatgttgccctaataatcaatgcagttaacaagtatattggctgtgtgtcatgaaatagttcatgttcagatggaaatgttaggttactgtatggtttatggagattaatgaaaatgaatgcccaaaaataagtcttagaaaatcctccatttttatggtaaatagtaatacaactaggtcatttcatttgaaatctaggagtcaaatggaaagatcccctaataatacacctatttcactaacttgtctttctgtttattgggttttgatttgattttttgtaagccagtcaggttatttaatgatgaggtaataatcaaatttaagaatttgtgacatgtagcaattcaagaaacaaaaaggtattttgctgttacctcaattcttactgtagtagcccatctgatgcttctatagttaagaatctgggttccccccctattttcaggggttcatgacttggctgttaaagatgttgctcctagctaatgcttggagtagtctgtgggtgaatggatgtgtgttgaattttagttttcttttaacatgcatgttgggtgagaggggaaaaaaatctaagctgtctgccacattgagtacagaaaagttgtagatttcaaattttattaatattttaagcacttttttgaacttcccaaccttgtttgaagctgttatttgcagtcctattagttttgagccattgcatttaagttccctaggagggggttggttgggggatgtactgaaagagatgaagcaaacccacaccctaagatggtaactgtgtgatttagaaacctgagtttactcctcaaatcgaattattttctttttaaattttggaaagagtaaattgacgtacttgcagtttatgaagctgccccccacccctcagttaattgcagtctaatgtcaagaggcacttctttattaattaccaaatagtctttgtgaccaaggactaacatttttaagttactcagctctatcctcatgggcctatatatttaatacctccaaagatattttcaggataggctttgtatacttttattggttatttagaatccagtggtatgtttgtggtataggaatgtcatggtaaattgtttttcaataaatattttgaaacatgtttccatatgaagtttttttttcaatctgtattttttggttttgtgcacatacagcatttcctaggataaaaataaacaaatgacttacagcctcatcctccctaactccatttgaactcaacttagctcacactcagtgataaaacaacatggtatgtagaagcctaggatcacagggtgataatgtcaattggcagccagttgtgtttttttgaaacatcattattggcagtttctccttatcaccactgctttaatgtagtttttttgtaaatccatatactttaatgcatacactctagcttaagaaaacattgccattttggttagggatatgacttaatgtgctattatttctggttctaatgaagaataataccctatgactttaagtgtaagattcatcctttaagtagggatgtttaggataagttagatgtgtgccactatgatttattgggtttcttaaaaatcttgaagaaaataataaaatttatctcacaataagttaacttgcgcaaactttttacatatggtgaggtgcgtaaggaagccctggccaacttaaagatttttctggaggttcagcaaagttatgttaaattaggggcctttggtctcatccttctctgactcttctacccagtcttttcctaaagttcggtgctactccagttgggtgcatcagggagctccgtcagcactcgcatgtgtcgctcaggtggccactcatgcctgcattccatttaatagagtcaattggaatttttagagcataatctttatggatcctcaaagctgactttgccaaagggattgagacccttactaccatcaaatctctgtctctgcttggttaaaaattggctcactattgctttgtagtaacccctgcccaggtattttttcacttgtgaaaataatttgagaaagacctttgttcctagcctgttgggaaaagtttataattttatgaaaattaagtacagaggctgcgatcttagaaataatgaaggtgccatttggctgctccttaatagtgcagacagaaaactgcagtgaacacatgccaaaacatgattgaagcctttggctgaaactttatacatagaaataatgatttgctcataacaggtatcattaactgccactttttatgttttccctagaatttgtagccttgctgcttgcttttcttctgggtggcaaagttactactggaaaaacactataagtacaaagtttttggggttttatctttgctttagaagtggatgtgtacttcacctcttggctgtggaggaacttagttgccaggaaattttttttttttttttcagacggagtttcgctcttgttgcccaggctgggagggcaatggcaccgtcttggctcactgcaacctccgcctcccgggttccagcgattctcctgcctcagccttccgagtagctgggattacaggctcctgccaccacgcctggctaggaaattttttgttgttaatatgacatttggattaatctccagcttcaacagtacttcttttgtccataaatctcaggaatgttttaggcagaaaactggttttaccctgttgataatcagaaggagtgtgctttaggatttattgcataatactattctttaattgcaatcctaggtatctatagcatgagtggccttagtgagtttgttgaagtgcacatgtttttcaagagtaaaatttaagattaaaaatatatcctatatatagatatctagaaaacttggtttgtggtgcacagttaagtgttggatcactaaataaccattgcaggtaccgtttgtgtaacattactcatttctgtatattccttttatgggaagatattttgccatggtaactaaaacttttcagttctacttttatgatgtgaatgaatgctacgttttattaaatattaccaggtcagtactatttttatactttattaagcaacaggggattttagtttaataggctcaaaataaaaagttcttaatggaacagttaaaaacaaaacactaacaatctttacgtgaaaatccccactaatagtgccacaataatttctatagaaatatctaaggtcattaaatagatttttgaagacggttcttcattgtgtcaggatgacctttcatatcattctcaccaacttgtagtgcccaccgttatttgtaactattaaaccatactaagtatgtttgtaaccagcattgtgatatattctgtacttgtattgctaaaaatgaattattgacctaataaatatagtgttcctgc

SEQ ID NO: 56282 - DNA, 7241 bp, Homo Sapiens
ggaaagaagtggaataattaggaacctagggtggggtagggtagcaggacatttcaaacattaatgagcatatgagattccaggtcttgttaaaatgcaaattctgattcagctggtaggtgaggtctgagattgtgcatttctaacaagcactcagataatcttaaggctgttggccccagggtcacacttatagtgattttctagaacccagttggggaagtgaatcttgggcaggagaaatacacacctcttgcattgagtttggagatctcatctgatataactttttaagaaagaaaaataattttccaaatatccaattgataagctttcccactaagtggctttcccactaagtggctgcgttatgaaaattgcttcactttgaaacttctggtcttggtaatatagaatttctgtgttctcacagtgcttgattgagaatatgatattgagattatggcataaaatatagtggctgtacaaaaaaaaatacattattaggatctctaacaattatgtaaaagtcattgcttcatgggtagagctcaaactttggtgtgagacctggttttattcttggcacttactctgagttgtcttaggcaaattaataccttaagcaaaaatattctcatgtacattttacatgagaattataaatgaagtacataaagtccagcagtcacaaatgttatctattattaccatcgtcctaagactgcaatcagctatagtgaaagtagtctcaaagattgtttcataaatcatcagattcacctaattttctaaagaatttaaataaggagatggaatgaatagattgcattttgtttccatgcacaggggaactgtgcatatttcttctgtgactcggaaatggtttaacttttaaaaatcccaaaatagctgaagttagcagacatgcaatttaccaaggatgattggaatttttatctttcctgtaataatactatacccaagcacactgctcatgaggaaaacatttttatgtgaatcttttactcttgggggcaaagaatgctgtttttctttttgataactatgtttatagaatctaaatcaccctgagcaattatttcaacatctaaagttattattaccattcatgtttcatttatagctatttgaattttgatgaatttcaatatggtgctacagtgatagggcaagtgcaaataagttcaatatatgggtacggtctaaagctattttaatttttttattacaactgctatgaagaaaattaggatatgccatattttcacgttttacagttggatgtcctatgatgttctcttccagagaacagagctcggagctctggaaatttggaggcaactgatatgtgctcatgtctgcatctgtgtgggttggctgtatctcagggacagagtctgcagcaaaaaagatataattttgaggactgaacaaaattcaggaaggactattctcattaaggcagtaacagagaagaattttgaaacaaaagattttcgagcctctctagaaaatggtgttctgctgtgtgatttgattaataagcttaaacctggcgtcattaagaagatcaatagactgtctacaccaatagcaggattggataatataaacgttttcttgaaagcttgtgaacagattggattgaaagaagcccagcttttccatcctggagatctacaggatttatcaaatcgagtcactgtcaagcaagaagagactgacaggagagtgaaaaatgttttgataacattgtactggctgggaagaaaagcacaaagcaacccgtactataatggtccccatcttaatttgaaagcgtttgagaatcttttaggacaagcactgacgaaggcactcgaagactccagcttcctgaaaagaagtggcagggacagtggctacggtgacatctggtgtcctgaacgtggagaatttcttgctcctccaaggcaccataagagagaagattcctttgaaagcttggactctttgggctcgaggtcattgacaagctgctcctctgatatcacgttgagaggggggcgtgaaggttttgaaagtgacacagattcggaatttacattcaagatgcaggattataataaagatgatatgtcgtatcgaaggatttcggctgttgagccaaagactgcgttacccttcaatcgttttttacccaacaaaagtagacagccatcctatgtaccagcacctctgagaaagaaaaagccagacaaacatgaggataacagaagaagttgggcaagcccggtttatacagaagcagatggaacattttcaagactctttcaaaagatttatggtgagaatgggagtaagtccatgagtgatgtcagcgcagaagatgttcaaaacttgcgtcagctgcgttacgaggagatgcagaaaataaaatcacaattaaaagaacaagatcagaaatggcaggatgaccttgcaaaatggaaagatcgtcgaaaaagttacacttcagatctgcagaagaaaaaagaagagagagaagaaattgaaaagcaggcacttgagaagtctaagagaagctctaagacgtttaaggaaatgctgcaggacagggaatcccaaaatcaaaagtctacagttccgtcaagaaggagaatgtattcttttgatgatgtgctggaggaaggaaagcgaccccctacaatgactgtgtcagaagcaagttaccagagtgagagagtagaagagaagggagcaacttatccttcagaaattcccaaagaagattctaccacttttgcaaaaagagaggaccgtgtaacaactgaaattcagcttccttctcaaagtcctgtggaagaacaaagcccagcctctttgtcttctctgcgttcacggagcacacaaatggaatcaactcgtgtttcagcttctctccccagaagttaccggaaaactgatacagtcaggttaacatctgtggtcacaccaagaccctttggctctcagacaaggggaatctcatcactccccagatcttacacgatggatgatgcttggaagtataatggagatgttgaagacattaagagaactccaaacaatgtggtcagcacccctgcaccaagcccggacgcaagccaactggcttcaagcttatctagccagaaagaggtagcagcaacagaagaagatgtgacaaggctgccctctcctacatcccccttctcatctctttcccaagaccaggctgccacttctaaagccacattgtcttccacatctggtcttgatttaatgtctgaatctggagaaggggaaatctccccacaaagagaagtctcaagatcccaggatcagttcagtgatatgagaatcagcataaaccagacgcctgggaagagtcttgactttgggtttacaataaaatgggatattcctgggatcttcgtagcatcagttgaagcaggtagcccagcagaattttctcagctacaagtagatgatgaaattattgctattaacaacaccaagttttcatataacgattcaaaagagtgggaggaagccatggctaaggctcaagaaactggacacctagtgatggatgtgaggcgctatggaaaggctggttcacctgaaacaaagtggattgatgcaacttctggaatttacaactcagaaaaatcttcaaatctatctgtaacaactgatttctccgaaagccttcagagttctaatattgaatccaaagaaatcaatggaattcatgatgaaagcaatgcttttgaatcaaaagcatctgaatccatttctttgaaaaacttaaaaaggcgatcacaattttttgaacaaggaagctctgattcggtggttcctgatcttccagttccaaccatcagtgccccgagtcgctgggtgtgggatcaagaggaggagcggaagcggcaggagaggtggcagaaggagcaggaccgcctactgcaggaaaaatatcaacgtgagcaggagaaactgagggaagagtggcaaagggccaaacaggaggcagagagagagaattccaagtacttggatgaggaactgatggtcctaagctcaaacagcatgtctctgaccacacgggagccctctcttgccacctgggaagctacctggagtgaagggtccaagtcttcagacagagaaggaacccgagcaggagaagaggagaggagacagccacaagaggaagttgttcatgaggaccaaggaaagaagccgcaggatcagcttgttattgagagagagaggaaatgggagcaacagcttcaggaagagcaagagcaaaagcggcttcaggctgaggctgaggagcagaagcgtcctgcggaggagcagaagcgccaggcagagatagagcgggaaacatcagtcagaatataccagtacaggaggcctgttgattcctatgatataccaaagacagaagaagcatcttcaggttttcttcctggtgacaggaataaatccagatctactactgaactggatgattactccacaaataaaaatggaaacaataaatatttagaccaaattgggaacatgacctcttcacagaggagatccaagaaagaacaagtaccatcaggagcagaattggagaggcaacaaatccttcaggaaatgaggaagagaacaccccttcacaatgacaacagctggatccgacagcgcagtgccagtgtcaacaaagagcctgttagtcttcctgggatcatgagaagaggcgaatctttagataacctggactccccccgatccaattcttggagacagcctccttggctcaatcagcccacaggattctatgcttcttcctctgtgcaagactttagtcgcccaccacctcagctggtgtccacatcaaaccgtgcctacatgcggaacccctcctccagcgtgcccccaccttcagctggctccgtgaagacctccaccacaggtgtggccaccacacagtcccccaccccgagaagccattccccttcagcttcacagtcaggctctcagctgcgtaacaggtcagtcagtgggaagcgcatatgctcctactgcaataacattctgggcaaaggagccgccatgatcatcgagtccctgggtctttgttatcatttgcattgttttaagtgtgttgcctgtgagtgtgacctcggaggctcttcctcaggagctgaagtcaggatcagaaaccaccaactgtactgcaacgactgctatctcagattcaaatctggacggccaaccgccatgtgatgtaagcctccatacgaaagcactgttgcagatagaagaagaggtggttgctgctcatgtagatctataaatatgtgttgtatgtcttttttgctttttttttaaaaaaaagaataactttttttgcctctttagattacatagaagcattgtagtcttggtagaaccagtatttttgttgtttatttataaggtaattgtgtgtggggaaaagtgcagtatttacctgttgaattcagcatcttgagagcacaagggaaaaaataagaacctacgaatatttttgaggcagataatgatctagtttgactttctagttagtggtgttttgaagagggtattttattgttttttaaaaaaaggttcttaaacattatttgaaatagttaatataaatacataattgcatttgctctgtttattgtaatgtattctaaattaatgcagaaccatatggaaaatttcattaaaatctatccccaaatgtgctttctgtatccttccttctacctattattctgatttttaaaaatgcagttaatgtaccatttatttgcttgatgaagggagctctattttctttaccagaaatgttgctaagtaattcccaatagaaagctgcttattttcattaatgaaaaataaccatggtttgtatactagaagtcttcttcagaaactggtgagcctttctgttcaattgcatttgtaaataaacttgctgatgcatttaacgagtgggtcgtctttttcttaggtgtatgtgtctgacctcaggccttttagccatatttcagtatgtggccttttttgatgttatgttttatccagtagctttactaaggtataattgatgtaataaactgcatatatttaaagtgtatactttgacaaattttgacatggtgtataccttcgaaactatgccacagtctggatgtgtttactgaaacattttaataaggaagtttatttttgataaagttatgtttttggatacaatatatttgtatggtgagagtgatgaattgttggatcatttgaataaaatcttttactaaccccatgataaaaggagaagacaacagtgagcttagaatatctataaagcaaaaaatgtagtctcttgtttaaaaaatctggagcgggaatgcaaggatacaaaactttagcatgctttgagcaaaaatttaaacttactggaatcttttataataatgtaagtggaatggaggattctaggaactgagaactgtattggaataggttcaaaatatgtaagaaatgctaatgtgggagataaaaattttatttagtacttattctgattattattaaagtaataatgtgttccttgaggataacttgtcaaatgccccaaagcataaagaatataattctgaatcccaaattccaaagacaagaactctgtgtttgaattcattctgcatataattatttataagtatagattgtgaatttttccatgttcttaaaattatttttatcttttttcatggttgcatagtgctccattgtttggccttggtaatatttagttgataattccattactgtgtatttttcacttgtttctaagatcaaacattttaatatgtgcatgttatatataaatatgtaaattctgtgatactctatgatcatctctttctttatattattttcatagacatgaaatagttgctcagagattatgcattttaagacactcatagtatatattgccaaagtggtttccagaaaggcactgctggcttcgactcctataagcagcacgtgggcttgttcatctcactgcatgtttatgaagatacagttcttttgccttgttctctgcctgatgtgtatgcagaggcagccctcaatatgcagtggttgaataaatgaatgaagaaaccactaaaaaaaaa

SEQ ID NO: 56283 - DNA, 2616 bp, Homo Sapiens
aagctcagctttctgtttagttgtgagattgcatactcaagaagaggaggaacataaaatacgtgatgtcttctcttaagtcaatcgcaggccactctgctgagcatcttctcccaggagtaccagaaacacattaaaagaacacatgccaaacatcatacttcggaagcaattgaaagttattaccagaggtacgtgaatggagtggtgaaaaatggagctgccccagtgctcctggacctggccaatgaggtggactatgcgccctcattaatggctcggcttatactggagaggtttctacaggaacacgaggaaactccaccctccaagtctattataaatagtatgctacgggacccttctcagattccagatggagttctagcaaatcaggtctatcagtgcattgtgaacgactgctgttacggaccactagtggactgcatcaagcatgccattggtcatgagcatgaggtcctgctgagagacttgcttctagagaaaaacctgtccttcctagatgaagatcagcttcgtgcaaagggttatgacaaaacaccagacttcattttacaagtaccagttgctgtagaagggcacataattcactggattgaaagcaaagcctcatttggtgatgaatgtagccaccacgcctacctgcatgaccagttctggagctactggaatagatttgggccaggcttagtcatctattggtatggatttatccaggagctggactgcaaccgggaaaggggcatcctgctcaaagcctgtttccccacgaacattgtcaccttatgccacagcatagcttgaccctgaagatcctggaagagaagctgggaggaaaaggtgaatccggaagcaattttactttcctgcactgtaagatcctggcaacatctgccctgaacttcagctgaactcttgctgcccgtagtcacaccactacctctttagacaaacatatcaagagtttctgttttccttcatcccttgctgatgtgaacagccaagaactacagacacaacccactcattatcagcatttctgtctctgtcaaacaattagtttatagatagtcataatctttctttcttccggatggtttatccttgtatgctgaacaaaagaaaaaatgtgaagactgaaaggtgtgatttttcaattctcctcccagttaccgaatcaccctcttatttttttttccctaagcctccgttcactgtctctccctctccctttctcttcatgtgcactcacagagacccagcattgcattaccatcgtggaataatctagcgcaaacctaggaaagctgaagccacaaagtccaaagccacctttgtactcacctgcagagctccagaagaccttgatggcagcctgcctatgctgtgtgtttgctatattcaatctttacggcttcctgacttctgtgacagtaagccaagtgcaaaaatacacttgatgagaatttcctcttttaataatgttatttgaacaccacatattttagatttatcttatttgaaagtattagttccattgtgcctggaaaccacactcctttagattgggggccgagaggcgacaacccaacattgaggagagtttatttttaaacatggctagttgtcagtatgtacgtgagctagtatttttatgagtcgagttttttaaaggcacattctgtatactgcttagtatatgcattttataccatgtaattataaaacactcgagtaagttcagcattagaaatgtttagctttgtatgaactgagtgtgccagaaataaacctggagcaatttttaaataagcaaaataaaggagatttttctatttgttcactttaatttattcacttttgtgtacttttatgtactgcaaatcagatttcagtctaaagcgaaacatcagtaagttaataataaacctatctttcgggaagttgaatattaatctgtacccaaaacgtatttagtaaaatatttgcccccgccaccctgccatgctgacataacaacttttataatgttgaatagatgatatgggaaatactaataacaacaatgtaatttttgcagacagctttaacttatatacattgcttgatttttttcaaaagactaaatatgtcatttatactttgtttattttctaccaaagaaggtttgtaaaaatatgcctgctgcttttccttttgaaggacacaaacctggtcccaacatgtgtggattttaactctgagtggggtgcattaaatcaaaagagagaggcagaagatgaaatgctaaagaagggtcaggcaaacttctgtttcagtataaaattcatcatgcaggcttctgagtgaaatagaatgatttgaaaccactactgtattgcctggatacacacacacacacacacacactttatacaaaaatgttaaaagcaggtttcctggcatgttctaaactgttttttctttaggaataaattacatttatctgcacagatgttgaaaatcctgttaaacccttgtcaaggatttgtttattttacattaaacaaatttattatgatgaacgtgaacaaataaattaaaaaataaaaaagg

SEQ ID NO: 56284 - DNA, 5014 bp, Homo Sapiens
gagtggagttctggaggaatgtttaccagacacagagcccagagggacagcgcccagagcccagatagagagacacggcctcactggctcagcaccagggtccccttccccctcctcagctccctccctggcccctttaagaaagagctgatcctctcctctcttgagttaacccctgattgtccaggtggcccctggctctggcctggtgggcggaggcaaagggggagccaggggcggagaaagggttgcccaagtctgggagtgagggaaggaggcaggggtgctgagaaggcggctgctgggcagagccggtggcaagggcctcccctgccgctgtgccaggcaggcagtgccaaatccggggagcctggagctggggggagggccggggacagcccggccctgccccctcccccgctgggagcccagcaacttctgaggaaagtttggcacccatggcgtggcggtgccccaggatgggcagggtcccgctggcctggtgcttggcgctgtgcggctgggcgtgcatggcccccaggggcacgcaggctgaagaaagtcccttcgtgggcaacccagggaatatcacaggtgcccggggactcacgggcacccttcggtgtcagctccaggttcagggagagccccccgaggtacattggcttcgggatggacagatcctggagctcgcggacagcacccagacccaggtgcccctgggtgaggatgaacaggatgactggatagtggtcagccagctcagaatcacctccctgcagctttccgacacgggacagtaccagtgtttggtgtttctgggacatcagaccttcgtgtcccagcctggctatgttgggctggagggcttgccttacttcctggaggagcccgaagacaggactgtggccgccaacacccccttcaacctgagctgccaagctcagggacccccagagcccgtggacctactctggctccaggatgctgtccccctggccacggctccaggtcacggcccccagcgcagcctgcatgttccagggctgaacaagacatcctctttctcctgcgaagcccataacgccaagggggtcaccacatcccgcacagccaccatcacagtgctcccccagcagccccgtaacctccacctggtctcccgccaacccacggagctggaggtggcttggactccaggcctgagcggcatctaccccctgacccactgcaccctgcaggctgtgctgtcagacgatgggatgggcatccaggcgggagaaccagaccccccagaggagcccctcacctcgcaagcatccgtgcccccccatcagcttcggctaggcagcctccatcctcacaccccttatcacatccgcgtggcatgcaccagcagccagggcccctcatcctggacccactggcttcctgtggagacgccggagggagtgcccctgggcccccctgagaacattagtgctacgcggaatgggagccaggccttcgtgcattggcaagagccccgggcgcccctgcagggtaccctgttagggtaccggctggcgtatcaaggccaggacaccccagaggtgctaatggacatagggctaaggcaagaggtgaccctggagctgcagggggacgggtctgtgtccaatctgacagtgtgtgtggcagcctacactgctgctggggatggaccctggagcctcccagtacccctggaggcctggcgcccagggcaagcacagccagtccaccagctggtgaaggaaccttcaactcctgccttctcgtggccctggtggtatgtactgctaggagcagtcgtggccgctgcctgtgtcctcatcttggctctcttccttgtccaccggcgaaagaaggagacccgttatggagaagtgtttgaaccaacagtggaaagaggtgaactggtagtcaggtaccgcgtgcgcaagtcctacagtcgtcggaccactgaagctaccttgaacagcctgggcatcagtgaagagctgaaggagaagctgcgggatgtgatggtggaccggcacaaggtggccctggggaagactctgggagagggagagtttggagctgtgatggaaggccagctcaaccaggacgactccatcctcaaggtggctgtgaagacgatgaagattgccatctgcacgaggtcagagctggaggatttcctgagtgaagcggtctgcatgaaggaatttgaccatcccaacgtcatgaggctcatcggtgtctgtttccagggttctgaacgagagagcttcccagcacctgtggtcatcttacctttcatgaaacatggagacctacacagcttcctcctctattcccggctcggggaccagccagtgtacctgcccactcagatgctagtgaagttcatggcagacatcgccagtggcatggagtatctgagtaccaagagattcatacaccgggacctggcggccaggaactgcatgctgaatgagaacatgtccgtgtgtgtggcggacttcgggctctccaagaagatctacaatggggactactaccgccagggacgtatcgccaagatgccagtcaagtggattgccattgagagtctagctgaccgtgtctacaccagcaagagcgatgtgtggtccttcggggtgacaatgtgggagattgccacaagaggccaaaccccatatccgggcgtggagaacagcgagatttatgactatctgcgccagggaaatcgcctgaagcagcctgcggactgtctggatggactgtatgccttgatgtcgcggtgctgggagctaaatccccaggaccggccaagttttacagagctgcgggaagatttggagaacacactgaaggccttgcctcctgcccaggagcctgacgaaatcctctatgtcaacatggatgagggtggaggttatcctgaaccccctggagctgcaggaggagctgaccccccaacccagccagaccctaaggattcctgtagctgcctcactgcggctgaggtccatcctgctggacgctatgtcctctgcccttccacaacccctagccccgctcagcctgctgataggggctccccagcagccccagggcaggaggatggtgcctgagacaaccctccacctggtactccctctcaggatccaagctaagcactgccactggggaaaactccaccttcccactttcccaccccacgccttatccccacttgcagccctgtcttcctacctatcccacctccatcccagacaggtccctccccttctctgtgcagtagcatcaccttgaaagcagtagcatcaccatctgtaaaaggaaggggttggattgcaatatctgaagccctcccaggtgttaacattccaagactctagagtccaaggtttaaagagtctagattcaaaggttctaggtttcaaagatgctgtgagtctttggttctaaggacctgaaattccaaagtctctaattctattaaagtgctaaggttctaaggcctacttttttttttttttttttttttttttttttttttgcgatagagtctcactgtgtcacccaggctggagtgcagtggtgcaatctcgcctcactgcaaccttcacctaccgagttcaagtgattttcctgccttggcctcccaagtagctgggattacaggtgtgtgccaccacacccggctaatttttatatttttagtagagacagggtttcaccatgttggccaggctggtctaaaactcctgacctcaagtgatctgcccacctcagcctcccaaagtgctgagattacaggcatgagccactgcactcaaccttaagacctactgttctaaagctctgacattatgtggttttagattttctggttctaacatttttgataaagcctcaaggttttaggttctaaagttctaagattctgattttaggagctaaggctctatgagtctagatgtttattcttctagagttcagagtccttaaaatgtaagattatagattctaaagattctatagttctagacatggaggttctaaggcctaggattctaaaatgtgatgttctaaggctctgagagtctagattctctggctgtaaggctctagatcataaggcttcaaaatgttatcttctcaagttctaagattctaatgatgatcaattatagtttctgaggctttatgataatagattctcttgtataagatcctagatcctaagggtcgaaagctctagaatctgcaattcaaaagttccaagagtctaaagatggagtttctaaggtccggtgttctaagatgtgatattctaagacttactctaagatcttagattctctgtgtctaagattctagatcagatgctccaagattctagatgattaaataagattctaacggtctgttctgtttcaaggcactctagattccattggtccaagattccggatcctaagcatctaagttataagactctcacactcagttgtgactaactagacaccaaagttctaataatttctaatgttggacacctttaggttctttgctgcattctgcctctctaggaccatggttaagagtccaagaatccacatttctaaaatcttatagttctaggcactgtagttctaagactcaaatgttctaagtttctaagattctaaaggtccacaggtctagactattaggtgcaatttcaaggttctaaccctatactgtagtattctttggggtgcccctctccttcttagctatcattgcttcctcctccccaactgtgggggtgtgcccccttcaagcctgtgcaatgcattagggatgcctcctttcccgcaggggatggacgatctcccacctttcgggccatgttgcccccgtgagccaatccctcaccttctgagtacagagtgtggactctggtgcctccagaggggctcaggtcacataaaactttgtatatcaacgaaaaaaa

SEQ ID NO: 56285 - DNA, 3107 bp, Homo Sapiens; identical to SEQ ID NO: 30946

SEQ ID NO: 56286 - DNA, 2863 bp, Homo Sapiens
cggaattcaagaaacacaaaatgcagtgggcgtccctcctgctgctggcagggctcttctccctctcccaggcccagtatgaagatgaccctcattggtggttccactacctccgcagccagcagtccacctactacgatccctatgacccttacccgtatgagacctacgagccttacccctatggggtggatgaagggccagcctacacctacggctctccatcccctccagatccccgcgactgcccccaggaatgcgactgcccacccaacttcctcacggccatgtactgtgacaatcgcaacctcaagtacctgcccttcgttccctcccgcatgaagtatgtgtacttccagaacaaccagatcacctccatccaggaaggcgtctttgacaatgccacagggctgctctggattgctctccacggcaaccagatcaccagtgataaggtgggcaggaaggtcttctccaagctgaggcacctggagaggctgtacctggaccacaacaacctgacccggatgcccggtcccctgcctcgatccctgagagagctccatctcgaccacaaccagatctcacgggtccccaacaatgctctggaggggctggagaacctcacggccttgtacctccaacacgatgagatccaggaagtgggcagttccatgaggggcctccggtcactgatcttgctggacctgagttataaccaccttcggaaggtgcctgatgggctgccctcagctcttgagcagctgtacatggagcacaacaatgtctacaccgtccccgatagctacttccggggggcgcccaagctgctgtatgtgcggctgtcccacaacagtctaaccaacaatggcctggcctccaacaccttcaattccagcagcctccttgagctagacctctcctacaaccagctgcagaagatccccccagtcaacaccaacctggagaacctctacctccaaggcaataggatcaatgagttctccatcagcagcttctgcaccgtggtggacgtcgtgaacttctccaagctgcaggtcgtgcgcctggacgggaacgagatcaagcgcagcgccatgcctgccgacgcgcccctctgcctgcgccttgccagcctcatcgagatctgagcagccctggcaccgggtactgggcggagagcccccgtggcatttggcttgatggtttggtttggcttatggaagatctgggacagaccgtgtgacagaagtccacgggcaccctctgtagtcttctttcctgtaggtggggttagggggggcgatcagggacaggcagccttctgctgaggacataggcagaagctcactcttttccagggacagaagtggtggtagatggaaggatccctggatgttccaaccccataaatctcacggctcttaagttcttcccaatgatctgaggtcatggaacttcaaaagtggcatgggcaatagtatataaccatacttttctaacaatccctggctgtctgtgagcagcacttgacagctctccctctgtgctgggctggtcgtgcagttactctgggctcccatttgttgcttctcaaaatatacctcttgcccagctgcctcttctgaaatccacttcacccactccactttcctccacagatgcctcttctgtgccttaagcagagtcaggagaccccaaggcatgtgagcatctgcccagcaacctgtggagacaacccacactgtgtctgagggtgaaaggacaccaggagtcacttctatacctccctaacctcacccctggaaagccaccagattggaggtcaccagcatgatgataatattcatgacctgatgtgggaggagacagccaacctcaggcttagatcaatgtatagggctatattttggcagctgggtagctctttgaaggtggataagacttcagaagaggaaaggccagactttgcttaccatcagcatctgcaatgggccaaacacacctcaaattggctgagttgagaaagcagccccagtagttccattcttgcccagcactttctgcattccaaacagcatcctacctgggtttttatccacaaaggtagcggccacatggtttttaaagtatgagaaacacagtttgtcctctccttttatccaagcaggaagattctatatcctgatggtagagacagactccaggcagccctggacttgctagcccaaagaaggaggatgtggttaatctgtttcacctggtttgtcctaaggccatagttaaaaagtaccagctctggctggggtccgtgaagcccaggccaggcagccaaatcttgcctgtgctgggcatacaaccctctgctttcacatctctgagctatatcctcattagtgaaggtggcttttgctttatagtttggctggggagcacttaattcttcccatttcaaaaggtaatgttgcctggggcttaacccacctgccctttgggcaaggttgggacaaagccatctgggcagtcaggggcaaggactgttggaggagagttagcccaagtataggctctgcccagatgccatcacatccctgatactgtgtatgctttgaagcaccttccctgagaagggaagaggggatctttggactacgttcttggctccagacctggaatccacaaaagccaaaccagctcatttcaacaaaggagctccgatgtgaggggcaaggctgccccctgccccagggctcttcagaaagcatctgcatgtgaacaccatcatgcctttataaaggatccttattacaggaaaagcatgagtggtggctaacctgaccaataaagttattttatgattgcc

SEQ ID NO: 56287 - DNA, 4004 bp, Homo Sapiens
ccattttggagcgatcggagtgccgcccgcggccccgagtcggtctcgagccgccggccggccgtgccggtgtccgtaggcgctgcgccctcggccgggcccatgtgtgtgcggcccgcccgaggccgcccgggctttgcctccaccagcgccctggcctccgctcgggcctccacacgggcctccgaagagctgccgcgacgcccggcccgcagggcaggtaaagagattataaatcttccactgaatgaaaaaaattttcttaaagctgcatatactccaagaaaaaaaccacaaatgtttttctgttttgcctgaatacatgatttaaacaagagatttccacagaagctctgcggccgtcacgatgttctggaagtttgacttgaacaccacgtcccatgttgacaagctgctggacaaggagcatgtgacgctgcaggagttaatggatgaagatgacatcttgcaggagtgtaaggctcagaaccagaagctgctggacttcctgtgcaggcagcagtgcatggaggagctggtgagcctcatcacacaggatccgcccctggacatggaggagaaggtccgcttcaaatatccaaacacagcctgtgagcttctgacttgtgatgtgccgcagatcagcgaccgcctcggtggggacgagagcctgctgagcctcctgtacgacttcttggaccatgagccgcctctcaatcctctgctcgccagttttttcagcaagaccattggcaatctcattgcaagaaaaaccgaacaggtgattacgtttttgaagaagaaggacaagttcatcagcctggtgttgaagcacatcggcacctcagcgcttatggacctgctgctgcgcctggtcagctgtgtggagccagccgggctccggcaggacgtcctgcactggctgaatgaagagaaggtcatccagaggcttgtggagttgatccacccgagccaggatgaagataggcagtcaaatgcttctcagactctctgtgacatagttaggctgggcagagaccagggcagtcagctgcaagaggctctggagccagacccgctcctcacagcgctggagtcgcaggactgtgtggagcagcttctgaagaacatgtttgatggagaccggacggagagctgcctcgtcagtgggactcaggtgttactcaccttgctggaaaccaggcgggttgggacagagggcttggtggactccttttctcagggactggaaaggtcatacgctgtcagcagcagcgtactacacggcatcgagcctcggctgaaggacttccaccagctcctgctcaacccgcccaagaagaaagcgatcctgaccaccattggtgtgctggaggagcccctggggaatgcccgtctgcatggcgcccgcctcatggcagcactgctgcacacaaacacacccagcatcaaccaggagctctgccggctcaacacgatggacttactgctggacttgttctttaagtacacctggaataactttttgcacttccaagtggaactatgcatagccgctattctctcccacgctgcccgtgaggagaggacagaagccagcggatccgagagcagggtggagcctccgcatgagaacgggaaccggagcctggagactccccagccggccgccagcctccctgacaacacaatggtgacccacctgttccagaagtgctgcctggtgcagaggatcctggaggcctgggaagccaacgaccacacgcaggcagcgggtggcatgagacgtgggaacatgggccacctcacacggatcgccaacgcggtggtgcagaacctggagcggggccctgtgcagacgcacatcagcgaggtcatccgagggctccctgcggactgccgtggccgctgggagagcttcgtggaggagacgctgacggagacgaaccgcaggaacactgtggacctggccttctctgactaccagatccagcagatgacagccaacttcgtggatcagtttggcttcaatgatgaggagtttgccgaccaggacgacaacatcaatgccccgtttgacaggatcgcagagatcaacttcaacatcgacgctgacgaggacagtcccagcgcagctctgtttgaggcctgctgcagtgaccgcatccagccctttgatgatgatgaggacgaggacatctgggaggacagtgacactcgctgtgctgcccgggtgatggccagacccaggtttggagccccccatgcttcagagagttgctcaaagaatggcccagagcgtggaggccaggatgggaaggcgagcttggaagcacacagagatgcacctggggcaggtgccccaccggcccccgggaagaaggaagcgccccctgtggagggtgactcagaaggcgccatgtggacggcagtgtttgatgagccagcgaactcaacgcccacagccccaggagtggtgagggacgtgggttccagtgtgtgggcagctggcacctcagctccagaggagaaaggctgggccaagttcactgacttccaacctttctgctgctccgagtcagggcccaggtgcagctctccggtggacacagaatgcagccatgctgagggcagccggagccaaggccctgagaaagccttcagcccggcttctccatgtgcctggaacgtgtgtgtcaccaggaaggcccccctgctggcctctgacagtagctcctctgggggctcccacagcgaggatggcgaccagaaggcagcgagtgccatggatgcggtgagcaggggtcccggccgggaggcccccccgctgcccacagtggccaggacagaggaggctgtcggcagggtcgggtgtgctgacagccggctgttaagccctgcctgccccgcgccaaaggaagtgactgctgccccagccgtggctgtgccccccgaggctactgtggccatcaccacagcactgagcaaggctggccccgccatacccaccccagcagtctcttctgcactggccgtggcggtccccctagggcccatcatggcagtcacagcagccccagccatggtggccaccctggggacagtgacaaaggacgggaagacagatgccccgccagaaggagctgccttaaatggcccagtgtgatgctgctgccgcccggccacggcccaccctggtcaggctgcctccttaatcgagaaaactacctggtgatgcaatcttttttttttttaatttaatttaattttaaaataaatgctgcattggtaaagctggcagttgaaaccagttggacggcccagcttgcgtctcttctgcctgagtgggcctctcaggtcactcgtgccctgctggaggacagaggggcacctcagccgcccccaagcccagagcacagcaataaggtcggcctgcaggagccggggtgggggtgggggtggggggggcaggaccctgagatgccaccaggacctgatgggccaggaagggcgtggacatggaggctgtttttacagttttttttttgttgttgttttgtttttaaagaatacagaaggagccaagcttttttgcactttgtatccagctgcaagctcagggcagagtcaagggcctgggttggaaaaacctgactcacaggaatgcataattgacccttgcagctacccaatagcccttggagctggcactgaaccaggctgcaagatttgactgccttaaaaacacaaggccctctaggcctggcagggatgtccctgtgcccagcacagggtgcctggcagggggagaccacaggtatgcaggtggggggacatggtgtggcactgggggctcgaagactggtttctagcactaccggtcacggccatgtcgtcctagaagggtccagaagattattttacgttgagtccatttttaatgttctgatcacctgacagggcaccccaaacccccaactcccaataaaagccgtgacgttcgg

SEQ ID NO: 56288 - DNA, 5171 bp, Homo Sapiens
gtgagccgcaggcttcgggaggcgagggggcggggggagcagcgccgaggccgccgcctccgcctccgccgcctaggactagggggtgggggacggacaagccccgatgccgggggagacggaagagccgagacccccggagcagcaggaccaggaagggggagaggcggccaaggcggctccggaggagccccaacaacggccccctgaggcggtcgcggcggcgcctgcagggaccactagcagccgcgtgctgaggggaggtcgggaccgaggccgggccgctgcggccgccgccgccgcagctgtgtcccgccggaggaaggccgagtatccccgccggcggaggagcagccccagcgccaggcctcccgacgtccccgggcagcagccccaggccgcgaagtccccgtctccagttcagggcaagaagagtccgcgactcctatgcatagaaaaagtaacaactgataaagatcccaaggaagaaaaagaggaagaagacgattctgccctccctcaggaagtttccattgctgcatctagacctagccggggctggcgtagtagtaggacatctgtttctcgccatcgtgatacagagaacacccgaagctctcggtccaagaccggttcattgcagctcatttgcaagtcagaaccaaatacagaccaacttgattatgatgttggagaagagcatcagtctccaggtggcattagtagtgaagaggaagaggaggaggaagaagagatgttaatcagtgaagaggagataccattcaaagatgatccaagagatgagacctacaaaccccacttagaaagggaaaccccaaagccacggagaaaatcagggaaggtaaaagaagagaaggagaagaaggaaattaaagtggaagtagaggtggaggtgaaagaagaggagaatgaaattagagaggatgaggaacctccaaggaagagaggaagaagacgaaaagatgacaaaagtccacgtttacccaaaaggagaaaaaagcctccaatccagtatgtccgttgtgagatggaaggatgtggaactgtccttgcccatcctcgctatttgcagcaccacattaaataccagcatttgctgaagaagaaatatgtatgtccccatccctcctgtggacgactcttcaggcttcagaagcaacttctgcgacatgccaaacatcatacagatcaaagggattatatctgtgaatattgtgctcgggccttcaagagttcccacaatctggcagtgcaccggatgattcacactggcgagaagccattacaatgtgagatctgtggatttacttgtcgacaaaaggcatctcttaattggcacatgaagaaacatgatgcagactccttctaccagttttcttgcaatatctgtggcaaaaaatttgagaagaaggacagcgtagtggcacacaaggcaaaaagccaccctgaggtgctgattgcagaagctctggctgccaatgcaggcgccctcatcaccagcacagatatcttgggcactaacccagagtccctgacgcagccttcagatggtcagggtcttcctcttcttcctgagcccttgggaaactcaacctctggagagtgcctactgttagaagctgaagggatgtcaaagtcatactgcagtgggacggaacgggtgagcctgatggctgatgggaagatctttgtgggaagcggcagcagtggaggcactgaagggctggttatgaactcagatatactcggtgctaccacagaggttctgattgaagattcagactctgccggaccttagtggacaggaagacttggggcatgggacagctcagactttgtatttaaaagttaaaaaggacaaaaaaaaaatctaaagcatttaaaatctagtgaaataactgaagggcctgctctttccattgtggatcacagcacacacatacatacaccctccacctccccatcccctgttctccctctgttgctccccttataaaattgatgttgtctttaccagaaaggtagacaaaaaagaagcagcagcagctcttaaagtgagggttattctcatactcggttccagccatcagcagacttcctgctcatcggcagatccccctttccaacctgtaactctgatgtgctctggatcagcttttaacttttaatcatatattactgtcttctaaatcccttctcctcctctactgctgccctatggttctggctcctaccccctgcggcacacttatcttcaaataccatagaattctaatctctggaggctggcagcttgacttggcactttagggccccttagcagggtgagctgttaaaacagcacacatctctcatcccctcttcctttattcccccctgggtttcagaaaggaaggatatatggggaccacctcccccttctttgatcccagcatctcagtccccctcccaaccctccatatggctctcaatggtgctcacttgcttggaagcaggctcccaatagggagggggctgccctctacagtctctttgactgtaagacagggctctgtatcagtgagacgatgagaaaagtcccaggctaatggcagaaatttgcactttgaacatgtgtgtttttgtgttgtggaacctgagattccttatttattaacaggaagtctgattttttttttttggagtctttgttgctatattttgtggggctgggagagagagattagattattttgacatgggatcccttccataacaggtactttgaaggcaagacatagggttgaagaagcacagccagcctctgaaatcatagctctccagtggcttttaaagaaagctggtcctcagcactaacaaaatcactacaatagcctagtgcttttttggaagcctttttagggaagaatgttaggttcatggtaactagtatgctctttgagatttttacagtgttgaaacttaagaattttgagagggtgaggagggttgttcagaatctaaattacagatagatgattgtttcttgtgaatttgtttcttttcctttttttttgtccctaccatttccttacatttcccttggggcccatctctggctccttgctttttgtttcttgctttgctttatcagttcattccagctccctgttagtgaaggacactgctgttagtgaaggaacaaagtctatgagtcctaaaattttaagtcaaagaaaactgctctgtttcccctttagtaacacttctgaagaggaaaaacttcaatagccaaagttaataatcctatataataattgctttggctttcacctaaaattctgggcatcacaatttccttgggatagaggttgtgttggggaatagattgcttattgctgttcactggagagaaaaggtagtgtttttgtacaaggtcataccgccagaagccccaaatcctattttggctcatcttcaggtaaagagtaattcctatcctgtgtgcctcagaagctagaatcgaaggcttaccctattcattgtttattgtcagaaatgcatgatggctcttggaaagaatgacgttttgctggaaaaaaaaaaaagaacagtttgtgtttcacaaacatggcttatcaattttttcaaagaattcttttttcccaaaaagaggagtaacaaaatgtcatttctgaaagaggcttactttataccaactagtgtcagcatttgggatgccagggaacagagagtgagacacctacaatcaccagtctcaaatgcgctattgtttcttttcagagtgttgcagatttgccatttctccataatatggggatagaaaatggaataaagatagaagggatgtagaatatgctttcctgccaacatggtttggagtcgactttggtatattgactagatttgaaaatacaagattgattagatgaatctacaaaaaagttgtcctcctctcaggtcccttttacactttttgactaactagcatctatattccacacttagcttttttgtcacacttatcctttgtctccgtaaatttcatttgcagtggttagtcatcagatattttagccacctacacaaaagcaaactgcatttttaaaaatctttctgagatgggagaaaatgtattctcctttcctataccgctctcccaacaaaaaaacaactagttagttctactaattagaaacttgctgtactttttcttttcttttaggggtcaaggaccctctttatagctaccatttgcctacaataaattattgcagcagtttgcaatactaaaatattttttatagactttatatttttccttttgataaagggatgctgcatagtagagttggtgtaattaaactatctcagccgtttccctgctttcccttctgctccatatgcctcattgtccttccagggagctcttttaatcttaaagttctacatttcatgctcttagtcaaattctgttacctttttaataactcttcccactgcatatttccatcttgaattggtggttctaaattctgaaactgtagttgagatacagctatttaatatttctgggagatgtgcatccctcttctttgtggttgcccaaggttgttttgcgtaactgagactccttgatatgcttcagagaatttaggcaaacactggccatggccgtgggagtactgggagtaaaataaaaatatcgaggtatagactagcatccacatagagcacttgaacctcctttgtacctgtttggggaaaaagtataatgagtgtactaccaatctaactaagattattatagtctggttgtttgaaataccatttttttctccttttgtgtttttcccactttccaatgtactcaagaaaattgaacaaatgtaatggatcaatttaaaatattttatttcttaaaagccttttttgcctgttgtaatgtgcaggacccttctcctttcatgggagagacaggtagttacctgaatataggttgaaaaggttatgtaaaaagaaattataataaaagggatactttgcttttcaaatctttgttttctcttattctaggtaaggcatattaaaaataaatatgtaaagaaaaaaaataaaagttgtcttcatggaaaaaaaaaaaaaaaaaa

SEQ ID NO: 56289 - DNA, 3558 bp, Homo Sapiens
cagaccccagttcgccgactaagcagaagaaagatcaaaaaccggaaaagaggagaagagcaaacaggcactttgaggaacaatcccctttaactccaagccgacagcggtctaggaattcaagttcagtgcctaccgaagacaaaggcgccccgagggagtggcggtgcgaccccagggcgtgggcccggccgcggagcccacactgcccggctgacccggtggtctcggaccatgtctcccgccccaagacccccccgttgtctcctgctccccctgctcacgctcggcaccgcgctcgcctccctcggctcggcccaaagcagcagcttcagccccgaagcctggctacagcaatatggctacctgcctcccggggacctacgtacccacacacagcgctcaccccagtcactctcagcggccatcgctgccatgcagaagttttacggcttgcaagtaacaggcaaagctgatgcagacaccatgaaggccatgaggcgcccccgatgtggtgttccagacaagtttggggctgagatcaaggccaatgttcgaaggaagcgctacgccatccagggtctcaaatggcaacataatgaaatcactttctgcatccagaattacacccccaaggtgggcgagtatgccacatacgaggccattcgcaaggcgttccgcgtgtgggagagtgccacaccactgcgcttccgcgaggtgccctatgcctacatccgtgagggccatgagaagcaggccgacatcatgatcttctttgccgagggcttccatggcgacagcacgcccttcgatggtgagggcggcttcctggcccatgcctacttcccaggccccaacattggaggagacacccactttgactctgccgagccttggactgtcaggaatgaggatctgaatggaaatgacatcttcctggtggctgtgcacgagctgggccatgccctggggctcgagcattccagtgacccctcggccatcatggcacccttttaccagtggatggacacggagaattttgtgctgcccgatgatgaccgccggggcatccagcaactttatgggggtgagtcagggttccccaccaagatgccccctcaacccaggactacctcccggccttctgttcctgataaacccaaaaaccccacctatgggcccaacatctgtgacgggaactttgacaccgtggccatgctccgaggggagatgtttgtcttcaaggagcgctggttctggcgggtgaggaataaccaagtgatggatggatacccaatgcccattggccagttctggcggggcctgcctgcgtccatcaacactgcctacgagaggaaggatggcaaattcgtcttcttcaaaggagacaagcattgggtgtttgatgaggcgtccctggaacctggctaccccaagcacattaaggagctgggccgagggctgcctaccgacaagattgatgctgctctcttctggatgcccaatggaaagacctacttcttccgtggaaacaagtactaccgtttcaacgaagagctcagggcagtggatagcgagtaccccaagaacatcaaagtctgggaagggatccctgagtctcccagagggtcattcatgggcagcgatgaagtcttcacttacttctacaaggggaacaaatactggaaattcaacaaccagaagctgaaggtagaaccgggctaccccaagtcagccctgagggactggatgggctgcccatcgggaggccggccggatgaggggactgaggaggagacggaggtgatcatcattgaggtggacgaggagggcggcggggcggtgagcgcggctgccgtggtgctgcccgtgctgctgctgctcctggtgctggcggtgggccttgcagtcttcttcttcagacgccatgggacccccaggcgactgctctactgccagcgttccctgctggacaaggtctgacgcccaccgccggcccgcccactcctaccacaaggactttgcctctgaaggccagtggcagcaggtggtggtgggtgggctgctcccatcgtcccgagccccctccccgcagcctccttgcttctctctgtcccctggctggcctccttcaccctgaccgcctccctccctcctgccccggcattgcatcttccctagataggtcccctgagggctgagtgggagggcggccctttccagcctctgcccctcaggggaaccctgtagctttgtgtctgtccagccccatctgaatgtgttgggggctctgcacttgaaggcaggaccctcagacctcgctggtaaaggtcaaatggggtcatctgctccttttccatcccctgacataccttaacctctgaactctgacctcaggaggctctgggcactccagccctgaaagccccaggtgtacccaattggcagcctctcactactctttctggctaaaaggaatctaatcttgttgagggtagagaccctgagacagtgtgagggggtggggactgccaagccaccctaagaccttgggaggaaaactcagagagggtcttcgttgctcagtcagtcaagttcctcggagatctgcctctgcctcacctaccccagggaacttccaaggaaggagcctgagccactggggactaagtgggcagaagaaacccttggcagccctgtgcctctcgaatgttagccttggatggggctttcacagttagaagagctgaaaccaggggtgcagctgtcaggtagggtggggccggtgggagaggcccgggtcagagccctgggggtgagcctgaaggccacagagaaagaaccttgcccaaactcaggcagctggggctgaggcccaaaggcagaacagccagagggggcaggaggggaccaaaaaggaaaatgaggacgtgcagcagcattggaaggctggggccgggcaggccaggccaagccaagcagggggccacagggtgggctgtggagctctcaggaagggccctgaggaaggcacacttgctcctgttggtccctgtccttgctgcccaggcagcgtggaggggaagggtagggcagccagagaaaggagcagagaaggcacacaaacgaggaatgaggggcttcacgagaggccacagggcctggctggccacgctgtcccggcctgctcaccatctcagtgaggggcaggagctggggctcgcttaggctgggtccacgcttccctggtgccagcacccctcaagcctgtctcaccagtggcctgccctctcgctcccccacccagcccacccattgaagtctccttgggccaccaaaggtggtggccatggtaccggggacttgggagagtgagacccagtggagggagcaagaggagagggatgtcgggggggtggggcacggggtaggggaaatggggtgaacggtgctggcagttcggctagatttctgtcttgtttgtttttttgttttgtttaatgtatatttttattataattattatatatgaattccaaaaaaaaaaaaaaaaaaaaa

SEQ ID NO: 56290 - DNA, 5587 bp, Homo Sapiens; identical to SEQ ID NO: 29303

SEQ ID NO: 56291 - DNA, 8796 bp, Homo Sapiens
gcccccggccccctcccgccgggtcaaccccgaagagtcgccggtggccgcggcagacggaagccgaacgagttcctcggcggctgcaggatgggggactccaaagtgaaagtggcggtgcggatacgacccatgaaccggcgagagactgacttgcataccaaatgtgtggtggatgtggatgcaaacaaggttattcttaatcctgtaaatacgaatctttccaaaggagatgcccggggccagccgaaggtgtttgcttatgatcattgtttctggtctatggatgaatctgtcaaagaaaagtatgcaggtcaagatattgttttcaagtgccttggagagaatatcctgcagaatgcttttgatggctacaatgcatgtatctttgcctatggacagactggctctggaaaatcttataccatgatgggcacagctgaccaacctggattaatcccaagactttgcagtggactctttgaacgaactcagaaagaggaaaatgaagaacagagttttaaagtagaagtgtcctacatggaaatttataatgaaaaagttcgagaccttcttgatcccaaaggaagccgtcagacgttgaaagtcagagagcatagtgtgttgggaccttatgtcgacggactttctaaactggctgtcacaagctacaaggatattgagtcgttgatgtctgagggtaacaaatctcgcacagttgctgcaaccaacatgaacgaggagagtagccgatcccatgcagttttcaaaatcaccctcacacatactctctacgatgtgaagtctgggacatctggagagaaagtgggcaaactcagcctggtggatttagctggcagtgaacgagcaacgaagacaggcgctgcaggggacaggctgaaggaagggagcaacattaacaagtccctcacaaccctcggtctggttatctcagctcttgcagatcagagtgctggcaaaaacaagaataaatttgttccatatcgtgactcagttctcacttggctgctcaaagacagcctcgggggtaacagcaagaccgccatggtggctactgtgagtcctgcagctgataactatgatgaaaccctctcaactctgcggtatgcagatcgagccaagcacattgtaaaccacgctgtggtgaatgaggaccctaatgcccgaattatccgggatctccgggaagaagttgagaaactccgggagcagctgaccaaagcagaggcaatgaaatctccagagctaaaggaccggctggaagaatctgagaagctaatccaggaaatgactgtgacctgggaggagaaattaaggaaaacggaggagattgcacaggaacgacagaaacagcttgagagtcttggaatatctcttcagtcttcgggaatcaaagttggggatgataaatgcttccttgtgaatctgaatgctgacccagctctgaatgagcttctggtgtactatttaaaggaacatacattgatagggtcagcaaattcccaagatatccaactgtgcggcatgggaattcttcctgaacactgtattatagacatcacgtcagaaggccaggttatgctgactcctcagaagaacaccagaacatttgtaaatgggtcatctgtctccagtccaatacagctacaccatggggacaggatattatggggaaacaatcatttcttcagactcaatttgcctaaaaagaaaaagaaagcagaacgagaggatgaggaccaggatccctccatgaagaacgagaatagttctgagcagctggatgtagacggagactcctccagcgaggtgtccagtgaagttaactttaattacgaatacgcacagatggaggtcaccatgaaggccctgggcagcaatgatccgatgcagtccatattaaacagcctagaacaacagcatgaagaagaaaaacgatctgcactggagcgccagaggcttatgtatgagcacgaattggagcagctccggagaaggctgtctcctgagaagcagaactgccggagcatggacaggttttctttccactcgcccagcgctcagcaacgcttaagacagtgggctgaggagagagaagcaacgttgaataacagcctgatgaggctgagggaacaaattgttaaggccaatctattggtgagagaagctaattacattgctgaggagctggataaaagaacagaatacaaagttaccctacagattccagcctccagcctggatgccaacaggaagcgaggctctcttcttagtgagcctgcaatccaggtgagaagaaaaggaaaaggaaagcagatttggtctttggaaaaactggacaacaggctgttggatatgagagacctttatcaggagtggaaagagtgtgaagaagataacccagtaatacgatcatacttcaaacgtgctgatccattctatgatgagcaggaaaatcacagtctcattggggtggccaatgtcttcctcgagtcacttttctatgatgtgaagttacaatacgctgttcccatcatcaaccagaaaggagaggtggcaggtcggctgcacgtggaggtgatgcgactcagtggtgatgttggggagaggatcgcaggaggcgatgaggtggcagaggtctcctttgagaaggagacccaggagaacaaactggtgtgcatggttaaaatcctgcaagctactgggttgccacagcatctgtcccactttgtgttctgcaaatacagcttctgggatcaacaggagccggtgattgtcgctcctgaagtggacacctcctcctcttccgtcagcaaggagccgcactgcatggttgtctttgatcattgcaatgagttttctgttaacatcaccgaagactttatcgagcatctttccgaaggagcattggcaattgaagtatatggacataaaataaacgatccccggaaaaaccccgccctgtgggatttgggaatcatccaagcaaagacacgtagtcttcgggacagatggagtgaagtgaccaggaaattggaattctgggttcaaatcttggaacagaatgagaatggtgaatactgccctgtagaagtgatttctgcaaaggatgtcccaacaggaggaatcttccagctccggcaggggcagtcccggagagttcaagtcgaagtgaagtcagtgcaggaatctgggactttaccactgatggaagaatgtatactgtctgttggcattggatgtgtcaaagttagaccgctcagagcccccagaacacatgagaccttccatgaggaagaggaagacatggacagctaccaggatcgagatttagagagacttcgtagaaaatggctaaatgcattaacaaaacgtcaggagtacttggatcaacaattgcaaaagcttgtcagtaaacgtgataaaacagaggatgatgctgaccgtgaagcgcagcttctggagatgcggttgaccctaactgaggagaggaacgcggtgatggtcccctctgctggcagtggtattccaggggccccagcagaatggaccccagtacctgggatggagacacacattcctgttatattcctggacttaaatgctgatgatttcagctctcaggataatcttgatgacccagaagctggtggatgggatgcgaccttgactggggaagaagaagaggagttctttgaattgcagattgtgaagcagcatgatggggaggtgaaagcagaagcctcctgggactccgcggtgcatggctgccctcagctcagcaggggcacgcccgtggacgagcggttgttcctgatcgtgcgcgtgacggtccagctcagccaccctgctgacatgcaactggtgttacgcaagagaatctgtgtcaatgttcacggccgccagggttttgcacagagtctcctaaaaaagatgtctcatcgaagttctattcctggctgtggagtgacttttgaaattgtctccaatattccagaggatgcccagggagtggaagaacgggaagcattagcaagaatggcagccaatgttgaaaacccagcttctgctgactcggaggcttatattgaaaagtacctcaggagcgtgctggctgtagaaaacctcctgactttagatcgtctgcgccaggaagttgcagtgaaggaacagttaacaggaaaaggaaagttgagcaggaggagtatcagttctccaaatgtgaacagattgtctggaagccgacaagatctcattccatcatacagtctaggcagcaacaagggccggtgggaaagtcagcaggatgtatcccaaaccacagtttccagaggaatagctcctgcccccgccctctctgtttctccccaaaataaccattctccagatccaggactcagtaaccttgcagcatcctacttgaatcctgtcaaatccttcgtgccgcaaatgccaaagctcctcaagtctctctttcccgtccgcgatgagaagaggggcaagcggccgtctcccctcgcacaccagcccgtgccccgcatcatggtgcagtcagccagcccggacatcagggtgaccaggatggaggaggctcagccggagatgggccctgacgtgctggtgcagacgatgggggccccggccttgaagatctgcgacaaacctgccaaagtgccttccccaccgcctgtcatagctgtcacagcggtcaccccggctccggaggcacaggacgggccccccagccccctgagtgaagcctctagcgggtacttctcccacagcgtctccaccgcgaccctgtcggacgccctgggccccggcctggacgctgcggccccgccggggtccatgcccaccgcccctgaggccgagcccgaggcgcccatcagccaccccccaccgcccacggccgtccccgccgaggagccccctggcccccagcagctcgtgagccccggtcgggagcgccccgacctcgaggccccggcgcccggctccccgttccgcgtccggagggtgcgggcctcggagttgcgctccttctcgcgcatgctggctggggaccccggctgctccccgggggccgaggggaatgcgccggccccgggcgccgggggacaggccctggcctctgattccgaggaagctgacgaggtcccggagtggctccgagagggcgagttcgtcaccgtgggcgcccacaaaacgggcgtggtgagatacgtggggcctgccgacttccaagagggcacgtgggtcggcgtggagctcgacctgccctcaggtaagaatgacggttccatcggcgggaagcagtacttcaggtgtaaccctggctacgggctgctggtcaggcccagccgggtccgcagggccacgggccctgtgcggcggcgcagcacaggactccggctgggtgcccccgaggcccgccggagcgccaccctctcgggctccgccaccaacctggcctcgctgacagctgccctggccaaggccgacaggagccacaagaaccctgagaaccggaaatcctgggccagctgagccgctgccttagggcgaacttttctgggggtgcccggccccttttgagccctgccagtgacagccctgaggagccaggagcccggtggccccttccccaggggcagggcgatgaatgctttttgcacgacacagggctggtgacctccctgggcctctggaagctttgtttcttctgtacccgggtaaagtgggggcctcaactgtgcctcctccggtggatggaaggttctgggtgcccgcaggggctgggggatgctaggactgagaccctgggtggtgcagcgcctggtgatcttgctgtgtgcctgtgcctggggccttatgttgctctttctatcatttccattctggtggccccactaatgtcttaacctaaaccataattgtaaccagtgcctttcctccccactggagggcaagcccccccacccacccaggatgtcctggctcactccgcaagccccccagcctcccaccctggtcccagtttcccgcaaagtgcctctgggggaccccccagcctcccaccctggtcccaggttccacaagtgcctctggagggccctgggctctggcagatggtcctggtgccccagacgggggccgagggcctgagcccccccatccctcctctgccagggtttcttagcggtttctctgtggatgttttggcatctttagacacctggaaagtctcttatgtttgccgtttattcccttcacagaaggcttggaatgtatttatttatatttattttttcaaaatccgaaatcatttgcgagccgcaatcgtcgtctgcctgtgtgggggggcccagggcctgccttgcacgttgcagcctctctggccattgcagagctgctggcctcctgcccaggtggagggtcctggggacggcagaggataaagccccctcctcacatccctctattgcggatccacagtggccttactcttaacttggatgagagcaaaaacctgggagaatgatgtgcttctgtagtcggtgacaaaggaagaggcattgctactttatttggtgcacttttggtttctaggaaggtctttgggtcattttaacttctcggcaactcccagactctcagagtgtggggctggggcctggcggctgggctggtgcagggagtgtgctggttagtctccagaccctcacagcagccacgcccccaggcccaccgtgcatggtgtgggcgggacagccggaagcttccggggtggcctccacctcctggctggggcacttatgctcccagagcctttggtgccaggtttgtgggatgggggttagcgtctatgtgtggaaggccaccaatctagggacaggagtcctgggtcaagattcacacagccacccttggagctggtttctagttctcacatttagtcaacatctagaaagcgctgcggaaggctctggttctctagggacttgaaggcgccaacagagtagtctccatggtgggcctgtcccagccctggctgcgaggacaggttgtctttctctccccagttggcgagggacacgaaggctgcggccgggctggcagagggcccggcccctggggggaggcactcctccagggctctccctgtccttagccgattttgagggaaccctgtggcacctgtccctggatgaagagctgtcacctctgccttgccctttaactcaacccgcttcccagcacagcggctttctttttaaaacctgtttcactgagaagtttgtttttgggtccgctggtgtcactatggcctgggtgagaggccagcactgctgctgccctgaggggaaacgcctgggccgtgtagtggggacgctctgggaatggtggcggacgggcagcgtgggtgggacctggcacttcgtggtggctgagccatccacccagcagcggcctcctgtagcaccatcttgggaaagtcctgggggacgtgtgtgtcgtgctttttaccatcggtttgacttacagtggagtagaacgagccagagttcctgacttgagcaggtggatttgggcccaggccctgttcactcttgcttctcggtgcggactaatgtcagcttgtggctgggaaagagggatgtgcagtgacgtggtcaccaaggcagtgagccccgctgaccccgggccagcacttggcaggcaggaggtgcggtctccagagtggtgggccagggcgggctggcctccgtcttctatcttcttttcttgcctccctgaccagcagactcacctcccaagaacgcctgcccgcccacccgccttaggactcccgatgcgctcctggaaggccccaggagtggcaccttagtgtgggtcggcccgcagatggcacccaaggccgggaagggcagtaactgcacacgcggcgctgtcagagatgggggtgggggatgcttctgggggccctgcctccccattgtgtgcccagaacatccctggccccaccccgccacttccctcgggcccttatgaaggactgaggctccagggtgagaaggctcacttctgccccgggcactgcgtccagcagcagaggggacagggggcaggtgtgtgactgggttcctgggtacccaggcctgaccagagggagcgggagggcagaggtgaggagggggaagatgtttctgggcctaccaaggttcaacaagagaacggagctgggaatgtgactgctggagcctgagaggtggaggagttctgatcccccgttacttcctagcattttctcctcttgccttaaaagttccctgtatgtgaaacgggaagtcctgagagtgtgtgttggtggctgtgcgcacgcacacaagacgggagtcaccctgtgcttcctgcccaagatactgacccattgaacccccaaagcatctttctctccacaaagtccgtggtgccttcctggtgggctgcagacactaatggtgttggggggtcttggaacagcttctctatgtgtggattcgtgtaaatgcgaagagttcacatataaagaagtgactttgattctgtgattatattgatttggtacacagtaaatgggagtttaaaaaatccaaagactctaatgacttgtaaagactctaatgatttgtatcatgtaatgaactaaaccacctgtaattttgtaccgtatgtgtctttccatcaaatgaccaacagcttctcaataaaaccagaccatttctcacctgc

SEQ ID NO: 56292 - DNA, 5858 bp, Homo Sapiens
ccttccagccatgtgggttcagcggaaagagaagcaaaaccactcttcctaaaatgttagaagctgctcttcgcttaccttggggcctttgcattgggagctgtttttcacatcaaagaatatgtgctgaatggaattttagtattttgctgtcgttttaatattttcgtctggtcttcctcagttcttccagacgctttctgagagaatgggggcaggagctctagccatctgtcaaagtaaagcagcggttcggctgaaagaagacatgaaaaagatagtggcagtgccattaaatgaacagaaggattttacctatcagaagttatttggagtcagtctccaagaacttgaacggcaggggctcaccgagaatggcattccagcagtagtgtggaatatagtggaatatttgacgcagcatggacttacccaagaaggtctttttagggtgaatggtaacgtgaaggtggtggaacaacttcgactgaagttcgagagtggagtgcccgtggagctcgggaaggacggtgatgtctgctcagcagccagtctgttgaagctgtttctgagggagctgcctgacagtctgatcacctcagcgttgcagcctcgattcattcaactctttcaggatggcagaaatgatgttcaggagagtagcttaagagacttaataaaagagctgccagacacccactactgcctcctcaagtacctttgccagttcttgacaaaagtagccaagcatcatgtgcagaatcgcatgaatgttcacaatctcgccactgtatttgggccaaattgctttcatgtgccacctgggcttgaaggcatgaaggaacaggacctgtgcaacaagataatggctaaaattctagaaaattacaataccctgtttgaagtagagtatacagaaaatgatcatctgagatgtgaaaacctggctaggcttatcatagtaaaagaggtctattataagaactccctgcccatccttttaacaagaggcttagaaagagacatgccaaaaccacctccaaaaaccaagatcccaaaatccaggagtgagggatctattcaggcccacagagtactgcaaccagagctatctgatggcattcctcagctcagcttgcggctaagttatagaaaagcctgcttggaagacatgaattcagcagagggtgctattagtgccaagttggtacccagttcacaggaagatgaaagacctctgtcacctttctatttgagtgctcatgtaccccaagtcagcaatgtgtctgcaaccggagaactcttagaaagaaccatccgatcagctgtagaacaacatctttttgatgttaataactctggaggtcaaagttcagaggactcagaatctggaacactatcagcatcttctgccacatctgccagacagcgccgccgccagtccaaggagcaggatgaagttcgacatgggagagacaagggacttatcaacaaagaaaatactccttctgggttcaaccaccttgatgattgtattttgaatactcaggaagtcgaaaaggtacacaaaaatacttttggttgtgctggagaaaggagcaagcctaaacgtcagaaatccagtactaaactttctgagcttcatgacaatcaggacggtcttgtgaatatggaaagtctcaattccacacgatctcatgagagaactggacctgatgattttgaatggatgtctgatgaaaggaaaggaaatgaaaaagatggtggacacactcagcattttgagagccccacaatgaagatccaggagcatcccagcctatctgacaccaaacagcagagaaatcaagatgccggtgaccaggaggagagctttgtctccgaagtgccccagtcggacctgactgcattgtgtgatgaaaagaactgggaagagcctatccctgctttctcctcctggcagcgggagaacagtgactctgatgaagcccacctctcgccgcaggctgggcgcctgatccgtcagctgctggacgaagacagcgaccccatgctctctcctcggttctacgcttatgggcagagcaggcaatacctggatgacacagaagtgcctccttccccaccaaactcccattctttcatgaggcggcgaagctcctctctggggtcctatgatgatgagcaagaggacctgacacctgcccagctcacacgaaggattcagagccttaaaaagaagatccggaagtttgaagatagattcgaagaagagaagaagtacagaccttcccacagtgacaaagcagccaatccggaggttctgaaatggacaaatgaccttgccaaattccggagacaacttaaagaatcaaaactaaagatatctgaagaggacctaactcccaggatgcggcagcgaagcaacacactccccaagagttttggttcccaacttgagaaagaagatgagaagaagcaagagctggtggataaagcaataaagcccagtgttgaagccacattggaatctattcagaggaagctccaggagaagcgagcggaaagcagccgccctgaggacattaaggatatgaccaaagaccagattgctaatgagaaagtggctctgcagaaagctctgttatattatgaaagcattcatggacggccggtaacaaagaacgaacggcaggtgatgaagccactatacgacaggtaccggctggtcaaacagatcctctcccgagctaacaccatacccatcattggttccccctccagcaagcggagaagccctttgctgcagccaattatcgagggcgaaactgcttccttcttcaaggagataaaggaagaagaggaggggtcagaagacgatagcaatgtgaagccagacttcatggtcactctgaaaaccgatttcagtgcacgatgctttctggaccaattcgaagatgacgctgatggatttatttccccaatggatgataaaataccatcaaaatgcagccaggacacagggctttcaaatctccatgctgcctcaatacctgaactcctggaacacctccaggaaatgagagaagaaaagaaaaggattcgaaagaaacttcgggattttgaagacaactttttcagacagaatggaagaaatgtccagaaggaagaccgcactcctatggctgaagaatacagtgaatataagcacataaaggcgaaactgaggctcctggaggtgctcatcagcaagagagacactgattccaagtccatgtgaggggcatggccaagcacagggggctggcagctgcggtgagagtttactgtccccagagaaagtgcagctctggaaggcagccttggggctggccctgcaaagcatgcagcccttctgcctctagaccatttggcatcggctcctgtttccattgcctgccttagaaactggctggaagaagacaatgtgacctgacttaggcattttgtaattggaaagtcaagactgcagtatgtgcacatgcgcacgcgcatgcacgcacacacacacacagtagtggagctttcctaacactagcagagattaatcactacattagacaacactcatctacagagaatatacactgttcttccctggataactgagaaacaagagaccattctctgtctaactgtgataaaaacaagctcaggactttattctatagagcaaacttgctgtggagggccatgctctccttggacccagttaactgcaaacgtgcattggagccctatttgctgccgctgccattctagtgacctttccacagagctgcgccttcctcacgtgtgtgaaaggttttccccttcagccctcaggtagatggaagctgcatctgcccacgatggcagtgcagtcatcatcttcaggatgtttcttcaggacttcctcagctgacaaggaattttggtccctgcctaggaccgggtcatctgcagaggacagagagatggtaagcagctgtatgaatgctgattttaaaaccaggtcatgggagaagagcctggagattctttcctgaacactgactgcacttaccagtctgattttatcgtcaaacaccaagccaggctagcatgctcatggcaatctgtttggggctgttttgttgtggcactagccaaacataaaggggcttaagtcagcctgcatacagaggatcggggagagaaggggcctgtgttctcagcctcctgagtacttaccagagtttaatttttttaaaaaaaatctgcactaaaatccccaaactgacaggtaaatgtagccctcagagctcagcccaaggcagaatctaaatcacactattttcgagatcatgtataaaaagaaaaaaaagaagtcatgctgtgtggccaattataatttttttcaaagactttgtcacaaaactgtctatattagacattttggagggaccaggaaatgtaagacaccaaatcctccatctcttcagtgtgcctgatgtcacctcatgatttgctgttacttttttaactcctgcgccaaggacagtgggttctgtgtccacctttgtgctttgcgaggccgagcccaggcatctgctcgcctgccacggctgaccagagaaggtgcttcaggagctctgccttagacgacgtgttacagtatgaacacacagcagaggcaccctcgtatgttttgaaagttgccttctgaaagggcacagttttaaggaaaagaaaaagaatgtaaaactatactgacccgttttcagttttaaagggtcgtgagaaactggctggtccaatgggatttacagcaacattttccattgctgaagtgaggtagcagctctcttctgtcagctgaatgttaaggatggggaaaaagaatgcctttaagtttgctcttaatcgtatggaagcttgagctatgtgttggaagtgccctggttttaatccatacacaaagacggtacataatcctacaggtttaaatgtacataaaaatatagtttggaattctttgctctactgtttacattgcagattgctataatttcaaggagtgagattataaataaaatgatgcactttaggatgtttcctatttttgaaatctgaacatgaatcattcacatgaccaaaaattgtgtttttttaaaaatacatgtctagtctgtcctttaatagctctcttaaataagctatgatattaatcagatcattaccagttagcttttaaagcacatttgtttaagactatgtttttggaaaaatacgctacagaatttttttttaagctacaaataaatgagatgctactaattgttttggaatctgttgtttctgccaaaggtaaattaactaaagatttattcaggaatccccatttgaatttgtatgattcaataaaagaaaacaccaagtaagttatataaaataaattgtgtatgagatgttgtgttttcctttgtaatttccactaactaactaactaacttatattcttcatggaatggagcccagaagaaatgagaggaagcccttttcacactagatcttatttgaagaaatgtttgttagtcagtcagtcagtggtttctggctctgccgagggagatgtgttccccagcaaccatttctgcagcccagaatctcaaggcactagaggcggtgtcttaattaattggcttcacaaagacaaaatgctctggactgggatttttcctttgctgtgttgggaatatgtgtttattaattagcacatgccaacaaaataaatgtcaagagttatttcataagtgtaagtaaacttaagaattaaagagtgcagacttataattttc

SEQ ID NO: 56293 - DNA, 2952 bp, Homo Sapiens; identical to SEQ ID NO: 30553

SEQ ID NO: 56294 - DNA, 5658 bp, Homo Sapiens
gcgggagcccgcagcggaggaggggccgcgggcgggaggcgctgcgaggcgctgctggccctcgggctgcgggagccgggctaggacgccgagcggtgactccccgccgctcccgggggccgtgacgatgaggaaagtgaggcccaaagaagatttatgttcaggaccatttagtctgagatgcctacatagaagagtgacagcagctagactaaatgtttaactgctgaactagttcctcaggtatcctggctctagagattgctatgggagattggatgactgttacagatccaggtctgtcttcagaaagcaaaactatctctcaatatacctcagaaacaaagatgtctccatcaagtttatactcacagcaagtgctatgttcttcaatacctttatcgaaaaatgtgcacagttttttcagtgccttctgcacagaagataatattgaacagagtatctcatatcttgatcaggaattgactacttttggttttccttcattatatgaagaatccaaaggtaaagagacaaagagagagttaaatatagtagctgtactaaattgtatgaatgagctgcttgtgcttcagcggaagaaccttctagctcaggaaaatgtggagacacagaatttgaagctgggaagtgatatggaccatctacagagctgctactcaaaacttaaggaacaactggaaacctccaggagggaaatgattgggcttcaggaaagagacagacagttacaatgtaagaacaggaatttgcatcagctactaaagaatgagaaagatgaggtgcaaaaattacaaaatatcattgcaagtcgagctactcagtataatcatgatatgaagagaaaagagcgtgaatataataaactgaaggaacgtctacatcaacttgttatgaacaagaaagataagaaaatagctatggacattttgaattatgtcgggagagctgatggaaaaagaggctcctggaggactggtaaaactgaagccaggaatgaagatgaaatgtataaaattctcttgaatgattatgaatatcgtcagaaacaaatcctaatggaaaatgcagaacttaagaaggttcttcaacaaatgaaaaaggaaatgatttctcttctttctccccaaaagaagaaacctagagaaagagtagatgatagtacaggaactgttatttccgatgttgaagaagatgccggggaactaagcagagagagtatgtgggacctttcctgtgaaactgtgagagagcagcttacaaacagcatcagaaaacagtggagaattttgaaaagtcatgtagaaaagcttgataaccaagtttcaaaggtacacctggaaggttttaatgatgaagatgtaatctcacgacaagaccatgaacaagaaactgaaaaactcgagttagaaattcagcagtgtaaagaaatgattaaaactcagcaacagcttttacagcagcagctcgctactgcatatgatgatgataccacttcactattacgagactgttatttgttggaagaaaaggaacgtctcaaagaagaatggtccctttttaaagagcagaaaaagaattttgagagggagagacgaagctttacagaagccgctattcgcctgggattggagagaaaggcatttgaagaagaaagagccagttggttaaagcagcagtttctaaatatgactacctttgaccaccagaactcagaaaatgtgaaacttttcagtgccttctcaggaagttctgattgggacaatcttatagtgcactcgaggcagccgcaaaagaagcctcacagtgtgtctaatgggtctccagtttgcatgtctaaacttactaaatctcttcctgcttcaccttccacttcagacttttgccagacacgttcctgcatatctgaacatagttcaatcaatgtactgaatataactgctgaagaaattaaaccaaatcaggttggaggagaacgtacaaatcaaaaatggagtgtggcgtcaagacctggatcacaggaaggttgctatagtggatgctccttgagctacacaaattctcatgtagaaaaagatgacttaccttagacatgtggactggaatttttttcattaatgtgttcatcaagtttcacatctaagttgaaacagggtgtgtcataaagtcagttatctctaataacttaagatggtctgagttgtttgtttggacttccctgtcttcccccaaagagttgaaatcttaaatctatttaaaaggatataaaagctttggatatgtatttttagtaacagaagcatctggttctgtgaataaaggaatgtatagatgtttggatggaaacaaaagcactagactgagtttcctcttataggtattaaaaatagcacttttaggaaactgattattgtaaatgtttaattttgtctcaaatatagttggcattggaagtttagcctttacttgaatgtatactgtagatttttaacaaagcgagttctatatttattatgtttagtgtggtttgaaattacctctttcatatgttttaaataaagtgaaatttatgtatgttttgtacatagatacacatgattatgttaagaggctttaagatttaaaagtttcacacaaccataagtatagtatttcatgccagtaaaatttttttagtggtattctgtttacagatgtattaggaccattgatgcattacatttaagaattctctttaatacatctgggcaataaatattgaaaggtattccatgaagctgagttctttagataatcaacactactaacattacatttttgagatttttatgacattagatttttattttgtatatgtagaatattataatttttaaaaggactattgatgatagaagaataggggcaagacgacaaaagtacctttgaataaaacaatttaagaaattggtttaagatattggatgatagaagatatttaagatatctagatggtgatattttccttacaagatgggtaccagtatagtaatatctgtatactaactagggctttgtattgtcaataattttttaataattttttaatgaggtatttaccactgaagaaatatgataatataaaaccatcaaattttataattgagatgatactctggaaaaacatgtcatttcattttcagaaaactcttaagctctcttcagtctctgtaatgtttctgattgcatgtttcttcatgaaaagtatgttgttgttttgatagtaataataataaatgtaggctcagctctttcccaggattttcatcaaaaagctttaagtgcctaaccctgcttgtctctgtacatagaagcctgcacagatccaacccttgctaggtatcatagtttaggcccatttaccttcccctgtactggcagttcagccgcttacatgcactcaccctgtttgtggctattttaaattcatattattaaaaaacaaaaaaaacccacctatttgtgttgtccattcactatacgtaactatgtaactctttggagttgcatagcagcagccattttttcagggctgataggatatcattaagagtgtcttatgagacattagtggatatactcatagtaaccatatttatagttttaaagagctagctcttgagcattagtcactaccttcagcttgatgcatggtcacttctttactatttaaaatactacacattgtacaaaatatcgaagacactaccatatgctaaaggaagaaatctagctgggatataggatttttgttgtttttgtttttgtttgttttgctatttagcaataacatggtcaaaaaggcaatcagaaattttaaatacagttaatggatacatttggcaacaattttcccccgagggttttccatggtgtactttgcaagaaataagcactctaatttttaaagtaaatctcttattttagcaaatattatatttcatgacaatggagttctagaaagcagcatctgttttttgttgcgtgtttccattttaaagtgagttgagttctcaaattggaaagaaagattccttgagacgtacttttaaaatctaaagtgtgaaagaaacagcagagtaaaagccagactcattgcaccttcaatgtctgcatagatccagaagttgtacattttacctaacaacatcacttttgttgaacattccaactccagaatgatccccaatcaccctaatctcagaatgctggaatgatgtctgttggaaaacccaggactccacacacaaaactcctgggattttgtttcccatctctttctaggtgtttgcaatgtacaaataatacagctgtgctaatctcacatttagccatgatagatgatggttctagagtgtacttccatttgtaagtcctcctgataagtgctttcttgtttatcactatgtaaatctgaaatattttgtacttcatttgtttttatccattctgaattttcaaagcataaaaatgtcaaagaaaaattgagataaacattttgttcaccattaaatgtttgcatctgcagtctatgatgagaaacaatgaaattatgactaaaatttaacaaatagtattttcttatagaagcaatgtattaaatgattagatacacaggacagttcacagcaaattgtttacttacatggcataattgaaatactgttatttgtaaagagttctatactgcctaccttagctaaccagaattgttcatagacttgtgataatatggtgttatgggaaaacacattttgtgcgcatgatgaagagagcaccgtgaatctagtcttgactgcccctggtggaacatttgaaagcccttgggactccaggagagatgtttttgcagcatgtatgctaaatttgtgagttagcaagaccctgctgtgattactatgttgtacagatcttcaaagtatattgcctaatatgagtcatgttatttctagattgaatttaaagtaagtatggattatggaagtctagtaaatatacttttccctatttttgtcctttttcagtcttttggtaagcatttattaagtacctgctgtatgtcaaggcttactactgctttccaatccttggtgatatgaagacagataagcacgctgcctgctattaggaatctgagctgagtggaaggccaactattaaacctacattgtaataaacaatggtggatgctacggacacattcagtctgttcataaaacatggactgatgggtctgctccaggccacatttgttttttaacagtaacgtggctaggcttccatttataagtcttagcattatttcctttgtgaagtactatgtaacagatgattgtttgctagattttgttttctacaatcaaaatgttgacctgcaaagcagtgtaggattttctctcctcaagagcgtgtattattatctagtagaaaaagcattcccaaagacttggtccatgcagataaggataatgaaattgctcactctaatcctttttctaaatacagtgtttttcaagctggatgtaaattagagtgggtggatattgattaaattatttgatttatatgaaaaaaaaaaaaaaaaaaaaaaaaaaaaaa

SEQ ID NO: 56295 - DNA, 6207 bp, Homo Sapiens
gctcctggtctggtacaatggggaagacaaccctgagatagcagctgcgattgaggaagagcgagccagcgcccggagcaagcggagctcccccaagagccggaaagggaagaaaaaatcccaggaaaataaaaacaaaggaaacaaaatccaagacatacaactgaagacaagtgagccagatttcacctctgcaaatatgagagattctgcagaaggtcctaaagaagacgaagagaagccttcagcctcagcacttgagcagccggccaccctccaggaggtggccagtcaggaggtgcctccagaactagcaacccctgcccctgcctgggagccacagccagaaccagacgagcgattagaagcggcagcttgtgaggtgaatgatttgggggaagaggaggaggaggaagaggaggaggatgaagaagaagaagaagatgatgatgatgatgagttggaagacgagggggaagaagaagccagcatgccaaatgaaaattctgtgaaagagccagaaatacggtgtgatgagaagccagaagatttattagaggaaccaaaaacaacttcagaagaaactcttgaagactgctcagaggtaacacctgccatgcaaatccccagaactaaagaagaggccaatggtgatgtatttgaaacgtttatgtttccgtgtcaacattgtgaaaggaagtttacaaccaaacaggggcttgagcgtcacatgcatatccatatatccaccgtcaatcatgctttcaaatgcaagtactgtgggaaagcctttggcacacagattaaccggcggcgacatgagcggcgccatgaagcagggttaaagcggaaacccagccaaacactacagccgtcagaggatctggctgatggcaaagcatctggagaaaacgttgcttcaaaagatgattcgagtcctcccagtcttgggccagactgtctgatcatgaattcagagaaggcttcccaagacacaataaattcttctgtcgtagaagagaatggggaagttaaagaacttcatccgtgcaaatattgtaaaaaggtttttggaactcatactaatatgagacggcatcagcgtagagttcacgaacgtcatctgattcccaaaggtgtacggcgaaaaggaggccttgaagagccccagcctccagcagaacaggcccaggccacccagaacgtgtatgtaccaagcacagagccggaggaggaaggggaagcagatgatgtgtacatcatggacatttctagcaatatctctgaaaacttaaattactatattgatggtaaaattcaaactaataacaacactagtaactgtgatgtgattgagatggagtctgcttcggcagatttgtatggtataaattgtctgctcactccagttacagtggaaattactcaaaatataaagaccacacaggtccctgtaacagaagatcttcctaaagagcctttgggcagcacaaatagtgaggccaagaagcggagaactgcgagcccacctgcactgcccaaaattaaggccgaaacagactctgaccccatggtcccctcttgctctttaagtcttcctcttagcatatcaacaacagaggcagtgtctttccacaaagagaaaagtgtttatttgtcatcaaagctcaaacaacttcttcaaacccaagataaactaactcctgcagggatttcagcaactgaaatagctaaattaggtcctgtttgtgtgtctgctcctgcatcaatgttgcctgtgacctcaagtaggtttaagaggcggaccagctctcctcccagttctccacagcacagtcctgcccttcgagactttggaaagccaagtgatgggaaagcagcatggaccgatgccgggctgacttccaaaaaatccaaattagaaagtcacagcgactcaccagcatggagtttgtctgggagagatgagagagaaactgtgagccctccatgctttgatgaatataaaatgtctaaagagtggacagctagttctgcttttagcagtgtgtgcaaccagcagccactggatttatccagcggtgtcaaacagaaggctgagggtacaggcaagactccagtccagtgggaatctgtcttagatctcagtgtgcataaaaagcattgtagtgactctgaaggcaaggaattcaaagaaagtcattcagtgcagcctacgtgtagtgctgtaaagaaaaggaaaccaaccacctgcatgctgcagaaggttcttctcaatgaatataatggcatcgatttacctgtagaaaaccctgcagatgggaccaggagcccaagtccttgtaaatccctagaagctcagccagatcctgacctcggtccgggctctggtttccctgcccctactgttgagtccacacctgatgtttgtccttcatcacctgccctgcagacaccctccctttcatccggtcagctgcctcctctcttgatccccacagatccctcttcccctccaccctgtcccccggtattaactgttgccactccgccccctcccctccttcctaccgtacctcttccagccccctcttccagtgcatctccacacccatgcccctctccactctcaaatgccaccgcacagtccccacttccaattctgtccccaacagtgtccccctctccctctcccattcctcccgtggagcccctgatgtctgccgcctcacccgggcctccaacactttcttcttcctcctcttcatcttcctcctcctcttcgttttcttcttcatcttcctcctcttctccttctccacctcctctctccgcaatatcatctgttgtttcctctggtgataatctggaggcttctctccccatgatatctttcaaacaggaggaattagagaatgaaggtctgaaacccagggaagagccccagtctgctgctgaacaggatgttgttgttcaggaaacattcaacaaaaactttgtttgcaacgtctgtgaatcaccttttctttccattaaagatctaaccaaacatttatctattcatgctgaagaatggcccttcaaatgtgaattttgtgtgcagctttttaaggataaaacggacttgtcagaacatcgctttttgcttcatggagttgggaatatctttgtgtgttctgtttgtaaaaaagaatttgcttttttgtgcaatttgcagcagcaccagcgagatctccacccagataaggtgtgcacacatcacgagtttgaaagcgggactctgaggccccagaactttacagatcccagcaaggcccatgtagagcatatgcagagcttgccagaagatcctttagaaacttctaaagaagaagaggagttaaatgattcctctgaagagctttacacgactataaaaataatggcttctggaataaagacaaaagatccagatgttcgattgggcctcaatcagcattacccaagctttaaaccacctccatttcagtaccatcaccgtaaccccatggggattggtgtgacagccacaaatttcactacacacaatattccacagactttcactaccgccattcgctgcacaaagtgtggaaaaggtgtcgacaatatgccggagttgcacaaacatatcctggcttgtgcttctgcaagtgacaagaagaggtacacgcctaagaaaaacccagtaccattaaaacaaactgtgcaacccaaaaatggcgtggtggttttagataactctgggaaaaatgccttccgacgaatgggacagcccaaaaggcttaactttagtgttgagctcagcaaaatgtcgtcgaataagctcaaattaaatgcattgaagaaaaaaaatcagctagtacagaaagcaattcttcagaaaaacaaatctgcaaagcagaaggccgacttgaaaaatgcttgtgagtcatcctctcacatctgcccttactgtaatcgagagttcacttacattggaagcctgaataaacacgccgccttcagctgtcccaaaaaacccctttctcctcccaaaaaaaaagtttctcattcatctaagaaaggtggacactcatcacctgcaagtagtgacaaaaacagtaacagcaaccaccgcagacggacagcggatgcggagattaaaatgcaaagcatgcagactccgttgggcaagaccagagcccgcagctcaggccccacccaagtcccacttccctcctcatccttcaggtccaagcagaacgtcaagtttgcagcttcggtgaaatccaaaaaaccaagctcctcctctttaaggaactccagcccgataagaatggccaaaataactcatgttgaggggaaaaaacctaaagctgtggccaagaatcattctgctcagctttccagcaaaacatcacggagcctgcacgtgagggtacagaaaagcaaagctgttttacaaagcaaatccaccttggcgagtaagaaaagaacagaccggttcaatataaaatctagagagcggagtggggggccagtcacccggagccttcagctggcagctgctgctgacttgagtgagaacaagagagaggacggcagcgccaagcaggagctgaaggacttcaggaacttcctgtagaaaagcccccaaaacaaaacaaaccttaattgactaaaaagtattgcatgctcaacttaggataagcactacggcaaaggatacgaaatctaccaagcttgcaagaccagttgaagctgactcaaaaatcctaacattcagctgattgccggcaggcttagagtcaggcatctgctgcttcggtgggggcccaacgcgcatgctgggcgcccgggtgattgagatccaaagagaagggcactgtaagacaggccagatgaactggctcctcgtcatgggactggtacctcagatctgagcatggcccttgtttttggcacgtagcagagaaaggattgatttgaacttaaccttgcaaagcaagttgcctgttttagcagtagtttgttgtaggtttcagggatgacagatttggatgcactcatttaaaacgttttggtcacatatcagctcttgatgcctttcttttaaattaattatagacagagagaggcatttagctgatctcttacccctggtatttcttttttttgttgttttcgtttttttaaatcacaagtagattgccagcgtaatggagaggaaaccagattggatatggactcttttttatgcctattctggtgttgcgtttgtatatccaaatggacgttatcctctcagattcttatctggcactaatttataactattatattatcagagactatgtagcaatatatcagtgcacaggcgcatcccaggcctgtacagatgtatgtctacacgtaagtataaatgaatttgcataccaggttttacacttgcatctctaatagagattaaaaacaacaaattggcctcttcctaagtatattaatatcatttatccttacattttatgcctccccctaaattaatgactgagttggtggaaagcggctaggttttattcatactgttttttgttctcaacttcaaaagtaatctacctctgaaaaatttgtagtttaatatttgtttggtgaatttgtgccactttaatccttccactatcattcccattttgttacatttctgttatggggactttatgttgaaatattgtataaagcatttgtagcaatttaaaaataaaatatttaaaattatttaaattgttttggacgcttcaattgtattatatgtgatttacatttcactttttttgttggcgttgttaacccggagagtgctcctgtattgaactttgctgttagttattttattgcttctttttggagagtgctataaaagactattctaatgaaaacattaaaatttacaatttgacatacaaaaaggggttgtccattgattttaaccaatgtagcactgagagagagagaggttaattatagatagacaagagtggtgtttgttgtttttcccctcccagcattgaaatcattggggcttgtcagatgtattaaaaaaagatttgttgtgctattgctgcaaacacttaataactagaggagaatttaaacaatgcattttatattattgtaaccaataaaaaactttctaaaaaaaaaaaaaaa

SEQ ID NO: 56296 - DNA, 5273 bp, Homo Sapiens
ccgcggcggcggagaagcagctcgccagccagcagcccgccagccgccgggaggttcgatacaagaggctgttttcctagcgtggcttgctgcctttggtaagaacatgtcgtccatcttgccattcacgccgccagttgtgaagagactgctgggatggaagaagtcagctggtgggtctggaggagcaggcggaggagagcagaatgggcaggaagaaaagtggtgtgagaaagcagtgaaaagtctggtgaagaagctaaagaaaacaggacgattagatgagcttgagaaagccatcaccactcaaaactgtaatactaaatgtgttaccataccaagcacttgctctgaaatttggggactgagtacaccaaatacgatagatcagtgggatacaacaggcctttacagcttctctgaacaaaccaggtctcttgatggtcgtctccaggtatcccatcgaaaaggattgccacatgttatatattgccgattatggcgctggcctgatcttcacagtcatcatgaactcaaggcaattgaaaactgcgaatatgcttttaatcttaaaaaggatgaagtatgtgtaaacccttaccactatcagagagttgagacaccagttttgcctccagtattagtgccccgacacaccgagatcctaacagaacttccgcctctggatgactatactcactccattccagaaaacactaacttcccagcaggaattgagccacagagtaattatattccagaaacgccacctcctggatatatcagtgaagatggagaaacaagtgaccaacagttgaatcaaagtatggacacaggctctccagcagaactatctcctactactctttcccctgttaatcatagcttggatttacagccagttacttactcagaacctgcattttggtgttcgatagcatattatgaattaaatcagagggttggagaaaccttccatgcatcacagccctcactcactgtagatggctttacagacccatcaaattcagagaggttctgcttaggtttactctccaatgttaaccgaaatgccacggtagaaatgacaagaaggcatataggaagaggagtgcgcttatactacataggtggggaagtttttgctgagtgcctaagtgatagtgcaatctttgtgcagagccccaattgtaatcagagatatggctggcaccctgcaacagtgtgtaaaattccaccaggctgtaatctgaagatcttcaacaaccaggaatttgctgctcttctggctcagtctgttaatcagggttttgaagccgtctatcagctaactagaatgtgcaccataagaatgagttttgtgaaagggtggggagcagaataccgaaggcagacggtaacaagtactccttgctggattgaacttcatctgaatggacctctacagtggttggacaaagtattaactcagatgggatccccttcagtgcgttgctcaagcatgtcataaagcttcaccaatcaagtcccatgaaaagacttaatgtaacaactcttctgtcatagcattgtgtgtggtccctatggactgtttactatccaaaagttcaagagagaaaacagcacttgaggtctcatcaattaaagcaccttgtggaatctgtttcctatatttgaatattagatgggaaaattagtgtctagaaatactctcccattaaagaggaagagaagattttaaagacttaatgatgtcttattgggcataaaactgagtgtcccaaaggtttattaataacagtagtagttatgtgtacaggtaatgtatcatgatccagtatcacagtattgtgctgtttatatacatttttagtttgcatagatgaggtgtgtgtgtgcgctgcttcttgatctaggcaaacctttataaagttgcagtacctaatctgttattcccacttctctgttatttttgtgtgtcttttttaatatataatatatatcaagattttcaaattatttagaagcagattttcctgtagaaaaactaatttttctgccttttaccaaaaataaactcttgggggaagaaaagtggattaacttttgaaatccttgaccttaatgtgttcagtggggcttaaacagtcattctttttgtggttttttgtttttttttgtttttttttttaactgctaaatcttattataaggaaaccataccgaaaacctttccaagcctcttttttccattcccatttttgtcctcataatcaaaacagcataacatgacatcatcaccagtaatagttgcattgatactgctggcaccagttaattctgggatacagtaagaattcatatggagaaagtccctttgtcttatgcccaaatttcaacaggaataattggcttgtataatctagcagtctgttgatttatccttccacctcataaaaaatgcataggtggcagtataattattttcagggatatgctagaattacttccacatatttatccctttttaaaaaagctaatctataaataccgtttttccaaaggtattttacaatatttcaacagcagaccttctgctcttcgagtagtttgatttggtttagtaaccagattgcattatgaaatgggccttttgtaaatgtaattgtttctgcaaaatacctagaaaagtgatgctgaggtaggatcagcagatatgggccatctgtttttaaagtatgttgtattcagtttataaattgattgttattctacacataattatgaattcagaattttaaaaattgggggaaaagccatttatttagcaagttttttagcttataagttacctgcagtctgagctgttcttaactgatcctggttttgtgattgacaatatttcatgctctgtagtgagaggagatttccgaaactctgttgctagttcattctgcagcaaataattattatgtctgatgttgactcattgcagtttaaacatttcttcttgtttgcatcttagtagaaatggaaaataaccactcctggtcgtcttttcataaattttcatatttttgaagctgtctttggtacttgttctttgaaatcatatccacctgtctctataggtatcattttcaatactttcaacatttggtggttttctattgggtactccccattttcctatatttgtgtgtatatgtatgtgttcatgtaaatttggtatagtaattttttattcattcaacaaatatttattgttcacctgtttgtaccaggaacttttcttagtctttgggtaaaggtgaacaagacaactacagttcctgcctttgctgagacagcagttacactaacccttaattatcttacttgtctatgaaggagataaacagggtactgtactggagaataacagatgggatgcttcaggtaggacatcaaggaaagcctctaaggaaaggatgcatgagctaacacctgacattaaagaagcaagccaagtgaggagccaggggagataagcattcctggcaaagagaatagcatcaaatgcaaaaaggttcacactaaaggaaactcctgattaggtattaatgctttatacagaaacctctatacaaatccaaacttgaagatcagaatggttctacagttcataacattttgaaggtggccttattttgtgatagtctgcttcatgtgattctcactaacatatctccttcctcaacctttgctgtaaaaatttcatttgcaccacatcagtactacttaatttaacaagcttttgttgtgtaagctctcactgttttagtgccctgctgcttgcttccagactttgtgctgtccagtaattatgtcttccactacccatcttgtgagcagagtaaatgtcctaggtaataccactatcaggcctgtaggagatactcagtggagcctctgcccttctttttcttacttgagaacttgtaatggtgttagggaacagttgtaggggcagaaaacaactctgaaagtggtagaaggtcctgatcttggtggttactcttgcattactgtgttaggtcaagcagtgcctactatgctgtttcagtagtggagcgcatctctacagttctgatgcgatttttctgtacagtatgaaattgggactcaactctttgaaaacacctattgagcagttatacctgttgagcagtttacttcctggttgtaattacatttgtgtgaatgtgtttgatgctttttaacgagatgatgttttttgtattttatctactgtggcctgattttttttttgttttctgcccctccccccatttataggtgtggttttcatttttctaagtgatagaatcccctctttgttgaatttttgtctttatttaaattagcaacattacttaggatttattcttcacaatactgttaattttctaggaatgatgacctgagaaccgaatggccatgctttctatcacatttctaagatgagtaatattttttccagtaggttccacagagacaccttgggggctggcttaggggaggctgttggagttctcactgacttagtggcatatttattctgtactgaagaactgcatggggtttcttttggaaagagtttcattgctttaaaaagaagctcagaaagtctttataaccactggtcaacgattagaaaaatataactggatttaggcctaccttctggaataccgctgattgtgctctttttatcctactttaaagaagctttcatgattagatttgagctatatcagttataccgattataccttataatacacattcagttagtaaacatttattgatgcctgttgtttgcccagccactgtgatggatattgaataataaaaagatgactaggacggggccctgacccttgagctgtgcttggtcttgtagaggttgtgttttttttcctcaggacctgtcactttggcagaaggaaatctgcctaatttttcttgaaagctaaattttctttgtaagtttttacaaattgtttaatacctagttgtattttttaccttaagccacattgagttttgcttgatttgtctgtcttttaaacactgtcaaatgctttcccttttgttaaaattattttaatttcactttttttgtgcccttgtcaatttaagactaagactttgaaggtaaaacaaacaaacaaacatcagtcttagtctcttgctagttgaaatcaaataaaagaaaatatatacccaaa

SEQ ID NO: 56297 - DNA, 7250 bp, Homo Sapiens; identical to SEQ ID NO: 29547

SEQ ID NO: 56298 - DNA, 8448 bp, Homo Sapiens
ctcctgctccgtctaggagtcaaaatggcggcgaggggaacctggagcagtcccggagcctgagccactgacaggagaggagagggcggcggcggcggcggtgggaggaggatggccgggggtgctggcgccggtgcggacggcggtgctggtggcggcggcggcggaggcgacggcagcggtcccagcggcagcagcagcggcgggaggagcctccgggaaatggatgaaaagaggctgctggatccagggttgaaggttcataaaggcctctgggattatactctgaagaacccgcagacggaatgcctgagtgactgaagaaaatgggtgctaatgcatctaattatcctcattcatgttccccgagggtagggggaaattcacaggcccaacagacttttatagggacctcatcctattctcagcaaggctatggttgcgaatcaaagttgtatagccttgaccatggccatgagaaaccacaagacaaaaaaaagagaacctctggtcttgccaccctcaaaaagaagtttattaagcgtcggaaatctaataggtctgccgatcatgccaagcagatgcgagaactcctctctgggtgggatgttagagatgtcaatgcattagtggaggaatatgagggaacatcagcattaaaggagctttctctacaagccagtttggctagaccagaagcccggacattgcagaaagatatggctgatctttatgagtacaagtattgtactgatgtagacttaatatttcaagaaacttgttttcctgttcatcgtgccattttggcagcaaggtgtccattttttaaaacactgctttcttcctcaccagagtatggggcagagataataatggacatcaatacagctggtattgatatgcccatgttttctgctttgttacactacctttatacaggagagtttggaatggaggactcaaggtttcaaaatgtcgatatccttgttcagcttagtgaagaatttggaacaccaaattcccttgatgtagatatgcgtggactctttgattacatgtgttattatgatgtcgtccttagtttttcttcagactctgaactggttgaagcttttggtggaaatcagaactgtttagatgaagagctcaaagcccacaaggctgttatttctgcacggtccccattttttcgaaatttattacaaaggaggatacgaactggtgaagaaatcacagaccgaactttgaggactcccacaagaattatattagatgagtccattataccaaaaaaatatgcaacagtgatattacactgtatgtataccgacgtggtggacctctctgttttgcactgtagcccctctgtggggagtctcagtgaagttcaggctctcgtcgcagggaagccaaacatgaccagggcagaagaagccatggaactttaccacatagcactgttcttggaatttaacatgcttgcacaaggctgtgaggatatcattgctgagagcatctcattagataccttaattgccatcctcaagtggagttctcatccatatggctctaaatgggtgcaccgacaagctttacatttcctctgtgaggaattttcccaggtcatgacttcggatgttttttatgaactcagcaaagaccatctgcttactgctatccagtctgactacctacaggcaagtgaacaagatatccttaaatatctgattaaatggggagagcatcagttgatgaaaagaatagcagatagagagccaaacttactgagtggcactgcccatagtgtgaacaaaagaggtgtaaaaagacgggacctggacatggaagagctcagagagatcctttcttctctcttaccttttgtgcgaattgaacacatcttacctataaacagtgaagtcttaagtgatgcaatgaaaagaggcttgattagtactcctccatcagatatgcttcctacaacagaaggtgggaagtcaaatgcctggttacggcaaaaaaatgctggcatctatgttcgtcctcgactcttctctccctatgtggaagaagcaaagtcagtgctagatgagatgatggtggaacaaacggatcttgtgcgcttgcgaatggttagaatgtccaatgtgccagacacgctctacatggtcaataatgccgtgccacagtgttgtcacatgatcagccaccagcagatcagcagcaaccagtcaagccctccttcagttgtagccaacgaaattccagttcctcgtctcctcattatgaaagacatggtcagacgactgcaggaactgcggcacacggagcaggtgcagagggcctatgccctgaactgcggggaaggcgccactgtcagctatgaaattcagattcgagtgctaagagagtttggtcttgcagatgctgctgcagagctgttgcagaatcctcacaaattctttcctgatgaacgttttggggatgaaagtccactcttgacaatgagacagcctgggagatgtcgcgtaaacagtacacctcctgcagaaaccatgtttacagatctggactcttttgtggccttccatccacccttgccccctccaccacctccctaccaccccccagctaccccaatccataaccaactcaaagcaggctggaagcaaagacctcccagtcagcacccttcacgttcattttcttatccctgtaatcattcgctgttccactccagaacagctcctaaagctggccctcccccagtctacttgccgagtgtgaaagctgcaccgcctgattgtaccagcactgcaggactgggcagacagacggtggctgctgctgccgccaccaccacctcaacagcaacagcagcagcagcagcagcatctgagaagcaagtgcgaacacaacctgtgctgaatgatctgatgccagacatcgcggtgggtgtgtccacactgtcactcaaggacaggaggcttccagagcttgctgtagacacagaattaagccagtcagtttctgaagcaggaccagggcctccccagcatctgtcgtgtattccacagagacatacacacacttctcggaaaaaacacacactagagcaaaaaacagacaccagagaaaatccacaggaatatccggatttctatgacttctcaaatgctgcttgcagaccttctactcctgctctcagcagacgcaccccttccccttcgcaaggtggatattttggtcccgatctgtacagccacaataaggcatcaccaagtggcttaaagtcagcctacctacctggtcagacgtctcctaaaaaacaggaagaagctaggagagaatatccactttcccctgacgggcatctacacagacaaaagaatgagccgatacacctggatgtcgttgagcaacctccccagcggtcagactttcctttggcagccccagaaaatgctagtaccggtccagcccatgtcaggggacgaactgcagtagaaactgacttgacttttgggctgactcctaacagaccttcactttctgcatgtagctctgaagctcccgaagagagatccggtagaagactggcagacagtgagtccctgggccatggagctcagagaaatacagatttggaaagggaagattcaataagcagaggaaggaggtcaccaagcaagccggacttcctctacaaaaagtctgccctctgagagcaacctccaagtcgtctgtgcctgagatgtgaaacatcccattttatgatgtaacccaacaacttacagaccagttcatcaatgccagctgataactcggtttcacatgattttgttctagtttttgtgtatatatgtgtttattagacatggcatgctaagaaggttttgttttttttttttaatgttgcatctgtctaatttgtctttgaacaattatgtcgggaggcatttttaagaacaagcaggctggcactttttatttctctttacaaatgatggaatttttttgcacttgtacatttattttctctgtattgattttatatcagtatgttaaactttattgccacatttaaaggactgtattttcatacttttttgcattttacctttcatctaccaatccatgtgcattggattgcacactaagatgtattttcttacgaaatagttctgtgtttattttttaattatagaaattccaaagaacagcacatcagaatgctcctctcttttcagtaattgttttagttcagagatcttcccgctcagcctccataaatctaatgtcattttttttttaataagtcctaggagctgggcttcattcctccagcgggagtccagtcagggtcctgaagtttgctggttcaggaaagaacaggaaagagaaaagccttctgtgcccaggctaaagctgttacatttccacagtgtggatgcagtcagaatccctgcacattctggtcataaggattagagtcaccagatgaggctctaaacagatcgcatcccttggaattagaaagcagtggagaccgggcgcagtgactcacacctgtgatcggcacttcggaaggccgaggcgggcagatcactgaagctcaggagttcaagaccagcctgggcaacatggcgaaactccatttctataaaaaatacaaaaaaaaaaaaatctagccaggcgtggtggtgcgtgcctgtagtcccagctacttggggggctgaggtggcaggatcgcttgagcctgggaggttgagactgcagtgagccaagattgcaccactgtgctcccacctgggcaacagtgagaccctgtctcaaaaaaaaaaaaaaaggcagtggaaatagagaagtaacttaaaggtcacactgacagaatttctggttctgagcgtcaactctccagctgtgatggcggaactgactgcttgctgcctttaattgtcttgctctctatgggaaaaaaacaaaagggcttcagtctcatggatgttatttggtgtttgtaaagatacgttttcttttaaacgattttcaaaatatgtctaaattttggtgttgtgtaatgcataatgctttctcaccaacagaaaaaaggaaaaaaattgttttcagttaaacactacatgtcctacttgaactccactgggacgctggtttggcatttactaaaccactgagcacatggggtctttcaggatcctctcccttggaagggcaatgtgtgagctaaggactgttttttttcttactctccaatgtaaatatatgagtatttgagtttttaaatcacttcaacattatttgagcatttactttgtatttttacaaacacataaacacacagccgtagcacttagaagaaaagaggctttctaagcattccttcctctgcaggatatttgggatcctcttttctatgtatgtatatatataaaaaactatgaatcactcacactcactcgaaaactatgcagggctagggagcgtttatgagctaccgggtaaatgaattacatgcactttgaagtaaataggttttctattgggtgtcaacaacgctgatttctcccaaaactatagtttctcttacggtcttttcctcctttaccctgtggatatacactcaggaataatctgacattttagaaaagccgaacagtagatagtctccaagatgggaaacatgtcgtgtgtctgcacgccccggcaaactgccgccactcgttctgctgcctgactggttagctgctgtgcgggtgcgctcggtgacactggtggtggtgcacgctcccgagctcccagagttaacactaatctgcaggtcggctgtgcatcgcattcgaggctccttttttaaagagaaaagcataggcctctgttctcatttgtaagaagtttgactcataatagaagacggtgtcttttgaagcccagtctctgtctgtcttcagaaacaaaagtgaatgccgtcatgttccttgatgtgtgtttctgccacatatgtatgttgacatgttcatgtactgcgccggtactgcaagtaagactcaacagacctaatttggatggggagaaaaactctcatccctgacccttccccccccgcaaatgttagaccagagctgttgatcccacacattcatttttctgaaaattcatgaactattctctcatatccctgaaatataaaagtaagtggccactattcctaagattatttagtttataaagtttgcttttaatcatacaatagcttacctggctaaaactttgcgtataaagggaaaacttgctttaatctgtgggattgcggaccgatgcgacttgcagaaggtaaacaggcgtgggttttgtgtgcgttaggttaggtgttagtggacttttaatgtatcttgtgaagtatggttactagggtaggttcaagagctacatgcctctggcttttgaacccatctattaaatcttttttaatgctgtactaagataaatgtgaagtctgagtaaggttgctctcagaaaaaaaaaaaaagcatatatatatataaaataaaatttaggccatgggaactggcattttacttggtataggaatttaatgagaaccaaatcacaaaaataccagatctccttttgagatcgtggacaatcaggcctttggacaatcaccgcttccagtgcccgctgtgcgttgaggttagagacctaccgtttacacgctagagccgagaggacgttcaagtttcttaaagatgctgttggtcttttttcttatgttattgttttagttttgtgattttgatgaataattgaagttcagagtcacccgtggctcctaaggaaaaaacagcatcatgaaaggcaaaaagtatttgaaacgtaattgtttcaattttccacgcccgttctcacatgccccctttagctttatttctgggaacatgtcactagacctcagctagcctgacaccgcaataacccgttaggctttgaggcttttcagtgaattcttgacatttaaatcttcttatagaattctttatgaagccttaactaattcttgtttttgcttcctcagaaactttttattgcatctgccatccttcattggatttttgttttggtttgttgttgccattctagcaatgagcttagtccttgtacatctgcattaaggtgccgatgcagaaggcaaattggaaacacgcgccagcggcagtggggctcaaagccgacctccatgcatcattctctagagttgaaaggattgacatttctcagtaactacccggcaaaatatatattttcataatgttgaatttgccttttaggaaaacaatgtttcatgaaacacttgtaagatacttattttgaaattaattataaggcattcatatttttaggactgaattcaaagggaaatgcttctttgactttttttcattgttcggttgactttcagctttctggagtgacaaagcagcagtgatgggtgctattcctggttctgtggtggtttactttgtctactaagtgatttactttcaaacctcattacagataatcttactaaaagacttaacatgcacactgctaaaaggtgttttactgttttccattaacgctgttgtatgaacaatatttggtgacatgttgtctttttgtcctgtagattgtcatatctgttatgtagttatccttttggcaagtcctttgatttttttttcctctagaaaatcctcagactgtcaatcttccatattttgaatattataatgctgtggccatttctatagaaagattacttgcaagtgtgtgtcttgaaaataacctcttgtatttgtgtgtttatgtgagttctgtctaagagatcagataagctctggaagcttcatcatctgtacctacatgtaactgtatctgggttacatgggcaggcggtaccaagtcctgctcttcgatggggtggctgagagataaaggttcctgaactctccttgctgtgtatgcaccacatctgtacttcagagaggtggaaaatcatctacaacactgcgtttcttgtggttgtgctgttactggtataaagtcaagtgccttcaatgctaaaggctcagaaatttttcttaaactgatttcatgtcctatgcaagtgttttctacaacctgcataaccagtactttgtaaaacttgtttacgcttcaattgtacatagtgatttttaaagaaatatatagtatttttatttaggtacctccaaacttgaattcgtctgtgtgaagcattgtaaaacgatacatttctcttttgagtaccattacagttgtacagaggttttcactgcttctatttttctactgttactgataagcatgtaacactgactttatcctacatatagttggcatttcaaataaatggcttgtatagaa

SEQ ID NO: 56299 - DNA, 4564 bp, Homo Sapiens
ccggggccctacacgccagacctggctcggggtgggagtgcagaggcaaccaaaaaggaacccacacctccctccagggcccggggcgctgtcagacggggcagcaaccaggagattccctgggcctgcaggaagcccttccgcggaccgaaagattgttccccattttggagatgaagaaactgagactcaaagcagctgagtgaccttcccaaggacacacactgaactgggcggtgatcaggatctgaatgcacagggcgggtgttcagcgattgtttactacgttgaacgtgacctccaggaaagcagttctggccgagatcccctgacaacgcaaagcaagaagtaacgtggaaggaggctccccaagctggctggccattttgctgctgtgtgtggaggtgctgccagtggcatgcccaaacccaaagctggaagaggaataaattacaagtggtcaaggttgcatccttttgagcccaggacctgcttgtaagccgagagggttctctggccctaatctagccaagcaccatggagagaatcagtgccttcttcagctctatctgggacaccatcttgaccaaacaccaagaaggcatctacaacaccatctgcctgggagtcctcctgggcctgccactcttggtgatcatcacactcctcttcatctgttgccattgctgctggagcccaccaggcaagaggggccagcagccagagaagaacaagaagaagaagaagaagaagaagaagaaggatgaagaagacctctggatctctgctcaacccaagcttctccagatggagaagagaccatcactgcctgtttagttaggcaggaagcagaggtgtttcctttctggggctaagcctccttctgaccacacacagacatttcaggaacccctgaaataatgcactatgtccatgtccacagagtaactactcaaccaaggaacaaacctcagactaagtgtcccagtggagggcagtcccagggaccacgtggacaattcttggatactgtcttggcagctatgtgtccaatagcaatgctccttactgcagacccaggcatgcctcccacctgtctctggcataccccacatgcaaagcacaaagaacatttatccatacatctcaatatggttcccaagtgtgtgcacatgcacgtaacacacacacacacaaattcaggtagcaggtacgtgggcaagtatattctgctcatcaaatggtcattggctatgtactttgtgcagggaagtacattatctacagtcacaaaaatgtctcatgggaaagccttgccagattcagacacatatatacaatttcctaaccagcaaggcccccatacaccatctattccataaaccactcaggttacagatgcatgctttcctatttctaactctacacataaacttttactggaagtactcataattggacattccagcaacctgctacagtccccacccttgtgtgtcttgatacagacacaccaagtttctgtgcctctgacccctcacctgtgccaagatgtttaaagtgtgatggttcaaaattcattgaaagctcttttcttgtaactcatgacaaagtccgtcctcattgccactgagaggtgtttaatgtgatccaagacctctctgtgaaacattacccccgcaaaccactcagcaaagtgcctttctccaagcaagaacaaagagctcttggtggtgactgctagaaaattatggaagcccactcatttatgtcagtggactgcaactgtgtacctgtgcaatgtttacagatggaaagggtgaggagatgctacacctgagctaggtatctcctatataaccaaagtttccagcagggaaggaactagacaatcatcagtgcagtctcacagaaggcaacactggaagtgatgtcataaggttgtgatgtgtgcacggtatggcacaggtgggatgcagaggtaacagagtttaaatgaaagtaggatgaagctataaagaggtttatttatatttatattgaagctcaggcaagtgccttgcacacagtaggtacttataactaactgtggttactgttggatatgtgatgttgttaagggtaagcttgtaatacctcaccagttctccccgagtgatcttctcttctaagtgagcccactaattgctgcaatggatgaaattgggtgtttaatgctggagagcacatgtaggtgacacatgtgccttgaggtatgtgaggacatgtaaattagatccacagtgagctgaggagggctttccccgccagagtgaggttgggaagcagagttaatccacttataggatgaactgcttggtatttttattgtattgtgactgtattacaaagatggacaattcactccttgggagcaagttatgctctagaagtttatttacaaatatgctgggcagctctcttgaaatattttcccaaggaagctattctacacagtggcaaaattgctatctaattaataatgtagctaaactatgatatttatagtagcaaaaaactaaattctataagattgcattaaaggaaagatatattctatttgctcacttgggctgcttggtactcacctgccctccaggtgtactttaggcctgtggagggtgggcatttagtggtgacccttgcaccagggttttctaacagatgaccctgtgaatcataatttaaacctgcatatattttatagccagtcacatttgccctctcaccctatatggccataaactgcctaagcactcaggcctcccactcatcaacccctttgaccagagaaagaagcactctggttctctatccccttgtcacatagagagtttgtcatggggcctctggctgtgcccttcacataacagaatgacttgccatctgcctgcaccaaacccagggatgtggaagacatctccccacaactgccactgctcaccaggacaagctgcccttcctgtctccacctctcagtccccctagaatggatggctggggagaggtggaggctgacagctgagacgtagtgtcagatatgatctaggagggcggatcaccgggatccgggaccatacaagtaacatggtttccatggcaactgcttgctcctttgaattaagacagcagtcagttgtcattgccatgacaaggcctctatctccaggcacaatgtccctgctgtctcctaatccaatggacttgctctcaccccagggatgaaacacccagaaactcacttctcagtcacttccacagccgatgactcagaagagccaaacccagaatggggcctctcttttccccatcacagactcccctgacaacctttcctggcgtaactagaggagtcccagtgcaggataggccctaaacgttttgttaaataaacaggtgcatgaaaggagcctaaggccattgttgatatccactctcttctttccacttccttctcatctttttctccatgttttatgcttctctgattccctcttctgcctgcaccagaccagccccagccctttattcctctccattttcactccttccagcctctgtccctgaactgccactggcaacccatgggacctcaggaccagagactgcttgactcatctggggagggtaagttcacgggggacaaaaaaatgattcctaaagaagaggcttcctagaccagcacaggctcgagaaagacatcccctaggcctggacttctgagcagctttagccaggctccggacggcagccagaggaggcctttccccattgctcctttccccattgctcaatggattccatgtttctttttcttggggggagcagggagggagaaaggtagaaaaatggcagccacctttccaagaaaaatataaagggtccaagctgtatagtatttgtcagtatttttttctgtaaaattcaaacacacacaaaagaaaaatttatttaaataaaatactttgaaaatgaaaagtcttgatgtagtcagatggttactctcttaacattaggtattacccccactcagacatcactcagaaatgatcaatgcagggactctttctgtgacacaaatgtcccagccctccctggtcaccgccttcgccatggtagagtcataggtctgaggatgaggaatgtggctgtctcacccttgcttgcaaaacagatggccttggagaccagactccctcaaaggtgccagctacaggaaaaatatactgatgttccttggcaacacttacagaactttccatcaatgaggtccatcaatggcttcttaaaggaaaaggggggaaatagcaaaaacctaaggaagaatggacctttgagttaaatccagtgtttgttgggaaaggagggatcaaaaacctctatagtagccactagggcaaaaactgtgtgtatgtgtgtgtgtaagtgtgtgtacactgttcaatatggttcaatatggtaccaatagccacatgtgactatttaaattcattgcaatgaaataaaattaaaggtatactagctc

SEQ ID NO: 56300 - DNA, 4799 bp, Homo Sapiens
gaattccgttgctgtcggcgcgcagcagcagcagcagcagcagcagcagcagcagcagcagcagcacccgcatccgctgcgggagtccgagccggaaccacacccaagtagctgccctttcctcttctgtcatctcaccgccccaccacagaccgcgttccccgaggaaaccggccgcccacgcccggagcatcctcccctgttgagcgggcgctgacggacccggcggcatgatgcggctgcgaggctcggggatgctgcgggacctgctcctgcggtcgcccgccggcgtgagcgcgactctgcggcgggcacagcccttggtcaccctgtgccggcgtccccgaggcgggggacggccggccgcgggcccggctgccgccgcgcgactccacccgtggtggggcgggggcggctggccggcggagcccctcgcgcggggcctgtccagctctccttcggagatcttgcaggagctgggcaaggggagcacgcatccgcagcccggggtgtcgccacccgctgccccggcggcgcccggccccaaggacggccccggggagacggacgcgtttggcaacagcgagggcaaagagctggtggcctcaggtgaaaataaaataaaacagggtctgttacctagcttggaagatttgctgttctatacaattgctgaaggacaagagaaaatacctgttcataaatttattacagcactcaaatctacaggattgcgaacgtctgatcccaggttgaaagagtgtatggatatgttaagattaactcttcaaacaacatcagatggtgtcatgctagacaaagatctttttaaaaaatgtgttcagagcaacattgttttgttgacacaagcatttagaagaaagcttgtgattcctgactttatgtcttttacctcacacattgatgagttatatgaaagtgctaaaaagcagtctggaggaaaggttgcagattatattcctcaactggccaaattcagtcccgatttgtggggtgtgtctgtttgtacagtagatggacagaggcattctactggagataccaaagttcccttctgtcttcagtcctgtgtaaaacctttgaaatatgccattgctgttaatgatcttggaactgaatatgtgcatcgatatgttggaaaagagccgagtggactaagattcaacaaactatttttgaatgaagatgataaaccacataatcctatggtaaatgctggagcaattgttgtgacttcactaataaagcaaggagtaaataatgctgaaaaatttgactatgtcatgcagtttttgaataagatggctggtaatgaatatgttggattcagtaatgcaacgtttcagtctgaaagagaaagtggagatcgaaattttgcaataggatattacttaaaagaaaagaagtgctttccagaaggcacagacatggttggtatattagacttctacttccagctgtgctccattgaagtgacttgtgaatcagccagtgtgatggctgcgacactggctaatggtggtttctgcccaattactggtgaaagagtactgagccctgaagcagttcgaaatacattgagtttgatgcattcctgtggcatgtatgacttctcagggcagtttgctttccatgttggtcttcctgcaaaatctggagttgctgggggcattcttttagttgtccccaatgttatgggtatgatgtgctggtctcctcctctggataagatgggcaacagtgttaagggaattcacttttgtcacgatcttgtttctctgtgtaatttccataactatgataatttgagacactttgcaaaaaaacttgatcctcgaagagaaggtggtgatcaaagggtaaagtcagtgataaatcttttgtttgctgcatatactggagatgtgtctgcacttcgaagatttgctttgtcagctatggacatggaacagcgggactatgattctagaacagcactccatgtagctgctgcagagggtcatgttgaagttgttaaatttttgctggaagcctgcaaagtaaaccctttccccaaggacaggtggaataacactcccatggatgaagcactgcactttggacaccatgatgtatttaaaattctccaagaataccaagtccagtacacacctcaaggagattctgacaacgggaaggaaaatcaaaccgtccataagaatcttgatggattgttgtaatggtctcaaatcccaagatttaaatcacttacctatttaattgtggaaaatgattatgaagaacatgtgtatttctatctggtagtgatgtatattttacatttgtcatttcagtgttactggagttttcttcattgtgcacacaggacaaatctgatctctttgggaaaaaatagaaataaaacaatctccctccataatgtgagcaatattacctcgtgcattgtataatttgatgtaaaagaaatagttaccaatgctagcttgtgtggtcttccatgatttatttgtgttttgtgaattttcaatttatggtgatgatctgctgatatgcatttataaagtaagctctgttgtacagtctgtccaaatgggtcaaggttgcctttagaagcaaatagtgtgattttcaagacttcaaatacaaatttagtttaagtgtttgaacaactatatgcacttacggttgtgtgtttaaaatgtctctctctcaccctagcttcatgatgtgactcttaaaaaactataatagttaacaactgttagtaagatagaccaattctgattagactttatcagggaatctgtttaagatatgtttggtgaccaaaacgtatgtgtgaatgtagttataatgcttttgaaaaattttcctttttctatatccccttagtccagcctctcttctcagacatttagctatctgcctctttcctttagctgggaaagtgagagctggcatactatgcagtttttatgttttccatagtaagtcagaaaatgcctcctatttctggcatcagaactttgccatttgtctacagaagacgaaccagagacaaaattactaagtataaattagtcaagtttatcagtctaaaaagcgaagggatgtgcaactgcagctctttaagaagtttttttttttagcttctagggtaaagataaattcagaaatgctctaagctaccaaagttattctgaaagtatgggaactgctacaactaacaaacatttgtttccaagcctgtcattaagagtctgcatcaagagatttgtcctccttgggggaccactggatcattccagatttcttgtgatttttctattgtgtaattcttggtgggctctgtagtttaataataagaaaaaggccatttcattttaaattgtgacctataattctttgtcttgggttggtaattcaggattcatttggaaagtgggtaaaaggggcttcaaaaaacggatagaacaggattttctaggagttacacatacattttatcctgtcatacctcgagataaagtggcatgttagtgaggagttctgatattaagcacacacacacatgcacacaaatggacttctctgaagctgtgtttagtgaaatgagctcaagtacatgaatgttagttgttatcacatacagcaaattcctttttttttctttttctatgagcacactctgctgcttctaaactttacatgcctgatggcaccttactccagcagcctccaggtgctttcattttcacttccagtctaagccagtggctcctgccactgccctcccattacctagatggcacctcctttggtgaaaccacggccaatgttccttagctgcaccaggcccgaagctgttcccatgcttgagcttccatggggaggatgctgagtgagcagtttcctacgccgtggatctagcaagccatggagacaggtagcatttgtaagatgctgcacaggagcagcattatccccaaagatattacagggtagacacgttttaactgaaatcaatcaagataactttattcaaagagcagcccgctttgtgtgactaaaatgaaacaagacagttgaattgtgtgacttgaagattaccaatgattttgaggcttttctataataaaaagaggttctaaccattatttgggaacaaagagagttttcatcttttttcagatcaaaaccattctgtaaaatctttgttgtttaattaaatgtgccgttatttacccctgatgttatttatgactatgtgccgattcctgcttgggctgtttgctgttggctggtaataatatatttgatttaaatgctgttgactgtgctattaactgctgccgtcagtaaactccaaagatctttttgttttggctttagtatcatatgtgctttttctgtatcctgagcgctctatatgatcatgttaatttaaagctttatacacattgttgtttttgctggtctcatctttggtaatatgctataccccactgctgcccgacactgccctttagctgcagagctggattagctgttgaccatttgatgctgttgtctgtctggcagggactgaatgacctgatgtcagatttagattcttcctggggattacacagctatgaatgtatttgcttctaaaacctcccaaagtgaatctaatcttaaaactacaagttgtaagtattctgaaattgggaaacatttattttaaatgcaatcaggtagtgttgctttttacagcataataaatatatgtttcaaaa

SEQ ID NO: 56301 - DNA, 2005 bp, Homo Sapiens
atgcgcagcggggccgtgggtgtacgcggcgcagcgcggcagtcctgatggcccggcatgggttaccgctgctgcccctgctgtcgctcctggtcggcgcgtggctcaagctaggaaatggacaggctactagcatggtccaactgcagggtgggagattcctgatgggaacaaattctccagacagcagagatggtgaagggcctgtgcgggaggcgacagtgaaaccctttgccatcgacatatttcctgtcaccaacaaagatttcagggattttgtcagggagaaaaagtatcggacagaagctgagatgtttggatggagctttgtctttgaggactttgtctctgatgagctgagaaacaaagccacccagccaatgaagtctgtactctggtggcttccagtggaaaaggcattttggaggcagcctgcaggtcctggctctggcatccgagagagactggagcacccagtgttacacgtgagctggaatgacgcccgtgcctactgtgcttggcggggaaaacgactgcccacggaggaagagtgggagtttgccgcccgagggggcttgaagggtcaagtttacccatgggggaactggttccagccaaaccgcaccaacctgtggcagggaaagttccccaagggagacaaagctgaggatggcttccatggagtctccccagtgaatgctttccccgcccagaacaactacgggctctatgacctcctggggaacgtgtgggagtggacagcatcaccgtaccaggctgctgagcaggacatgcgcgtcctccggggggcatcctggatcgacacagctgatggctctgccaatcaccgggcccgggtcaccaccaggatgggcaacactccagattcagcctcagacaacctcggtttccgctgtgctgcagacgcaggccggccgccaggggagctgtaagcagccgggtggtgacaaggagaaaagccttctagggtcactgtcattccctggccatgttgcaaacagcgcaattccaagctcgagagcttcagcctcaggaaagaacttccccttccctgtctcccatccctctgtggcaggcgcctctcaccagggcaggagaggactcagcctcctgtgttttggagaaggggcccaatgtgtgttgacgatggctgggggccaggtgtttctgttagaggccaagtattattgacacaggattgcaaacacacaaacagttggaacagagcactctgaaaggccattttttaagcattttaaaatctattctctccccctttctccctggatgattcaggaagctgacattgtttcctcaaggcagaattttcctggttctgttttctcagccagttgctgtggaaggagaatgctttctttgtggcctcatctgtggtttcgtgtccctctgaaggaaactagtttccactgtgtaacaggcagacatgtaactatttaaagcacagttcagtcctaaaagggtctgggagaaccagatgatgtactaggtgaagcattgcattgtgggaatcacaaagcaaatagtactccagaaagacaaatatcagaagcttcctattctttttttttttttttttttttttgagacagggtctttctctgttgcccaggctagagtgcactggtggtcacggctcactctagccttgaattcctgggcccaagcaattctcccacctcagcctcctgagtagctgggactacaagtgtgcaccaccatgcctggctaattttttgaatttttgtagtgatgggatctcgctctgttgcccagggtggtctcgaactcctggcctcaagcgatcctcccacctcgacctcccaaagtgctgggattacaggtgtgagccacctcgcctgggcccccttctccatatgcctccaaaaacatgtccctggagagtagcctgctcccacactgtcactggatgtcatggggccaataaaatctcctgcaattgtgt

SEQ ID NO: 56302 - DNA, 3023 bp, Homo Sapiens
attccacttccggaaggttgcggagaacatctgcggcggccgcattccggagccaactgcctccctccgtctctgccaggcatggcggcaacctcacaccttccctttgctgcgtttctataaatgctttgaaaaaattactcttttcttccctcgctggaaaacaccacaaccagctcctcagagtgtgtcacagagtcaacaggctctcgggccagagggcctgagaagaggactgtcgcaccgtaagatcgccacatccggtcctcggttactatggtaacagctgcaggcacaacttcgtgccctttgacctccccccaaaagtccttgtcccgcttgggtttcccttctcgcccgcttttgcacttatgatctgtaaacctgctccttatcatcgttcccacaaggaatttgggtcccaacaggtcggcacccaggactctcagaccgccgccctcccctaaagacctctgaccgtgcccccggtgtagtccagcaacctggacgcagtctcggctttccactaaggtcaagcccggggctttgtagtatagcctcagcgtgtccacgccccctctcccctaggtagtaggccccgccctccgctccgccgccccctccaggtgagtggtaggttctcccgggagcgcaaggtagtgatgacacgcgccccccctcctccgaacgcgagttggtagcgtccgtgacggagttagcctggtcctcccacgcgcgcctccttcctcgccgccggggcgccctctcggtgccactggctctcacgtgccagtagcccaccccgcatcatcctctcgcctcgctcctggagggaagtgactatatctcccccgtccgccttccatcgccgccgcggcggtaattctgtcgggcccgcccgctgacgtcacctgctagccccgcctcctctagggtcccgggcccctgcggcgggggctgccccggggggcagtcagttgaggcggcgggagctcggcggagggcgggccaggtgactggtccgggccatgccgaggaagaagccattcagcgtgaagcagaagaagaagcagttgcaggacaaacgggagcggaagagagggcttcaagatgggctgcgctccagttccaacagccgcagcgggagccgggagcggcgagaggaacagaccgacacctcggacggggagtctgtgacccatcatatccgcaggcttaaccagcagccttctcaggggctgggtccacgaggctacgacccaaatcgataccgactgcattttgagagagacagcagggaggaggtagagaggagaaagagagcagcccgggagcaagttctacagccggtcagtgctgagttgttggagctggacatccgggaggtgtatcagcctggctcagttctggactttcctcgacgtcctccttggagctatgagatgtccaaggagcaactaatgagccaagaggaacggagcttccaagactatcttgggaagattcatggggcttactcctctgagaaactcagctactttgagcacaatctggagacatggaggcagctgtggcgggtgttagagatgtctgacatcgtcctgcttatcactgatatccgacatccagttgtgaatttcccgccagcactttatgagtatgtgactggagaacttggactggccctggtgctggttttgaacaaggtggatctggccccgccagctcttgtggttgcctggaagcattatttccatcaacactatccccagctccacgtcgtccttttcacctcttttcctcgggacccccgcaccccacaggatcctagtagtgtcttgaagaagagtcggaggcgggggagaggatggactcgggccctggggccagagcagttgctgagagcctgtgaagccatcactgtggggaaagtggacttgagcagctggcgggagaagattgctcgggatgtggctggggccacctggggtaatggctctggggaggaggaggaagaggaggatggcccagcagtcctggtggagcagcagactgattcagcaatggagccaactggcccaacccaagagcgctacaaggatggggtggtgaccatcggctgtgtgggtttccctaatgtgggaaagtcctcgctgatcaatgggctggtggggcggaaagtcgtgagtgtctccagaaccccgggccatacccgatactttcagacctactttcttaccccctctgtgaagctctgtgactgcccaggcctcatcttcccatctcttctgcctaggcagttgcaggttctggcagggatctaccctatcgcccagatccaggagccctacactgctgtgggctacctggcctcccgaattcccgtgcaggccctgctccacctgcgccacccagaggctgaggacccctcagcggaacacccctggtgtgcctgggacatctgtgaagcctgggcagagaaacgtggttacaagacagccaaggcggctcggaatgatgtgtacagagcagccaacagtctcttgcggctggcagtggacggccgcctcagcctgtgttttcatcccccaggctacagtgaacagaaaggcacctgggagtcccatccagagaccacggagctggtggttttgcagggcagggtggggccagcaggtgacgaggaggaggaggaagaggaagagctgagcagctcctgtgaggaggagggagaggaggaccgggatgcggatgaggagggagaaggggatgaggagaccccaacctcggctccagggtccagcctggctggccgaaacccttatgccctgctgggtgaggatgagtgctgagttcctcgcccagcgccatcttccctcccagtatctttgcttttggactgacctgggggtatctcccctctgccaccccaattgtgaataaagattgtttgctttgtagccccttccccagatgaactgaggtgagagcggctgttccaggctaaaaaaaaaaaaaaaaaa

SEQ ID NO: 56303 - DNA, 4987 bp, Homo Sapiens; identical to SEQ ID NO: 30144

SEQ ID NO: 56304 - DNA, 3320 bp, Homo Sapiens
ggtcctacccggaagcgcgcccgggctcctgcaggcggggcgctgtgcgcgccgcgatccggtacgtgggcctccgggctgtcccctctgggggcggcgatcctccctccggagccccccttcaaccctcccggaagtgagcatttgcaggaccagggatgctgtgctgctctcccatgagccagtcaccgagtcggtctgctgcagccctttctgaacctctggccgtctggatgctccactgtgcttgccaagatgaagtgcgtcttggtggccactgagggcgcagaggtcctcttctactggacagatcaggagtttgaagagagtctccggctgaagttcgggcagtcagagaatgaggaagaagagctccctgccctggaggaccagctcagcaccctcctagccccggtcatcatctcctccatgacgatgctggagaagctctcggacacctacacctgcttctccacggaaaatggcaacttcctgtatgtccttcacctggctgcggcccccagacctggcgcagcgtgtccagctgtgggagcacttccagagcctgctgtggacctacagccgcctgcgggagcaggagcagtgcttcgccgtggagccacagtgccagctccctgcgcccggccgacctgcttgccctcatcctcctggttcaggacctctaccccagcgagagcacagcagaggacgacattcaggagacagacagcttctccctccctgaggagtacttcacaccagctccttcccctggcgatcagagctcaggtagcaccatctggctggaggggggcaccccccccatggatgcccttcagatagcagaggacaccctccaaacactggttccccactgccctgtgccttccggccccagaaggatcttcctggatgccaacgtgaaggaaagctactgccccctagtgccccacaccatgtactgcctgcccctgtggcagggcatcaacctggtgctcctgaccaggagccccagcgcgcccctggccctggttctgtcccagctgatggatggcttctccatgctggagaagaagctgaaggaagggccggagcccggggcctccctgcgctcccagcccctcgtgggagacctgcgccagaggatggacaagtttgtcaagaatcgaggggcacaggagattcagagcacctggctggagtttaaggccaaggctttctccaaaagtgagcccggatcctcctgggagctgctccaggcatgtgggaagctgaagcggcagctctgcgccatctaccggctgaactttctgaccacagcccccagcaggggaggcccacacctgccccagcacctgcaggaccaagtgcagaggctcatgcgggagaagctgacggactggaaggacttcttgctggtgaagagcaggaggaacatcaccatggtgtcctacctagaagacttcccaggcttggtgcacttcatctatgtggaccgcaccactgggcagatggtggcgccttccctcaactgcagtcaaaagacctcgtcggagttgggcaaggggccgctggctgcctttgtcaaaactaaggtctggtctctgatccagctggcgcgcagatacctgcagaagggctacaccacgctgctgttccaggagggggatttctactgctcctacttcctgtggttcgagaatgacatggggtacaaactccagatgatcgaggtgcccgtcctctccgacgactcagtgcctatcggcatgctgggaggagactactacaggaagctcctgcgctactacagcaagaaccgcccaaccgaggctgtcaggtgctacgagctgctggccctgcacctgtctgtcatccccactgacctgctggtgcagcaggccggccagctggcccggcgcctctgggaggcctcccgtatccccctgctctaggccaaggtggccgcagtctgcctttgcatcctgtcctccagccacccttgcttgccactgttccccatgacgagagcctcctgtctgcagtggccatcctgaggatagggcagagtgcccagggtggccccagggcttctaaaaccccacctagaccaccctccatgtcaggtactgagcaaggccccagatccttctctctggaggaagagggaagcccaggggtcctgtttgtaaaacaacggtggcaacagctcctcttccagagctgcctctgcctttatcctgggagatggggaggaagccccatctctgctgttccctgcgtggaggaagcccacccagcaagctctctcctaccccaggtaaaaggtgctcctttgcctgggtttgaattccagcgctgccacttcctctctgcacctcctggcaagtttcttctattccccacgtttaaagcgatggcacctccgtcccagggtggtgtgaggattacccagtgtggtaggtgctcaataaatgttggtcattgttatcactgaagcccaacatgctagtgcttctagacccttctgtcagtgctgataagcccttgctaagtcccagccccttcatgcttggctggcgtctgccctagggctggggttctcaagcccctggccctggcccagagatttggattcccttggcggccgtggagcccagcctttgatgtctttcaaagcttctgtggtgcgccctggattgagaaccaccacccgaggggtacagcccctctcttccaaccgagaagttcctgtcccagaatggacccagggacaagagaccctgagagccctgggactgggagtgtctgctcctctgaggccaggaggccggtgctgggccagagaggacggcgtggcgaaagtcagcgtccactgcagcacaggatcagatggccgtgtgctgtgcatgcaggagcctcgccttctgtgtctttagtcttgagccaaaatttgctcaaagactgatctcttccttgcagggaacagctttggggctgggggaactagaacccacatgttggtctaaaccctgagaaggtggcagtgaggaagtatcccctcaggtgactggatctgtgttcctccttaacatcatctgatggaatggcaatgaaaagcgtggattgtggaaaatacagaaaaacataaaggaaaaaactccaatcccctgagcccaccactgttcaggacccctgcttttgtcacctactatttccctttagtttttagcagcggctggatgtgatatgtctagtttaaccagtccccttgatctttctatataataaataacacaggagtgaacatcctgaatcag

SEQ ID NO: 56305 - DNA, 3032 bp, Homo Sapiens
gaattccggagaaaggcgcaggggtgggagctgttgccgaagctgccacagcaaaagttctcccccctccccccttcccctcctctcaaggcccctagaaaggttggagctgccggccctgcagtcggtgaccgctgacgacttcggccgcgcccgcggatagcgggaggaatcagcagcttggaaattcaagcacgtgatctggcgggatgggcgtttgcctaacgtatttaatggaggaatcggatggcataagtgattaaggtggtattgaggatttctgaagcctatgaaaggtagaaactcaaccatgatttctttttcaactctacagcattcctttccttgaagtcttcgtttttaccttagtctcgggcagttatacttaagcatgaacattgacgacaaactggaaggattgtttcttaaatgtggcggcatagacgaaatgcagtcttccaggacaatggttgtaatgggtggagtgtctggccagtctactgtgtctggagagctacaggattcagtacttcaagatcgaagtatgcctcaccaggagatccttgctgcagatgaagtgttacaagaaagtgaaatgagacaacaggatatgatatcacatgatgaactcatggtccatgaggagacagtgaaaaatgatgaagagcagatggaaacacatgaaagacttcctcaaggactacagtatgcacttaatgtccctataagcgtaaagcaggaaattacttttactgatgtatctgagcaactgatgagagacaaaaaacaaatcagagagccagtagacttacagaaaaagaagaagcggaaacaacgttctcccgcaaaaatccttacaataaatgaggatggatcacttggtttgaaaacccctaaatctcacgtttgtgagcactgcaatgctgcctttagaacgaactatcacttacagagacatgtcttcattcatacaggtgaaaaaccatttcaatgtagtcaatgtgacatgcgtttcatacagaagtacctgcttcagagacatgagaagattcatactggtgaaaaaccatttcgctgtgatgaatgtggtatgagattcatacaaaaatatcatatggaaaggcataagagaactcatagtggagaaaaaccttaccagtgtgaatactgtttacagtatttttccagaacagatcgtgtattgaaacataaacgtatgtgccatgaaaatcatgacaaaaaactaaatacatgtgccatcaaaggtggccttctgacatctgaggaagattctggcttttctacatcaccaaaagacaactcactgccaaaaaagaaaaggcagaaaacggagaaaaaatcatctggaatggacaaagagagtgctttggacaaatctgacctgaaaaaagacaaaaatgattacttgcctgtttattcttcaagtactaaagtaaaagatgagtatatggttgcagaatatgctgttgaaatgccacattcgtcagttgggggctcgcatttagaagatgcgtcaggagaaatacacccacctaagttagttctcaaaaaaattaatagtaagagaagtctgaaacagccactggagcaaaatcaaacaatttcacctttatccacatatgaagagagcaaagtttcaaagtatgcttttgaacttgtggataaacaggctttactggactcagaaggcaatgctgacattgatcaggttgataatttgcaggaggggcccagtaaacctgtgcatagtagtactaattatgatgatgccatgcagtttttgaagaagaagcggtatcttcaagcagcaagtaacaacagcagggaatatgcgctgaatgtgggtaccatacgttctcagccttctgtaacacaagcagctgtggcaagtgtcattgatgaaagtaccacggcatccatattagagtcacaggcactgaatgtggagattaagagtaatcatgacaaaaatgttattccagatgaggtactgcagactctgttggatcattattcccacaaagctaatggacagcatgagatatccttcagtgttgcagatactgaagtgacttctagcatatcaataaattcttcagaagtaccagaggtcaccccatcagagaatgttggatcaagctcccaagcatcctcatcagataaagccaacatgttgcaggaatactccaagtttctgcagcaggctttggacagaactagccaaaatgatgcctatttgaatagcccgagccttaactttgtgactgataaccagaccctcccaaatcagccagcattctcttccatagacaagcaggtctatgccaccatgcccatcaatagctttcgatcaggaatgaattctccactaagaacaactccagataagtcccactttggactaatagttggtgattcacagcactcatttcccttttcaggtgatgagacaaaccatgcttctgccacatcaacacaggactttctggatcaagtcacttctcagaagaaagctgaggcccagcctgtccaccaagcttaccaaatgagctcctttgaacagcccttccgtgctccctatcatggatcaagagctggaatagctactcaatttagcactgccaatggacaggtgaaccttcggggaccagggacaagtgctgaattttcagaatttcccttggtgaatgtaaatgataatagagctgggatgacatcttcacctgatgccacaactggccagacttttggctaaaaaaaaaaaaaaagtgaaataatactggcactttagaacagattaatcaagagtggggttactatgtgtaaatggagtgctgtacagatttaagagcaatgcgtaataacaagttaagctgatatacgatgataataactgcatttcgtttggttagtcagcattctttgaactgccttacatgttgtcacctttatagaagcaatgcattacttgttttagatcagaaacttgctattccacccacaccaagtaa

SEQ ID NO: 56306 - DNA, 3163 bp, Homo Sapiens
cggaagctgagagggcccgcgggtaggcatggcggcgcaccttaagaagcgggtttatgaggaattcacgaaagtggttcagccacaggaggaaattgctactaagaaactccgactaacaaaaccaagtaaatctgcagcactccacatagatctgtgtaaagctacctccccagcagatgctttgcaatacttgctccagtttgccaggaagcctgtcgaggcggaaagcgtagagggagtagtcaggattctcttggaacattattacaaggagaatgatccatctgtgagactgaaaattgcatcattgttgggtttattatcaaagacagcaggattttcaccagactgcattatggatgatgccatcaacatcctgcagaatgaaaagtctcatcaagtcctagctcaactgctggatactttgcttgcaattggcactaagctaccagagaatcaagctatccaaatgcgattagttgatgtggcctgcaagcatctgacagatacgtctcatggtgtaagaaataagtgcctgcagttacttggcaatcttggctctttggagaaaagtgtcacaaaagatgcagaaggcctagctgccagagatgtccagaagattataggggattacttcagtgaccaagacccacgtgtcagaacagcagctataaaagccatgttgcagctccatgaaagaggactgaaattacaccaaacaatttataatcaggcctgtaaattactctctgatgactatgaacaagtgcgcagtgctgcagtccagcttatctgggtcgtcagtcagctctatcctgaaagcattgtcccaattccttcttctaatgaagaaatacgcttagttgatgatgcgtttggcaaaatttgtcacatggtcagtgatggctcttgggtggttcgtgttcaggcagcaaaactgttgggctctatggagcaagtcagttctcatttcttggagcagacccttgacaagaagctgatgtcagatctgaggaggaaacgtactgcacatgagcgtgccaaggaactttacagttcgggggagttttccagtggcagaaagtggggagatgatgctcccaaggaagaagtagataccggggctgtgaacttgattgagtcaggagcttgtggagcttttgttcatgggttggaagatgagatgtatgaggttcgtattgctgctgtggaggccctctgcatgttggcccagtcttcaccctcttttgctgagaagtgccttgatttcctagttgacatgttcaacgatgaaattgaggaagtacgtctgcagtctatacataccatgagaaaaatctctaacaacatcaccctccgagaagatcagcttgacactgtcctggctgtgctagaggattcatccagagatattcgagaggctcttcatgaactcttatgctgtactaatgtttcaaccaaagaagggattcatcttgcattggtggagctgctgaaaaatttaaccaagtaccctactgatagggactccatatggaagtgcttgaagtttctgggaagtcggcatccaaccctggtgcttcccttggtgccagagcttctgagcacccacccattttttgacacagctgaaccagacatggatgatccagcttatattgcagttttggtacttattttcaatgctgctaaaacctgtccaacaatgccagcattgttctcagatcacaccttcaggcactatgcctacctccgagacagtctttctcatcttgttcctgccttgaggttaccaggtagaaaactggtgtcatcagctgtttctcccagcatcatacctcaagaggatccttcccagcagttcctgcagcagagccttgaaagagtgtatagtcttcagcacttggaccctcagggagcccaggagctgctggaattcaccatcagggatctgcaaagacttggagaacttcaatctgaattggcaggagtagctgatttctctgccacctatcttcgctgtcaactacttctcatcaaggccttgcaggaaaagttgtggaatgtagctgcccctttgtatttgaagcagagtgatttggcctcagcagcagcgaaacagattatggaagagacctacaaaatggaattcatgtacagtggtgtggagaataagcaggtggtgattatacatcacatgaggctgcaggccaaagctttgcaacttatagtaacagcacgaactacacgaggacttgaccccttatttgggatgtgtgaaaaatttttacaggaagtagacttttttcagaggtatttcatcgctgatttgccccacttgcaggacagctttgtggacaaactccttgaccttatgccccgactcatgacatccaaacctgcagaagtggtcaaaattctacagaccatgctgcgacagagtgcctttctgcatctcccgcttccagagcagatccacaaagcctcagccaccatcatcgagccagcgggcgagtcagacaaccctttgcggtttacctctgggttggtggttgccctggatgttgatgcaaccctggagcatgtgcaggatcctcagaacactgttaaggtccaggtcttatatccagatggccaggctcagatgattcaccccaagcctgcagacttccggaatcctggcccagggcggcaccggctcatcactcaggtttatctctcccacaccgcttggacagaggcatgccaggtggaagtgaggctgctgctggcctacaactccagtgctcgcattccaaaatgcccctggatggagggtggtgagatgtcaccacaggtggaaaccagcatcgagggcaccattcccttcagcaagcctgtaaaagtttatataatgcccaaacctgcacggcgctaaggcaaaaacagtcttcccaaccgtggcctagagggcccttcttaggtgtcagaatgagccaagcctgaagcacttcacctggaattgatgtgtaggcttaaggagtatgtgacccttacagtctcatctggtatcaaacacaggataaattgtttcttcattaaaaaataaaaaaccttcaagtctacttacccttctcctgtccacaataaagttgagaaaacaccaaaaaaaaaaaaaaaa

SEQ ID NO: 56307 - DNA, 2093 bp, Homo Sapiens
gcgcatgagcagtgctgctcccaacccgccagtcgcggtctccggcgccagctacgccgctgccgctgtcactatggcccattacaaagccgccgactcgaagcgtgagcagttccggaggtacttggagaagtcgggggtgctggacacgctgaccaaggtgttggtagccttatatgaagaaccagagaaacctaacagtgctttggattttttaaagcatcacttaggagctgctactccagaaaatccagaaatagagctgcttcgcctagaactggccgaaatgaaagagaagtatgaagctattgtagaagaaaataaaaaactgaaagcaaagcttgctcagtatgaaccacctcaggaggagaagcgtgctgaataggattcttctcagtttgaaagacaatgaaaaatggttttgtatgacttgaatagtttgtatagtatataatcttttctgaacagatgctatagaactcttttaatatgtttaattcacctatcacactctgttaaaaacacatagaatcatcaataaaaactcaatataactttctttgggtcttaaagcaggagaatccaaagtaaatcctgaacaaaacctaaacacagccatctaactcattaccttaaaagacattctgtttattagtctgattaggaatgatggcactggttgtattttagccaagacagtttagcatggagctattccttggtgcagttcaggatatgaacacaggtacagtcattctttgaaggtgacactgttctgtatattccctataggcagctggagagatctgtgtgacacaagatgcttttgtacgggttcccatgaatcttctgctcttgtttgtgtgacatggaacaaataacttctttgccaccactttgccttagataactgtgtgtgtgtgtgccagtttgaactctgacaccacattttccttctatgcaatcatgcctgtctgataatcttgcattgctttcctctgagctttagtgggtcctagttgcacactggcctttctgtgctgtttttcaatttgcctaataatagcagttaccctgattgtaatttatgtaactttaaacaggatcacactgtaccccctgcctgccttatttgcttactgagcacaggacagaggcaatatacaactctgggttcacacacaagctgagatgagaagaggaatgagccatatattggggaaaatcatagtttgtaggtataattatatagtgcttttctccctcaaagtatttttctagccttgaattcattttatcttcattatccctgtgaagtaggtgggacaagtataaggggaagaggggtgctgaatttttaggccaaagactgatattaatacaaatcactcactaactgtagagccttgggcattatcagtgaactactctgagatttactgtcttcatctgtttaatgagtagaatgtccgtgatgcctacctcacagggttgttgtgagggtcaaatgagaatgtatgtgaaagatttgtaaatggtaaagcactatattcttgtttgttagtcctttttcctttctttgggtagacctacagtcagatgttttgttttatggatcacttattttccttactggtagactgtcgttttatagacatattcctatttcatatattctctccctgttgttagagaacctatctttgtttttggtcaaaacacacatagaaaacaaaatgatccaatgaaaactggtttaactagcaaaagccttggcacctgttggagactatgaccaagccaataaaaagggcatttaaatcagccctgttagtaggaatgtggctatggctggtgcctcttctagtcacaagtttgtttttggagggggtccagaagatcattcccttgcatagatttctcttttaccaatttgagtgcctcctacatgggcagcagtggactaagtgctgggtgtgataaagaggaatgacttaattatgagactgtatataatcaaatacagtgtgggttaggacctgtggcagaccattataataaagcatggccccgtgagggttttgaaagagaaa

SEQ ID NO: 56308 - DNA, 9615 bp, Homo Sapiens; identical to SEQ ID NO: 31793

SEQ ID NO: 56309 - DNA, 2723 bp, Homo Sapiens
gggcggggcgcaggagccccggggcggaggagccggggaggcgggaggcgggaggcgggaggtgttggggccgttgaagcggcctccctcccgcccccagccgcccggtctggccccagccctgtcccgacccccggcctggcccactccgaccctacccggccgaagggttccgctggacacgcaggcggcctccggagcagcccaagcccatgagggccgcgcgcccggccgccggtgctgacgagacggagctcctggcccccgaggaggagcagaggatcaatgcggttcaagaatcgattccagcggttcatgaaccatcgagctccagccaatggccgctacaagccaacttgctatgaacatgctgctaactgttacacacacgcattcctcattgttccggccatcgtgggcagtgccctcctccatcggctgtctgatgactgctgggaaaagataacagcatggatttatggaatgggactctgtgccctcttcatcgtttctacagtatttcacattgtatcatggaaaaagagccacttaaggacagtggagcattgttttcacatgtgtgatagaatggttatctatttcttcattgctgcttcttatgctccatggttaaatcttcgtgaacttggacccctggcatctcatatgcgttggtttatctggctcatggcagctggaggaaccatttatgtatttctctaccatgaaaaatataaggtggttgaactctttttctatctcacaatgggattctctccagccttggtggtgacatcaatgaacaacaccgatggacttcaggaacttgcctgtgggggcttaatttattgcttgggagttgtgttcttcaagagtgatggcatcattccatttgcccacgccatctggcacctgtttgtggccacggcagctgcagtgcattactacgccatttggaaatacctttaccgaagtcctacggactttatgcggcatttatgaccaatctgtactaattctccaaaccagtattatttcaattatggcacttgggagtggggtgagagctaaacattgcacagggaaagaaaaaaaataactgcactgactttatatcttttgaatataattactgtgaaagtataaaggctgtgttctggaattttctgcctcacagcaaataaataaggtagtgaattaattattcattccattccactatcatgaaggactctgaatagacttggccaactgatgtttacaaaccagacttttatattttaattttacagattttactacatgatttttctaaattactatgtcaggttgtaaaagtcagtgcaataacaaaccttcctttttaagaagaaaattgtttctattactttcccattcactaggtaaagaatcatggacagaacttacactactttttaccatgtttcatcttggcataacatggttcttttttaaatagaaactttagttttttgtaaatttttaaaaaaatatttcattgatatgcatctctgcaggtcctcattcatgttgtaaatttttgcagcaagcagtcaacattccacaaacgaacaaacattatacctcttctgatagttttattaagcatggagaaattgccaatttttaaaaactgcagttttccaaacttttctgccaacctcttactctgaattcagtgctgctttgggacatatacttgacctagcttggtttaccagtgatggaaaagtattttgatatcattaactttttcaaaagatccaactttttctctatgcctttgccacattctcttcagggtctctttccacagtggataaatgttttttctgtattatgacagtattgttgtgatggccatctgctggaaactcctgaagagcattatgtattacagtgagcagttgtattgcctgtttggtgcccaatggttaagtcattgtcacttagctttatattgtcagtttgatatttattttaaattgtggaactagatgcataaattcacatttctgcctttcctttgcatcttctcatatattgtgtttttttttttttttcctagaaaaaatatttaaagcattgtttgacaggtagaaactcatgtatctgtagtccatgagttatatcctggctcagtggagtgatatttatgtattatttttacttttctctcagtgtcttatattaagattaacatgttgttaatagttgctttgttgattaatctctcttgttggtgttttaataaatgaaataggcttgcctttagatcgggtgctgatattgcctgtttcctagtaatgggctgatcaaatgatcagtggaattcttggtttgatgataaccttattaattgaaattttttactgatgtggctttaaaagaggtttattttgtatatgtttagaactctctgattttgatgaattatatgggaatgagaaacagaagaagtggtatttgctggcgagttaaataggcaaggtacccagtgataacaccaaccaaaccactcctatctgcatgattctgaacatctggatgcctgttgttttactgtgtatattttatttttaatatattaactttgtggattcatttaaggtctactcaaaagtaacactgtcaaaaccactaatatgtatgtaaaaattgtgctgtatactacaataaagttgttacttggatttgttcca

SEQ ID NO: 56310 - DNA, 3215 bp, Homo Sapiens
aacccggggctccgagccggagccgagtctgcgcctgggggaggaccatgcggcagtagcagccatgctgccctttctgctggccacactgggcaccacagccctcaacaacagcaaccccaaggactactgctacagcgcccgcatccgcagcactgtcctgcagggcctgccctttgggggcgtccccaccgtgctggctctcgacttcatgtgcttccttgcactgctgttcttattctctatcctccggaaggtggcctgggactatgggcggctggccttggtgacagatgcagacaggcttcggcggcaggagagggaccgagtggaacaggaatatgtggcttcagctatgcacggggacagccatgaccggtatgagcgtctcacctctgtctccagctccgttgactttgaccaaagggacaatggtttctgttcctggctgacagccatcttcaggataaaggatgatgagatccgggacaaatgtgggggcgatgccgtgcactacctgtcctttcagcggcacatcatcgggctgctggtggttgtgggcgtcctctccgtaggcatcgtgctgcctgtcaacttctcaggggacctgctggagaacaatgcctacagctttgggagaaccaccattgccaacttgaaatcagggaacaacctgctatggctgcacacctccttcgccttcctgtatctgctgctcaccgtctacagcatgcgtagacacacctccaagatgcgctacaaggaggatgatctggtgaagcggaccctcttcatcaatggaatctccaaatatgcagagtcagaaaagatcaagaagcattttgaggaagcctaccccaactgcacagttctcgaagcccgcccgtgttacaacgtggctcgcctaatgttcctcgatgcagagaggaagaaggccgagcggggaaagctgtacttcacaaacctccagagcaaggagaacgtgcctaccatgatcaaccccaagccctgtggccacctctgctgctgtgtggtgcgaggctgtgagcaggtggaggccattgagtactacacaaagctggagcagaagctgaaggaagactacaagcgggagaaggagaaggtgaatgagaagcctcttggcatggcctttgtcaccttccacaatgagactatcaccgccatcatcctgaaggacttcaacgtgtgtaaatgccagggctgcacctgccgtggggagccacgcccctcatcctgcagcgagtccctgcacatctccaactggaccgtgtcctatgcccctgaccctcagaacatctactgggagcacctctccatccgaggcttcatctggtggctgcgctgcctggtcatcaatgtcgtcctcttcatcctcctcttcttcctcaccactccagccatcatcatcaccaccatggacaagttcaacgtcaccaagcctgtggagtacctcaacaaccccatcatcacccagttcttccccaccctgctgctgtggtgcttctcggccctccttcccaccatcgtctactactcagccttctttgaagcccactggacacgctctggggagaacaggacaaccatgcacaagtgctacactttcctcatcttcatggtgctgctcctaccctcgctgggactgagcagcctggacctcttcttccgctggctctttgataagaaattcttggctgaggcagctattcggtttgagtgtgtgttcctgcccgacaacggcgccttcttcgtgaactacgtcattgcctcagcctttatcggcaacgccatggacctgctgcgcatcccaggcctgctcatgtacatgatccggctctgcctggcgcgctcggccgccgagaggcgcaacgtgaagcggcatcaggcctacgagttccagtttggcgcagcctacgcctggatgatgtgcgtcttcacggtggtcatgacctacagtatcacctgccccatcatcgtgcccttcgggctcatgtacatgctgctgaagcacctggtagacaggtacaatctctactacgcctacctgccggccaagctggacaagaagatccactcgggggctgtgaaccaggtggtggccgcgcccatcctctgcctcttctggctgctcttcttttccaccatgcgcacggggttcctagctcccacgtctatgttcacatttgtggtcctggtcatcaccatcgtcatctgtctctgccacgtctgctttggacacttcaaatacctcagtgcccacaactacaagattgagcacacggagacagatactgtggaccccagaagcaatggacggccccccactgctgctgctgtccccaaatctgcgaaatacatcgctcaggtgctgcaggactcagaggtggacggggatggggatggggctcctgggagctcaggggatgagcccccatcatcctcatcccaagatgaggagttgctgatgccacccgacgccctcacggacacagacttccagtcttgcgaggacagcctcatagagaatgagattcaccagtaaggggagggaggggccctggaggccacatcctgccccaccccacccccactcccacggacactaaaacgctaataatttattagatctaaagccccttcctccccagcccctgctttcattaaggtatttaaacttgggggtttcactgctctcccccatgatggagggagggagccccccaacctcagtgaggagagccccgagccggccccggggcaaagaggggtgcagagggagttcccccagatcagtaccccccacccctccccagctagtagcatgaccaggagagggttaatgagagccaagaggagtacctggtgcacctggtgccggtggctggagacctggggggcaggtggatctggggctgttcccccccctccgttttttccaccccacagttcctcctgggatctggccctccagggaagtggagcctccagcccctaggggatgcatgaggggggagggggtgctgagtgggaggaagagtcaggctcacagctggggtggcctgggggtgggggtgggcaaggctgacactggaaaatgggtttttgcactgttttttttttggtttttttgttcttttttgtttttttcctttaaaataaaaacaaagaaaagctctgaaaaaaaaaaaaaaaaa

SEQ ID NO: 56311 - DNA, 4643 bp, Homo Sapiens
tgttggctggtgtgtgggtgtcaaactgagccagacgcggcggtggcggcggctccgcgggctacggtcgctcccgcctctcgagcgctgccggtggccgcagcggcgcacccacgccggcccggaggagcagagtgttcatttctgtgtcgggcacagtgctaagtgctgggtgctcactggtgatgaggcagatgaaggttaccaaacttgtggacaggagcctcatatcagagacgtggacctcactgtagcctggtcatggcttccagcttttcgaatctgaggctccaaaggaggaaatgaccattcagggatcttactccagcttgattacggagactgaaccttcatagggtgcgcacttaccaaggacaggaaggtttctctgtttgaagggctttaaacttataacaaagaaaataaaaatgacgacttcgtctatcagacggcagatgaaaaacatcgtgaacaattactcagaggcagaaatcaaagtccgggaagccacctccaatgacccgtggggcccgtccagttctctgatgaccgagattgccgacctgacctacaacgtggtggccttctcggagatcatgagcatggtgtggaagcggctgaatgaccatggcaagaactggcggcatgtgtacaaggcgctgaccctgctggactacctcatcaagacaggctccgaacgtgtggcccagcagtgccgggagaacatcttcgccatccagaccctgaaggacttccagtacattgaccgagatggcaaggaccagggcatcaatgtgcgtgagaagtcaaagcaactggtggctctcctcaaggacgaggaacggttgaaggctgagagggcccaggctctcaaaaccaaagagcgcatggcccaggttgccactggcatgggcagcaaccagatcacctttgggcgaggctccagccagcccaacctctccaccagccactcggagcaggagtatggcaaggccgggggctccccggcctcctaccatggctccacctccccgcgagtgtcctccgagctggagcaagcccggccccagactagtggagaagaggagcttcagctgcagctggcacttgccatgagcagagaagtggctgagcaggaagaacgcctcaggcggggtgatgacctcagattacagatggccctggaagaaagccgaagggacacagttaaaattccaaaaaagaaagagcatggctctctcccacagcagactacgctgttggatttaatggatgctctccccagctcgggccccgcggcccagaaagcagagccctggggcccgtcagcctccactaaccagaccaacccctggggcgggccagcggctcctgcgagtacttcagacccctggccatcgtttggtaccaagccagctgcctccattgacccatggggggtgcccactggagccaccgcacaatctgtccccaagaactcggacccctgggcagcttcacagcagcctgcctccagtgctgggaaaagagcttctgacgcgtggggcgcagtctccaccaccaagcccgtgtctgtctctgggtcctttgagctcttcagtaatctgaatggtacaattaaagatgacttttctgaatttgacaaccttcggacttcaaaaaaaacagccgaatctgtgacctctctgccatcccaaaacaatggaactaccagccctgacccctttgagtctcaacccctgactgtcgcctcaagcaagcccagcagtgcccggaaaacacctgagtccttcctgggccccaacgcggccctggtgaacctggactcactggtgaccaggcctgccccaccagcccagtccctcaaccctttcctggcaccaggtgctcccgccacctcggcccctgttaaccctttccaggtgaaccagccccagccgctgacactgaaccagcttcgggggagcccagtcctggggaccagcacatcctttgggcctggcccaggagtggagtccatggctgtggcctcgatgacctccgcggccccacagccagctctgggggccactggttcctctctgacaccactgggccctgcaatgatgaacatggtgggcagtgtgggtatacccccatcagcagcccaggccactggcacaaccaaccctttccttctctagtgcctgggcctgggacccacccagagcacctgtgctggaggatgccgagcagggactctcgtctgtgggacgggatccaagagtttggggattaggggtattagggcttttcagctccagcttcctgatgaaagggctgtctttacagccccaaccctcagaccctcgccttccaaggcaggcccctcagcctggcctgctctcaccacctcctccaaagcactgaggtcctggcagggctcctctgaggccttggacgaggacgtggagtcatcagtgttgcccttgcccctaacctcagcccgagggtctccaggatgttgcctggcccaggacttgggacagtggccttgtctttgtcctccccaccccccagccctagggacaccccaggcagtcctgggtgtggacacgatgaagcaccggctccataagacaccttttggggaagtggttgtgcatattttatttttctttgactcgtgtgagttcaaagtaaacaccaccaccgtggacaactcttgaattaaatccactagagcgagctttaaaactaatctgagcataacccccaacgtggctctatgcttgtgtacctttgcacatattttgtttagtacagtttcatatttgagtttgcagaattatctaatagtctttttttggctaatatttttataacgtggttcttatttaactgtctagttttgatagaatttaccaggtctggctgaatgaagatgttggcacgtgtcattttagtggtttaaatcctcttatttatggttttaactctaagaaaattttaaaaggaagagatgtttggatgacaaaaaaatgccttattgaaaaactaaagcaaattctttataggaagaaaatatgggaatttgattacacatagatgatgatgtttatttaaaaaaaaaacaacagcaacaaaaaatcctagcctccagttgccttttcctttctttagctcctgtttttggtgaattactaaactgattgactttcagcctttttggctagatcctgagaggctatttttcttacgaatataccaacatcctgaaagttaaagaaaaaaatctaatgtatgaatgtgactcaccaatttttatcaactaattccttttttttattaaaggcatgcagggattaacaggacttctgtttacaatggaaatctgaaatggaagaaacatctttaaccttgtgtgtctgtgatctcctctgtcttaatccacgctcaggctaaagatggggataatgtggaaatggcagttgtcccgagggcgtggggtggggggtgcttctgtgcccacgggtccctgggcaacagtccctaggctaagacaggggtggggggctaagggaccagggctggccctgatccacctacctgctaactccagatattatttttaagttggagacctaaaaataattctcttgtattttggagatgaagaaaaaagtcattcacctgggagggatttttaacaaacatgcactaatattacctccctcttccaaactcctactgtcctcacctcacccaccactgtaaaagtattacgtcgtgcattaaagaccagaaaagacttgcttttacccagggaggggacattcccccaatcctgtgtctgggcagcttgcctggtggatgtttctggccctttttccaccatgggaatttctcacctctagctctaagggcagctgaccacctgccagcccctctctggttccagaagattacccttcgcaccggcacaggagagatcttaaatggtctctgggctgctgggacatgcaggctctgagtggggactgcacccactcatgctgttcctgaggctgccctctccagtcccaggagccgtgtctagagttcctgaccagccaccttctgccagaactgcaggcctgcggctgggtcttaggctcccgctgccatttgggtaagccggtggctggtctcgtctgccgggggaagggtggggaggtgcaatgggatgggaggcaggatgcttgcccagaaaggtgctttccttcagacggtgcagggcctgggccagccttacaggtcagtagactagactcgactacttggggtcagtgattcttttgtaacgagtctttcatgatgtgactttgaggccccaacatgacagccactgggccaccgggacccaagaagacagccccctgccccatcttctggcacaggccatcccgagtgcatgtccctgttgcccactgcactgatcatgaagccaccggccactgccacgcatgttgcacctgtgccatcgtgctccctcctgatgggcaccgtggtggaggaagtcacccagctgtttctcagtcccagaggccggtggctggttttgaacttgtgttgactgttgatacttatttactgtataaatataatttatcatttgtaccatg

SEQ ID NO: 56312 - DNA, 5809 bp, Homo Sapiens
gggaagatggcggcggcctcgagcacccttctcttcttgccgccggggacttcagattgatccttcccgggaagagtagggactgctggtgccctgcgtcccgggatcccgagccaacttgtttcctccgttagtggtggggaagggcttatccttttgtggcggatctagcttctcctcgccttcaggatgaaagctcagggggaaaccgaggagtcagaaaagctgagtaagatgagttctctcctggaacggctccatgcaaaatttaaccaaaatagaccctggagtgaaaccattaagcttgtgcgtcaagtcatggagaagagggttgtgatgagttctggagggcatcaacatttggtcagctgtttggagacattgcagaaggctctcaaagtaacatctttaccagcaatgactgatcgtttggagtccatagcaagacagaatggactgggctctcatctcagtgccagtggcactgaatgttacatcacgtcagatatgttctatgtggaagtgcagttagatcctgcaggacagctttgtgatgtaaaagtggctcaccatggggagaatcctgtgagctgtccggagcttgtacagcagctaagggaaaaaaattttgatgaattttctaagcaccttaagggccttgttaatctgtataaccttccaggggacaacaaactgaagactaaaatgtacttggctctccaatccttagaacaagatctttctaaaatggcaattatgtactggaaagcaactaatgctggtcccttggataagattcttcatggaagtgttggctatctcacaccaaggagtgggggtcatttaatgaacctgaagtactatgtctctccttctgacctactggatgacaagactgcatctcccatcattttgcatgagaataatgtttctcgatctttgggcatgaatgcatcagtgacaattgaaggaacatctgctgtgtacaaactcccaattgcaccattaattatggggtcacatccagttgacaataaatggaccccttccttctcctcaatcaccagtgccaacagtgttgatcttcctgcctgtttcttcttgaaatttccccagccaatcccagtatctagagcatttgttcagaaactgcagaactgcacaggaattccattgtttgaaactcaaccaacttatgcacccctgtatgaactgatcactcagtttgagctatcaaaggaccctgaccccatacctttgaatcacaacatgagattttatgctgctcttcctggtcagcagcactgctatttcctcaacaaggatgctcctcttccagatggccgaagtctacagggaacccttgttagcaaaatcacctttcagcaccctggccgagttcctcttatcctaaatctgatcagacaccaagtggcctataacaccctcattggaagctgtgtcaaaagaactattctgaaagaagattctcctgggcttctccaatttgaagtgtgtcctctctcagagtctcgtttcagcgtatcttttcagcaccctgtgaatgactccctggtgtgtgtggtaatggatgtgcaggactcaacacatgtgagctgtaaactctacaaagggctgtcggatgcactgatctgcacagatgacttcattgccaaagttgttcaaagatgtatgtccatccctgtgacgatgagggctattcggaggaaagctgaaaccattcaagccgacaccccagcactgtccctcattgcagagacagttgaagacatggtgaaaaagaacctgcccccggctagcagcccagggtatggcatgaccacaggcaacaacccaatgagtggtaccactacaccaaccaacacctttccggggggtcccattaccaccttgtttaatatgagcatgagcatcaaagatcggcatgagtcggtgggccatggggaggacttcagcaaggtgtctcagaacccaattcttaccagtttgttgcaaatcacagggaacggggggtctaccattggctcgagtccgacccctcctcatcacacgccgccacctgtctcttcgatggccggcaacaccaagaaccacccgatgctcatgaaccttcttaaagataatcctgcccaggatttctcaaccctttatggaagcagccctttagaaaggcagaactcctcttccggctcaccccgcatggaaatatgctcggggagcaacaagaccaagaaaaagaagtcatcaagattaccacctgagaaaccaaagcaccagactgaagatgactttcagagggagctattttcaatggatgttgactcacagaaccctatctttgatgtcaacatgacagctgacacgctggatacgccacacatcactccagctccaagccagtgtagcactcccccaacaacttacccacaaccagtacctcacccccaacccagtattcaaaggatggtccgactatccagttcagacagcattggcccagatgtaactgacatcctttcagacattgcagaagaagcttctaaacttcccagcactagtgatgattgcccagccattggcacccctcttcgagattcttcaagctctgggcattctcagagtaccctgtttgactctgatgtctttcaaactaacaataatgaaaatccatacactgatccagctgatcttattgcagatgctgctggaagccccagtagtgactctcctaccaatcatttttttcatgatggagtagatttcaatcctgatttattgaacagccagagccaaagtggttttggagaagaatattttgatgaaagcagccaaagtggggataatgatgatttcaaaggatttgcatctcaggcactaaatactttgggggtgccaatgcttggaggtgataatggggagaccaagtttaagggcaataaccaagccgacacagttgatttcagtattatttcagtagccggcaaagctttagctcctgcagatcttatggagcatcacagtggtagtcagggtcctttactgaccactggggacttagggaaagaaaagactcaaaagagggtaaaggaaggcaatggcaccagtaatagtactctctcggggcccggattagacagcaaaccagggaagcgcagtcggaccccttctaatgatgggaaaagcaaagataagcctccaaagcggaagaaggcagacactgagggaaagtctccatctcatagttcttctaacagaccttttaccccacctaccagtacaggtggatctaaatcgccaggcagtgcaggaagatctcagactcccccaggtgttgccacaccacccattcccaaaatcactattcagattcctaagggaacagtgatggtgggcaagccttcctctcacagtcagtataccagcagtggttctgtgtcttcctcaggcagcaaaagccaccatagccattcttcctcctcttcctcatctgcttccacctcagggaagatgaaaagcagtaaatcagaaggttcatcaagttccaagttaagtagcagtatgtattctagccaggggtcttctggatctagccagtccaaaaattcatcccagtctggggggaagccaggctcctctcccataaccaagcatggactgagcagtggctctagcagcaccaagatgaaacctcaaggaaagccatcatcacttatgaatccttctttaagtaaaccaaacatatccccttctcattcaaggccacctggaggctctgacaagcttgcctctccaatgaagcctgttcctggaactcctccatcctctaaagccaagtcccctatcagttcaggttctggtggttctcatatgtctggaactagttcaagctctggcatgaagtcatcttcagggttaggatcctcaggctcgttgtcccagaaaactcccccatcatctaattcctgtacggcatcttcctcctccttttcctcaagtggctcttccatgtcatcctctcagaaccagcatgggagttctaaaggaaaatctcccagcagaaacaagaagccgtccttgacagctgtcatagataaactgaagcatggggttgtcaccagtggccctgggggtgaagacccactggacggccagatgggggtgagcacaaattcttccagccatcctatgtcctccaaacataacatgtcaggaggagagtttcagggcaagcgtgagaaaagtgataaagacaaatcaaaggtttccacctccgggagttcagtggattcttctaagaagacctcagagtcaaaaaatgtggggagcacaggtgtggcaaaaattatcatcagtaagcatgatggaggctcccctagcattaaagccaaagtgactttgcagaaacctggggaaagtagtggagaagggcttaggcctcaaatggcttcttctaaaaactatggctctccactcatcagtggttccactccaaagcatgagcgtggctctcccagccatagtaagtcaccagcatataccccccagaatctggacagtgaaagtgagtcaggctcctccatagcagagaaatcttatcagaatagtcccagctcagacgatggtatccgaccacttccagaatacagcacagagaaacataagaagcacaaaaaggaaaagaagaaagtaaaagacaaagatagggaccgagaccgggacaaagaccgagacaagaaaaaatctcatagcatcaagccagagagttggtccaaatcacccatctcttcagaccagtccttgtctatgacaagtaacacaatcttatctgcagacagaccctcaaggctcagcccagactttatgattggggaggaagatgatgatcttatggatgtggccctgattgggaattaggaaccttatttcctaaaagaaacagggccagaggaaaaaaaactattgataagtttataggcaaaccaccataaggggtgagtcagacaggtctgatttggttaagaatcctaaatggcatggctttgacatcaagctgggtgaattagaaaggcatatccagaccctattaaagaaaccacagggtttgattctggttaccaggaagtcttctttgttcctgtgccagaaagaaagttaaaatacttgcttaagaaagggaggggggtgggaggggtgtagggagagggaagggagggaaacagttttgtgggaaatattcatatatattttcttctccctttttccatttttaggccatgttttaaactcattttagtgcatgtatatgaagggctgggcagaaaatgaaaaagcaatacattccttgatgcatttgcatgaaggttgttcaactttgtttgaggtagttgtccgtttgagtcatgggcaaatgaaggactttggtcattttggacacttaagtaatgtttggtgtctgtttcttaggagtgactgggggagggaagattattttagctatttatttgtaatattttaaccctttatctgtttgtttttatacagtgtttcgttctaaatctatgaggtttagggttcaaaatgatggaaggccgaagagcaaggcttatatggtggtagggagcttatagcttgtgctaatactgtagcatcaagcccaagcaaattagtcagagcccgcctttagagttaaatataatagaaaaaccaaaatgatatttttattttaggagggtttaaatagggttcagagatcataggaatattaggagttacctctctgtggaggtat

SEQ ID NO: 56313 - DNA, 3184 bp, Homo Sapiens
ctctgctgtgctgcctcaaacgcggagggctgcgtgcagtgggagcgggctccaggagcccgagcctccagccgtcctcagagcaaggcagcaccgaggcctggccacagcaatatccatctggaagctcttcccttcactcccaactctgaggttgcctaactctttattaaaaattcagaagggggaatgccagcccctagcatggactgtgatgtttccactctggttgcctgtgtggtggatgtcgaggtctttaccaatcaggaggttaaggaaaaatttgggggactgtttcggacttatgatgactgtgtgacgttccagctatttaagagtttcagacgtgtccgtataaacttcagcaatcctaaatctgcagcccgagctaggatagagcttcatgaaacccaattcagagggaaaaaattaaagctctactttgcacaggttcagactccagagacagatggagacaaactgcacttggctccaccccagcctgccaaacagtttctcatctcgcccccttcctccccacctgttagctggcagcccatcaacgatgccacgccagtcctcaactatgacctcctctatgctgtggccaaactaggaccaggagagaagtatgagctccatgcagggactgagtccaccccaagtgtcgtcgtgcacgtgtgcgacagtgacatagaggaagaagaggacccaaagacttccccaaagccaaaaatcatccaaactcggcgtcctggcctgccaccctccgtgtccaactgagctgcctgctccttctcgataatagccgtctcctctttatcatgctttttccccctgttgtttgtcaaaaaaaattgcctttaaattcctgggtgtttggttgtttgagattccttccttgttatcaagcctctcggacaaaagggctaggaaaaggtgatatgtctcctgatcatatcatacccattaagtataacccattatttagaaggttctagggaaaaaagtagtattttcttattaaacaatcagcacagcctatatctttgttctctcatgttgatccaagccagagacatcggtaacaaatagcacctgtgttgtttgtgaggtgtttcagtcccagtcctgatgtgtgtgcgttgttctctcctggccacttaaataggaccatatgtaaacttgactttgactgcatgagatatccctatctggtctcactcagtcctctgcatcccaacattcccaggacatgcatgatcaccagcatttattttcattatttgaggatatcttataactcacagattgtcagcatccagccatgtcctatctagattaggaaaatgatcagaatattccagctcaacaagtctgggtatactcactattgtgagtcaatacaccatagctctgttgaaattcctggaggcaaaattgaccttggccccaaagatattcctcaatagatttcaaacaccactcccctgtagaactctcccagcctcgttggggaggcttgtccagggtgatagagactgatttcagacaaacctatttattacaaaagtttcatggtgtctgaatgattgttttctctctttgtatatttgtacaaatgtttcagctgtgcttttaaaaaatctggatgttttttatttagtgattgttcgacaattagctgcttcaaaacataatgtgcattgcttatgaatgccttcatatactaatacagatactctgataatattacactctaataaggataatgctgaattttgaaaggacacaaaacatctaatgccaatatatacatggttagccaacatctttgctatcaagaccacttgttttaaataaagatgcaagtgtcagttgtagattattgggatgaagctaaatccccagaatgcagcagcagctgagcatgttaaaatggggaaggatgatagctacatgtatgccggtcctactcacgcgacacccgtgtgctcaaaaaagttacttgtttttgttacgtgtgattttcctatttctctagcccaaagtgcattacagaagatacacctatagaaccattaccttctgctatgtgtgccagggctcatctactcctgtacattaatggattactttagatgcaaatgcagattacaatggagtggggaagtactttcattacccaagcctcagaaaaacacacaagaacaataacacagcaaacagattgagggattgttgtggtttttgactaaggtgtatgttagtttcatcagaaacttaaaacatagactgatcactcagaaattaaagtccgttttactgtgaatatagcaatatagtactggacacagtactggtgaaactgaggagagcattgcttgtaaaatcctgagtttccataaggaaaatgaaaactccttttaaaaataaaatctgaggagtgtacaataagcatatgctttgactttcctttgctgtggaggtttttggtttttcattgatgataaacgactacagacttagtagtggagaaatggtgtcctctagtggaagaaatagtagctccgctattcagatgcagagcactgcagcatccagcctttcaaagctgactcttctcaatcatctgtgggtcatttgacttgattttttaagctaccctgaatttccagaatgcaggttctaaagaaatctagatgagagaaagtatttgaaaatgatttttaaatgttttttaaaagacacatctgacatttttaacaacttagtaaaagttgaaatgaccattctgtgtagtcataaaagaaacacaatgaagtgtatggcctctggagttagtcttagtaaaacttattgctctgtgtcaatgttaacctgtctcagatcaagtaattccttcactaggttgggtttggggaggggggaaaagaggggcttttcctaggagaacgataagaaatggaaagactccttgaagtgttgcaagggaacctcctagcactgtgaaagtcagaatcgcctcagcatttccatgacgcacattatgcaaatctctttagcactattttaaggttgaaaactttaacaatgaaggggaaggggaagatttccaccaactgaatcatttgtgcacgtgtatagctcaaagagcttagacttcaaatatatctggtgaatg

SEQ ID NO: 56314 - DNA, 7644 bp, Homo Sapiens
agcggaggctttgctgtggcagctgctggagcggcggccgcctcgggagccggaggagaggcagccgcggagcgccgagctggcctcgccccgaggcccggccctgggtgtggggaaccgcgctgaggagctggaaactttcccggcaggagctgactgctgggcaggaacgtctctcaggagaaagagtggaagagaaaattgtgaactaaggccccctgcccccttttcctggtgcatgtgaagttatcaaaaacagaaacaagtgttgaaaatgttaaaggctgtgctgaagaagagccgagagggaggaaagggaggcaagaaggaagcaggaagtgactttggtccagagacttctccagtcctgcaccttgaccacagtgctgactctcctgtgagcagtcttcccacagcagaggacacctatagggtgagcttggccaaaggtgtctcgatgtctctgccttcctcacctttgctgcctcgacagtctcacttggtgcaatcaagagtgaacaaaaaatccccaggtcccgtcaggaagcccaagtatgtggaaagccccagagtgcctggagatgcagttataatgccattcagagaagtagccaagccaacagagcctgatgagcatgaagcaaaggccgataatgaaccgagctgttcgccggcagctcaagaactgttgacaaggctgggatttttactgggagaagggatcccaagtgccacacacataaccattgaagacaaaaatgaaaccatgtgcacagctctgagtcaaggcatcagtccttgctccacactaacaagcagcaccgcatctcctagcaccgatagcccctgctcaaccttgaatagctgtgtcagcaagacggcagccaacaaaagtccctgtgagaccattagcagccctagttccaccctggaaagcaaggacagtggaattatagccacaattacaagttcatccgaaaatgatgaccggagtggctccagtttggaatggaataaagatggaagcctaagattaggggttcagaagggagtgcttcatgaccgcagggcagataactgctccccagtggcagaagaggagaccaccgggtcagcagagagcacgctgcccaaagcagaatcctcagctggagatggtccagtcccttattctcagggctccagctcactaataatgccacggcccaactcagttgcagcaacaagctcaaccaaattggaagatctgagttatttagacgggcagagaaatgctcctctacggacgtcaattagattaccatggcacaatacggccggaggtagggcacaggaagttaaagcacgatttgctccctacaagccacaagacattttgttgaaacccttgttgtttgaagtaccaagcataacaacagactctgtgtttgtgggaagggattggctctttcaccagatagaagaaaacttgaggaacacagaactggcagaaaacagaggcgcggtggtggttggcaatgtgggatttgggaagacggcaatcatttccaagttggtggccctgagctgccacggaagccgcatgaggcagattgcttccaacagcccgggttcatcacctaaaacctctgaccccactcaggatcttcatttcactccgttgctttcaccgagttcttccacaagtgcttccagcacagctaaaacacctcttgggtctatcagtgctgaaaaccagagaccaagagaggatgcagtgaaatatcttgcttctaaggtggtggcctaccactactgccaggctgacaacacgtacacttgcctggtgcccgagtttgtgcacagcatcgcagctttgctctgccggtcccatcagctggccgcctacagagaccttctgataaaggagccccaactacagagcatgctgagcctccgatcctgtgtgcaggacccggtggcagctttcaagaggggagtgctggagccactcacaaacctgagaaatgagcagaaaattcctgaagaagaatacattattttgatagatggcttaaatgaagctgagtttcataaacctgattatggagatacgctttcttcatttattaccaaaattatttctaaatttcctgcctggttgaagttgattgtgactgtaagagcaaattttcaggaaatcataagtgcgctgccatttgtcaagctttccttagatgacttcccagacaacaaagacatccacagtgacctgcacgcctacgtccagcacagggtgcacagcagccaggacatcctcagcaacatctccctgaacggcaaggccgatgccacactcattggaaaagtgagcagccacctggtgctgcggagcctcggctcctacctgtacctcaagctcaccctggaccttttccagaggggccacttggtcattaagagtgccagctacaaggtggtgcccgtgtctctctctgagctctatttgcttcagtgcaacatgaagttcatgacccagtccgcctttgagagggcacttccgattctcaacgtggccctcgcatccctccaccccatgacagacgagcagatctttcaggctattaatgctggccacatccagggggagcagggatgggaagactttcagcagaggatggacgccctctcctgcttcctcattaagaggcgagacaaaacccgcatgttctgccacccgtccttcagggagtggcttgtatggagagcagacggggaaaacacggccttcctgtgtgagcccaggaacgggcacgcgctcttggcattcatgttctcgcgtcaggagggcaagttgaaccgccagcagaccatggagcttggccaccacatcctgaaggcgcacattttcaagggcctcagtaagaagacgggaatttcttcaagccatctccaagccctgtggatcggctacagcaccgaggggctgtccgccgccctggcctctctcaggaatctctatactcccaacgtgaaggtgagccgtctcctgattttgggaggggccaacgtgaactacaggacagaagtgttaaataatgccccaatcctgtgcgtccagtctcaccttggccacgaggaagttgtcactctgctcctggaatttggtgcctgcctggacggaacgtcagagaacggcatgactgccctctgttacgcagcagctgctggccacatgaagctggtgtgtctgctgaccaagaagggagtgagagtggaccacttggataagaagggccagtgtgcgcttgtccacagtgccctacggggccacggtgacattctccagtacctgctgacttgtgagtggtcgccgggtcctccccagccaggcaccctgaggaagagccacgccctgcagcaggcgctgaccgcggcggccagcatgggccacagctcggtggtccagtgcttgctggggatggagaaggaacatgaagtagaagtcaatggcaccgacacattgtggggagaaacagccctgactgccgccgcaggaagagggaagctggaggtctgtgagctgctgctggggcatggagctgctgtgtcgcggacaaacaggagaggggttccacctttgttttgtgcagcacgccaggggcattggcagattgttagactgctgttggaacgcggctgtgatgtgaacctaagtgacaagcaaggccggacgcccctcatggtggctgcttgtgaagggcacttgagcaccgtggaattcctcctttcaaaaggtgcagccctttcttctctagacaaagagggtctgtcagcattaagctgggcttgtctgaaaggtcacagggcagtggtccagtatctggttgaagaaggagctgcaatagaccagacagacaagaatggccgcacacccttggacctggctgccttctatggcgatgccgagactgtgctgtacctggtggagaagggagccgtgatcgagcatgtggaccacagcgggatgcggcccttggacagagccatcggctgccggaacacatctgtagtggtggcgctactcagaaagggagccaagttaggaaatgctgcttgggcgatggccacttccaaacctgatatcttgattatacttttacagaaattaatggaggaaggaaatgtgatgtacaaaaaagggaaaatgaaagaggcagcccagaggtaccagtatgccttaagaaagtttcctcgagaaggattcggagaggacatgagacccttcaatgaattaagggtttccctctatctcaatttgtcgcgatgccgaagaaaaacaaatgactttggcatggcagaggaatttgcttccaaggctctcgaattgaagcccaagtcctatgaagccttttatgccagagcaagagcgaagagaaatagcaggcaattcgtggcagctctggctgacctgcaagaggctgtgaaactctgtcccaccaatcaggaagtcaagaggcttctggcccgcgtagaagaggagtgcaaacaactccagaggagtcaacagcaaaaacagcagggcccgctaccagctccactcaacgactccgagaacgaagaggacaccccaacccctggcttaagtgaccactttcactctgaggagactgaagaggaagaaacttctccccaggaagaatctgtttccccaactcccaggtcccagccatcctcatctgtcccttcctcatacatccgaaaccttcaagaagggttacagtccaaaggaaggccggtatcgccacagagcagggcaggaatcggcaagtccctgagagagcctgtggcccagccagggctgctcctgcagccctccaagcaggcccagatcgtgaaaaccagccagcacctgggctctggccagtcggcagtgagaaatggcagtatgaaagttcagatctcttctcagaaccctcctccaagtcccatgccagggagaatcgctgccactcctgctgggagcagaacccagcatttagagggaacaggtactttcactacaagagctggttgtggccactttggggatcggctgggccccagccagaatgtccgcctgcagtgtggtgagaatggccctgcacaccctttaccaagtaagacgaaaaccacagagaggcttctgtctcattcctccgtggctgtggacgcagcccctccaaaccaaggtgggctggcgacctgcagcgacgtgcgacacccagcttccctcaccagctcaggctcttctggttctccatccagcagcataaagatgtcaagttcaaccagtagtttgacttcgagcagcagtttttcagatggcttcaaggtccaaggaccagatactagaattaaagacaaggttgtaacccacgttcagagcggtacagctgagcacagaccccgcaacacgccgttcatgggcatcatggataagactgcgaggttccaacagcagagcaatcctccaagccgcagctggcactgtccggcaccagaggggctgctgacaaacacgtcttctgcagctggcctgcagtctgctaacactgagaagccctctctcatgcaagtgggaggatataataaccaagccaaaacctgttctgtttctaccctgagtgcaagtgtccacaatggggcacaagtgaaggagctagaagaaagcaagtgccaaattccagtccactctcaagagaacaggataactaagactgtttctcatctgtaccaggaaagtatctccaaacagcagcctcatattagtaatgaagcccacaggagccacctcactgcagccaaaccaaagcgatcatttatagagtcaaatgtgtgaaccttaagaaatccccatttgtggaatttggaaacgtgtgttgactcctggtggtaaattaaatagtttttttcatcagaaaaattattttttagccattttttttctttggggtggatctgatgccattgatatatctaaaatgtgggataaaacttctttaatagctagaaatcaccataaataagaatgctaaacagaattgaaaattatatcaacttaaaattttaagacagcccagaagacattaatgactctcacttatgaaattgtttggcttttgccactttcttccttgcctttgctatatggtagaatcacagaacttacttagagaataaatatgtctattgttcaagagtaacaggtttaactcatgaccaagtgatgtacatccaagtgatgtattctggaaacgatggaattttacagttacagttccattgagtcaaatcccattttatatatacataaaaattaagttctgagtgagttctagctaaatataagtgcgactgtaaacgcagccaatttttttaagcagaatatgagaacacctaagtattctcttcatagcagttcctataaagggattaaacacttatttctgtgttatggttcttattcatatatttttatagcacttttggaacctatatttgtgcttgaaggtgtttttgatatttggaaacagtataagccatttggagtcatgattggtggtcaagtggattcaagctaaaatactaagaccagcattcttagtggcgcttataaattagctctcacctggtttccaaactgcttttaacaatggtagtgctcctggaacaatccttccaagctcctctaaggacaatatttaattcagatactaaaggtaagactggttgttacttttgttttgttgtacaattagtactttatagtcacatgttgtatatattaaatagcccagttttattcagacttgtaaatagaactatttcaatgtagttaatctaaaaacaaaaaagaaaaccccagtcacgatttgcatgttctctgtaagcttcatccatgctggttattgcactgaatgatatattattagggcatgttaacagtataccagtaacagcactttatctcatttatatgaacacctttgaggtgctacttaagtccaagctctgatgtattattcatttgtaaagataaggtacaggaatgaaccttggtttaaaggtatttttatatgaaaatggtgtgttattggaagatgttaaaatgctaatttgagagaagtaggagtgtatctgttttatatgttgggatgtgaaatttattttctaaaattgaggagaaggaagttatatatttgcagaatgttttaaagtgaattgttgtaatgaagttcctgtgaacatcattatggttttgtacaaataggaacctctgatgtcattcttcaacgtttgttcctgtgtgtacaattgtactttgtatgaacagctttatcatttttataggctttccatgagttttgctgtaactactatggcttatttattttctttaatatttgtgaaagtcttactcctttgttagttttgtttctgcacaactactgtacttttccatatggaataaagactattaatagaaaaaaaaaaaaaaaaaaaaaaaaaaaaaaaaaaaaaaaaaaaaaaaaaaaaaaaaaaaaaaaaaaaaaaaaaaaaaaaaaaaaaaaaaaaaaaaaaaaaaaaaaaaaaaaaaaaaaaaaaaaaaaaaaaaaaaaaaaa

SEQ ID NO: 56315 - DNA, 2074 bp, Homo Sapiens
ggggctagaaaagagcgtcgatgccggcggcagtgatgagccctagcacgcgtccgctctttggcggctcggaggagcggctgctgctgctgctgctgctgctggtggcccctttgcagaaaagttctaagaacagtgctgttggctcagtgagatgaggttatcggaaaactttctgtttacacaagagttgcctccttcaaagaagcatgcatggtccttgcaggtcactgtgcccatcactctgcatagtccagctgcactctgcttcacacagctgcctgcccattgcaggcatttgagtttgcaatccatgccttaaactttaaatcacactggctacagcgttgtgtgtttcttggtaaacactgggtaaatcagctcctgtggatgttgactgaagtttctatgtttgcaagctaatcctcagcagtttctttatgtattgctgtccttgaatattagcccatttgaaaacgcctgggaagttcagccatcagtatgtccaagtacaaacttattatgttaagacatggagagggtgcttggaataaggagaaccgtttttgtagctgggtggatcagaaactcaacagcgaaggaatggaggaagctcggaactgtgggaagcaactcaaagcgttaaactttgagtttgatcttgtattcacatctgtccttaatcggtccattcacacagcctggctgatcctggaagagctaggccaggaatgggtgcctgtggaaagctcctggcgtctaaatgagcgtcactatggggccttgatcggtctcaacagggagcagatggctttgaatcatggtgaagaacaagtgaggctctggagaagaagctacaatgtaaccccgcctcccattgaggagtctcatccttactaccaagaaatctacaacgaccggaggtataaagtatgcgatgtgcccttggatcaactgccacggtcggaaagcttaaaggatgttctggagagactccttccctattggaatgaaaggattgctcccgaagtattacgtggcaaaaccattctgatatctgctcatggaaatagcagtagggcactcctaaaacacctggaaggtatctcagatgaagacatcatcaacattactcttcctactggagtccccattcttctggaattggatgaaaacctgcgtgctgttgggcctcatcagttcctgggtgaccaagaggcgatccaagcagccattaagaaagtagaagatcaaggaaaagtgaaacaagctaaaaaatagtctttctcaactgttggctaagaagaaatgcaaaagaagtggcataggagtgtgttatgggtgctgaactctctctctttttccccgattttccagagctaggctgtggagtagagtttgtataggtaactaggtaacttattgtggcccagataaggctttaggatgcctcagtgcttatgtcatagccttatgagttagctttcttgctagccccctagtcggtcaccaaactagtaactagtggggcttaatgaaggtcataagtttctgagatgggagagcaacaagtagagatgaagttaaaggtatttatcattcaagaaatcattattgagtcaccattgacaggcactattctaatcagtagttcactttaatatttaataagattttctgggataacagtaagggatattagataatataccgtatgtatttattactagtcttttcctctaggaaaagggatactttgataattaaggccagaggcccattagttgagaaagtcacagatatatttctccaagaaagccaacaaccaccaccacaatgacagaaatgacaacaaggccctttaacttgtcttctagtttagagacatccttcatttgacatttagtagaattcctctttggccacaagaataagcagcaaataaacaactatggctgttgaggttctcattttggtttgttttaattttttgaactttgggtacctgtaattagtttaaaaataaagttcctgataataaagtgactgaaaatggcaaaaaaaaaaaaaaaaa

SEQ ID NO: 56316 - DNA, 10719 bp, Homo Sapiens
tggagacagaatggaggtgctgccggactcggaaatggggtccaagggtagccaaggatggctgcagcttcatatgatcagttgttaaagcaagttgaggcactgaagatggagaactcaaatcttcgacaagagctagaagataattccaatcatcttacaaaactggaaactgaggcatctaatatgaaggaagtacttaaacaactacaaggaagtattgaagatgaagctatggcttcttctggacagattgatttattagagcgtcttaaagagcttaacttagatagcagtaatttccctggagtaaaactgcggtcaaaaatgtccctccgttcttatggaagccgggaaggatctgtatcaagccgttctggagagtgcagtcctgttcctatgggttcatttccaagaagagggtttgtaaatggaagcagagaaagtactggatatttagaagaacttgagaaagagaggtcattgcttcttgctgatcttgacaaagaagaaaaggaaaaagactggtattacgctcaacttcagaatctcactaaaagaatagatagtcttcctttaactgaaaatttttccttacaaacagatatgaccagaaggcaattggaatatgaagcaaggcaaatcagagttgcgatggaagaacaactaggtacctgccaggatatggaaaaacgagcacagcgaagaatagccagaattcagcaaatcgaaaaggacatacttcgtatacgacagcttttacagtcccaagcaacagaagcagagaggtcatctcagaacaagcatgaaaccggctcacatgatgctgagcggcagaatgaaggtcaaggagtgggagaaatcaacatggcaacttctggtaatggtcagggttcaactacacgaatggaccatgaaacagccagtgttttgagttctagtagcacacactctgcacctcgaaggctgacaagtcatctgggaaccaaggtggaaatggtgtattcattgttgtcaatgcttggtactcatgataaggatgatatgtcgcgaactttgctagctatgtctagctcccaagacagctgtatatccatgcgacagtctggatgtcttcctctcctcatccagcttttacatggcaatgacaaagactctgtattgttgggaaattcccggggcagtaaagaggctcgggccagggccagtgcagcactccacaacatcattcactcacagcctgatgacaagagaggcaggcgtgaaatccgagtccttcatcttttggaacagatacgcgcttactgtgaaacctgttgggagtggcaggaagctcatgaaccaggcatggaccaggacaaaaatccaatgccagctcctgttgaacatcagatctgtcctgctgtgtgtgttctaatgaaactttcatttgatgaagagcatagacatgcaatgaatgaactagggggactacaggccattgcagaattattgcaagtggactgtgaaatgtatgggcttactaatgaccactacagtattacactaagacgatatgctggaatggctttgacaaacttgacttttggagatgtagccaacaaggctacgctatgctctatgaaaggctgcatgagagcacttgtggcccaactaaaatctgaaagtgaagacttacagcaggttattgcgagtgttttgaggaatttgtcttggcgagcagatgtaaatagtaaaaagacgttgcgagaagttggaagtgtgaaagcattgatggaatgtgctttagaagttaaaaaggaatcaaccctcaaaagcgtattgagtgccttatggaatttgtcagcacattgcactgagaataaagctgatatatgtgctgtagatggtgcacttgcatttttggttggcactcttacttaccggagccagacaaacactttagccattattgaaagtggaggtgggatattacggaatgtgtccagcttgatagctacaaatgaggaccacaggcaaatcctaagagagaacaactgtctacaaactttattacaacacttaaaatctcatagtttgacaatagtcagtaatgcatgtggaactttgtggaatctctcagcaagaaatcctaaagaccaggaagcattatgggacatgggggcagttagcatgctcaagaacctcattcattcaaagcacaaaatgattgctatgggaagtgctgcagctttaaggaatctcatggcaaataggcctgcgaagtacaaggatgccaatattatgtctcctggctcaagcttgccatctcttcatgttaggaaacaaaaagccctagaagcagaattagatgctcagcacttatcagaaacttttgacaatatagacaatttaagtcccaaggcatctcatcgtagtaagcagagacacaagcaaagtctctatggtgattatgtttttgacaccaatcgacatgatgataataggtcagacaattttaatactggcaacatgactgtcctttcaccatatttgaatactacagtgttacccagctcctcttcatcaagaggaagcttagatagttctcgttctgaaaaagatagaagtttggagagagaacgcggaattggtctaggcaactaccatccagcaacagaaaatccaggaacttcttcaaagcgaggtttgcagatctccaccactgcagcccagattgccaaagtcatggaagaagtgtcagccattcatacctctcaggaagacagaagttctgggtctaccactgaattacattgtgtgacagatgagagaaatgcacttagaagaagctctgctgcccatacacattcaaacacttacaatttcactaagtcggaaaattcaaataggacatgttctatgccttatgccaaattagaatacaagagatcttcaaatgatagtttaaatagtgtcagtagtagtgatggttatggtaaaagaggtcaaatgaaaccctcgattgaatcctattctgaagatgatgaaagtaagttttgcagttatggtcaatacccagccgacctagcccataaaatacatagtgcaaatcatatggatgataatgatggagaactagatacaccaataaattatagtcttaaatattcagatgagcagttgaactctggaaggcaaagtccttcacagaatgaaagatgggcaagacccaaacacataatagaagatgaaataaaacaaagtgagcaaagacaatcaaggaatcaaagtacaacttatcctgtttatactgagagcactgatgataaacacctcaagttccaaccacattttggacagcaggaatgtgtttctccatacaggtcacggggagccaatggttcagaaacaaatcgagtgggttctaatcatggaattaatcaaaatgtaagccagtctttgtgtcaagaagatgactatgaagatgataagcctaccaattatagtgaacgttactctgaagaagaacagcatgaagaagaagagagaccaacaaattatagcataaaatataatgaagagaaacgtcatgtggatcagcctattgattatagtttaaaatatgccacagatattccttcatcacagaaacagtcattttcattctcaaagagttcatctggacaaagcagtaaaaccgaacatatgtcttcaagcagtgagaatacgtccacaccttcatctaatgccaagaggcagaatcagctccatccaagttctgcacagagtagaagtggtcagcctcaaaaggctgccacttgcaaagtttcttctattaaccaagaaacaatacagacttattgtgtagaagatactccaatatgtttttcaagatgtagttcattatcatctttgtcatcagctgaagatgaaataggatgtaatcagacgacacaggaagcagattctgctaataccctgcaaatagcagaaataaaagaaaagattggaactaggtcagctgaagatcctgtgagcgaagttccagcagtgtcacagcaccctagaaccaaatccagcagactgcagggttctagtttatcttcagaatcagccaggcacaaagctgttgaattttcttcaggagcgaaatctccctccaaaagtggtgctcagacacccaaaagtccacctgaacactatgttcaggagaccccactcatgtttagcagatgtacttctgtcagttcacttgatagttttgagagtcgttcgattgccagctccgttcagagtgaaccatgcagtggaatggtaagtggcattataagccccagtgatcttccagatagccctggacaaaccatgccaccaagcagaagtaaaacacctccaccacctcctcaaacagctcaaaccaagcgagaagtacctaaaaataaagcacctactgctgaaaagagagagagtggacctaagcaagctgcagtaaatgctgcagttcagagggtccaggttcttccagatgctgatactttattacattttgccacggaaagtactccagatggattttcttgttcatccagcctgagtgctctgagcctcgatgagccatttatacagaaagatgtggaattaagaataatgcctccagttcaggaaaatgacaatgggaatgaaacagaatcagagcagcctaaagaatcaaatgaaaaccaagagaaagaggcagaaaaaactattgattctgaaaaggacctattagatgattcagatgatgatgatattgaaatactagaagaatgtattatttctgccatgccaacaaagtcatcacgtaaagcaaaaaagccagcccagactgcttcaaaattacctccacctgtggcaaggaaaccaagtcagctgcctgtgtacaaacttctaccatcacaaaacaggttgcaaccccaaaagcatgttagttttacaccgggggatgatatgccacgggtgtattgtgttgaagggacacctataaacttttccacagctacatctctaagtgatctaacaatcgaatcccctccaaatgagttagctgctggagaaggagttagaggaggggcacagtcaggtgaatttgaaaaacgagataccattcctacagaaggcagaagtacagatgaggctcaaggaggaaaaacctcatctgtaaccatacctgaattggatgacaataaagcagaggaaggtgatattcttgcagaatgcattaattctgctatgcccaaagggaaaagtcacaagcctttccgtgtgaaaaagataatggaccaggtccagcaagcatctgcgtcttcttctgcacccaacaaaaatcagttagatggtaagaaaaagaaaccaacttcaccagtaaaacctataccacaaaatactgaatataggacacgtgtaagaaaaaatgcagactcaaaaaataatttaaatgctgagagagttttctcagacaacaaagattcaaagaaacagaatttgaaaaataattccaaggtcttcaatgataagctcccaaataatgaagatagagtcagaggaagttttgcttttgattcacctcatcattacacgcctattgaaggaactccttactgtttttcacgaaatgattctttgagttctctagattttgatgatgatgatgttgacctttccagggaaaaggctgaattaagaaaggcaaaagaaaataaggaatcagaggctaaagttaccagccacacagaactaacctccaaccaacaatcagctaataagacacaagctattgcaaagcagccaataaatcgaggtcagcctaaacccatacttcagaaacaatccacttttccccagtcatccaaagacataccagacagaggggcagcaactgatgaaaagttacagaattttgctattgaaaatactccggtttgcttttctcataattcctctctgagttctctcagtgacattgaccaagaaaacaacaataaagaaaatgaacctatcaaagagactgagccccctgactcacagggagaaccaagtaaacctcaagcatcaggctatgctcctaaatcatttcatgttgaagataccccagtttgtttctcaagaaacagttctctcagttctcttagtattgactctgaagatgacctgttgcaggaatgtataagctccgcaatgccaaaaaagaaaaagccttcaagactcaagggtgataatgaaaaacatagtcccagaaatatgggtggcatattaggtgaagatctgacacttgatttgaaagatatacagagaccagattcagaacatggtctatcccctgattcagaaaattttgattggaaagctattcaggaaggtgcaaattccatagtaagtagtttacatcaagctgctgctgctgcatgtttatctagacaagcttcgtctgattcagattccatcctttccctgaaatcaggaatctctctgggatcaccatttcatcttacacctgatcaagaagaaaaaccctttacaagtaataaaggcccacgaattctaaaaccaggggagaaaagtacattggaaactaaaaagatagaatctgaaagtaaaggaatcaaaggaggaaaaaaagtttataaaagtttgattactggaaaagttcgatctaattcagaaatttcaggccaaatgaaacagccccttcaagcaaacatgccttcaatctctcgaggcaggacaatgattcatattccaggagttcgaaatagctcctcaagtacaagtcctgtttctaaaaaaggcccaccccttaagactccagcctccaaaagccctagtgaaggtcaaacagccaccacttctcctagaggagccaagccatctgtgaaatcagaattaagccctgttgccaggcagacatcccaaataggtgggtcaagtaaagcaccttctagatcaggatctagagattcgaccccttcaagacctgcccagcaaccattaagtagacctatacagtctcctggccgaaactcaatttcccctggtagaaatggaataagtcctcctaacaaattatctcaacttccaaggacatcatcccctagtactgcttcaactaagtcctcaggttctggaaaaatgtcatatacatctccaggtagacagatgagccaacagaaccttaccaaacaaacaggtttatccaagaatgccagtagtattccaagaagtgagtctgcctccaaaggactaaatcagatgaataatggtaatggagccaataaaaaggtagaactttctagaatgtcttcaactaaatcaagtggaagtgaatctgatagatcagaaagacctgtattagtacgccagtcaactttcatcaaagaagctccaagcccaaccttaagaagaaaattggaggaatctgcttcatttgaatctctttctccatcatctagaccagcttctcccactaggtcccaggcacaaactccagttttaagtccttcccttcctgatatgtctctatccacacattcgtctgttcaggctggtggatggcgaaaactcccacctaatctcagtcccactatagagtataatgatggaagaccagcaaagcgccatgatattgcacggtctcattctgaaagtccttctagacttccaatcaataggtcaggaacctggaaacgtgagcacagcaaacattcatcatcccttcctcgagtaagcacttggagaagaactggaagttcatcttcaattctttctgcttcatcagaatccagtgaaaaagcaaaaagtgaggatgaaaaacatgtgaactctatttcaggaaccaaacaaagtaaagaaaaccaagtatccgcaaaaggaacatggagaaaaataaaagaaaatgaattttctcccacaaatagtacttctcagaccgtttcctcaggtgctacaaatggtgctgaatcaaagactctaatttatcaaatggcacctgctgtttctaaaacagaggatgtttgggtgagaattgaggactgtcccattaacaatcctagatctggaagatctcccacaggtaatactcccccggtgattgacagtgtttcagaaaaggcaaatccaaacattaaagattcaaaagataatcaggcaaaacaaaatgtgggtaatggcagtgttcccatgcgtaccgtgggtttggaaaatcgcctgaactcctttattcaggtggatgcccctgaccaaaaaggaactgagataaaaccaggacaaaataatcctgtccctgtatcagagactaatgaaagttctatagtggaacgtaccccattcagttctagcagctcaagcaaacacagttcacctagtgggactgttgctgccagagtgactccttttaattacaacccaagccctaggaaaagcagcgcagatagcacttcagctcggccatctcagatcccaactccagtgaataacaacacaaagaagcgagattccaaaactgacagcacagaatccagtggaacccaaagtcctaagcgccattctgggtcttaccttgtgacatctgtttaaaagagaggaagaatgaaactaagaaaattctatgttaattacaactgctatatagacattttgtttcaaatgaaactttaaaagactgaaaaattttgtaaataggtttgattcttgttagagggtttttgttctggaagccatatttgatagtatactttgtcttcactggtcttattttgggaggcactcttgatggttaggaaaaaaatagtaaagccaagtatgtttgtacagtatgttttacatgtatttaaagtagcatcccatcccaacttcctttaattattgcttgtcttaaaataatgaacactacagatagaaaatatgatatattgctgttatcaatcatttctagattataaactgactaaacttacatcagggaaaaattggtatttatgcaaaaaaaaatgtttttgtccttgtgagtccatctaacatcataattaatcatgtggctgtgaaattcacagtaatatggttcccgatgaacaagtttacccagcctgctttgctttactgcatgaatgaaactgatggttcaatttcagaagtaatgattaacagttatgtggtcacatgatgtgcatagagatagctacagtgtaataatttacactattttgtgctccaaacaaaacaaaaatctgtgtaactgtaaaacattgaatgaaactattttacctgaactagattttatctgaaagtaggtagaatttttgctatgctgtaatttgttgtatattctggtatttgaggtgagatggctgctcttttattaatgagacatgaattgtgtctcaacagaaactaaatgaacatttcagaataaattattgctgtatgtaaactgttactgaaattggtatttgtttgaagggtcttgtttcacatttgtattaataattgtttaaaatgcctcttttaaaagcttatataaatttttttcttcagcttctatgcattaagagtaaaattcctcttactgtaataaaaacaattgaagaagactgttgccacttaaccattccatgcgttggcacttatctattcctgaaatttcttttatgtgattagctcatcttgatttttaatatttttccacttaaacttttttttcttactccactggagctcagtaaaagtaaattcatgtaatagcaatgcaagcagcctagcacagactaagcattgagcataataggcccacataatttcctctttcttaatattatagaattctgtacttgaaattgattcttagacattgcagtctcttcgaggctttacagtgtaaactgtcttgccccttcatcttcttgttgcaactgggtctgacatgaacactttttatcaccctgtatgttagggcaagatctcagcagtgaagtataatcagcactttgccatgctcagaaaattcaaatcacatggaactttagaggtagatttaatacgattaagatattcagaagtatattttagaatccctgcctgttaaggaaactttatttgtggtaggtacagttctggggtacatgttaagtgtccccttatacagtggagggaagtcttccttcctgaaggaaaataaactgacacttattaactaagataatttacttaatatatcttccctgatttgttttaaaagatcagagggtgactgatgatacatgcatacatatttgttgaataaatgaaaatttatttttagtgataagattcatacactctgtatttggggagggaaaacctttttaagcatggtggggcactcagataggagtgaatacacctacctggtgccttgaaaatcacatcaagtagttaattatctaccccttacctgtgtttataacttccaggtaatgagaatgattttttttaaagctaaaatgccagtaaataaaagtgctatgacttgagctaagatatttgactccaatgcctgtactgtgtctactgcaccactttgtaaacacttcaatttactatctttgaaatgattgacctttaaatttttgccaaatgttatctgaaattgtctatgaataccatctacttctgttgttttcccaggcttccataaacaatggagatacatgcaaaaaaaaaaaaaaaaaa

SEQ ID NO: 56317 - DNA, 5239 bp, Homo Sapiens
acgtgacgtggccgcggaacctgagctgcggggcctaagccgagctaaattcgttgcaggtggccgcggcgggtgcaaccacaaaggctaatccgaaggagtcggggaggctcgtggagtcgatgcttcctcttccaagtcaggtcggctcccgttaccttctcagcattcgccgttccggtcttcctgagcgcgtgcatgaggtctttcgcgtggggaagctccggtgaccatgtaggggacaagagtgaggaagctcatggtgcttgggacgaggtcagcgctgtcggcgcgctgctccagcgcccaccacaccctggtgcgggccgacgggccctgggccctggtgggagctccggcctccggtcaaggcctggccgggagcgccacgaattctcgcgtcgtctcgcgagagtccaagttaaagaacatggcgacgtctaatctgttaaagaataaaggttctcttcagtttgaagacaaatgggattttatgcgcccgattgttttgaagcttttacgccaggaatctgttacaaaacagcagtggtttgatctgttttcggatgtgcatgcagtctgtctttgggatgataaaggcccagcaaaaattcatcaggctttaaaagaagatattcttgagtttattaagcaggcacaggcacgagtactgagccatcaagatgatacggctttgctaaaagcatatattgttgaatggcgaaagttctttacacaatgtgatattttaccaaaacctttttgtcaactagagattactttaatgggtaaacagggcagcaataaaaaatcaaatgtggaagacagtattgttcgaaagcttatgcttgatacatggaatgagtcaatcttttcaaacataaaaaacagactccaagatagtgcaatgaagctggtacatgctgagagattgggagaagcttttgattctcagctggttattggagtaagagaatcctatgttaacctttgttctaatcctgaggataaacttcaaatttatagggacaattttgagaaggcatacttggattcaacagagagattttatagaacacaagcaccctcgtatttacaacaaaatggtgtacagaattatatgaaatatgcagatgctaaattaaaagaagaagaaaaacgagcactacgttatttagaaacaagacgagaatgtaactccgttgaagcactcatggaatgctgtgtaaatgccctggtgacatcatttaaagagactatcttagctgagtgccaaggcatgatcaagagaaatgaaactgaaaaattacatttaatgttttcattgatggacaaagttcctaatggtatagagccaatgttgaaagacttggaggaacatatcattagtgctggcctggcagatatggtagcagctgctgaaactattactactgactctgagaaatacgttgagcagttacttacactatttaatagatttagtaaactcgtcaaagaagcttttcaagatgatccacgatttcttactgcaagagataaggcgtataaagcagttgttaatgatgctaccatatttaaacttgaattacctttgaagcagaagggggtgggattaaaaactcagcctgaatcaaaatgccctgagctgcttgccaattactgtgacatgttgctaagaaaaacaccattaagcaaaaaactaacctctgaagagattgaagcaaagcttaaagaagtgctcttggtacttaagtatgtacagaacaaagatgtttttatgaggtatcataaagctcatttgacacgacgtcttatattagacatctctgccgatagtgaaattgaagaaaacatggtagagtggctaagagaagttggtatgccagcggattatgtaaacaagcttgctagaatgtttcaggacataaaagtatctgaagatttgaaccaagcttttaaggaaatgcacaaaaataataaattggcattaccagctgattcagttaatataaaaattctgaatgctggcgcctggtcaagaagttctgagaaagtctttgtctcacttcctactgaactggaggacttgataccggaagtagaagaattctacaaaaaaaatcatagtggtagaaaattacattggcatcatctcatgtcaaatggaattataacatttaagaatgaagttggtcaatatgatttggaggtaaccacgtttcagctcgctgtattgtttgcatggaaccaaagacccagagagaaaatcagctttgaaaatcttaagcttgcaactgaactccctgatgctgaacttaggaggactttatggtctttagtagctttcccaaaactcaaacggcaagttttgttgtatgaacctcaagtcaactcacccaaagactttacagaaggtaccctcttctcagtgaaccaggagttcagtttaataaaaaatgcaaaggttcagaaaaggggtaaaatcaacttgattggacgtttgcagctcactacagaaaggatgagagaagaagagaatgaaggaatagttcaactacgaatactaagaacccaggaagctatcatacaaataatgaaaatgagaaagaaaattagtaatgctcagctgcagactgaattagtagaaattttgaaaaacatgttcttgccacaaaagaaaatgataaaagagcaaatagagtggctaatagagcacaaatacatcagaagagatgaatctgatatcaacactttcatatatatggcataattttgaatatcatggacaatatttagaacccaaattttggagtgcttgggcagaaagttgtaaagtttgtgctggagaaaggtttatttggactttgattacataaatattaaaatctctgccttaccttacaaaaacaactatattttgccaatcacattagttagcatgatggcattcccttcatgttgcacactctttgacagcatgctgttttgtggagaaacttgcattcatgaagagcccattatcaacttttaaaagtgaatttgatttgtacccaccaggagaaatacagttgggaagggtgagggtggggttcttgttgcttttttctcttttttcctctcttaaaaaatgtacttgcacaaggaaggatcttcagatattcatgcactgaaaaatgctgttatcttttgtttttaaaaaatgcaattaaaactagaaatagcactcttggtttcttttgatgaaaagagtgagctggtcaatgcaacattgggaaacggcagatgtaggtgagaagttaagtatttaatagtatcaaattgttcaaacattgctcagtataataactggattttaatggtgacctaaaaatggtattaaatattttcaactttcaaatgttggttttctttaagcaggagactgctattttagttgttgttaaatgatgaggagtttttttttttttaaatatggctggaaagcttgttttgaaaaatgaagcttatattaattgttgcttcaatagtttaaaaaatttatggagataggtaggtcattatgattgcagagccaaaatagcaaaacaaacatattaagtgtgtttactaaacatattgtgtgtttactaacacacttaatgtttatatacctaatatttattatgccatatctgaatttattaaaaacaacacagaaatctcctgctctgatatagttatgtaactgatctcttaatctgtagcatagaagtattttggtattttaaggtctcatgattagggatttgtagcctcaggtttgaatcagtcacctaggggtaagagaaaaaccacaacataagacctgaaaaacagaagcaaaattgttgcactcttaatacgagcagtaaacttgccaaatatatgtacatatatatttatatattttaaaaataaacattttttaaatcgtcagaaggcaacatttaccatgttcctttcagtctatccaaagtagcaacttaactagttgctggcaactgaatacccagagtagtggaaattttaggacttgaggacgtgaacaacttgaaagagaaaattgattccccttgaggaaagaatggctcaacgtggatttttattcattgtggtgcacgtttcaaattttcttgcaaattattttatatcttatttgatgttaagtaatatttttaaagtatggtttttgaagatagtaggaaatggagtacagaaaggcatacagtattatgttacagtggagtgctttcaagagcatttcgtaggatctgtccccatccgaagaggctttgtgaactgcctgctgaatggaaggaaagcaactttaaaacatttagagttttgctgagtatagccaaatgcctgttctgaaacttataggaaattggaattttgtttaaaattttacactttaaggtagcaaatgtcaattattagaccgagcatattgtgaagaattaaactaaaattaatacgtacagttttctctaattaggtgactgttcataatgggtatatttggaatttagaagaaataattttgtagtaattgtggcccttatgtttaacagatagttcagcattggcgtatttgcttgtcccaatacaagaatgccaaaggaggaaacaggaaaaattgccgtccattttaaaaatttaggtttgttgttttaaaccataattgttctcagaacttttttggaacttctaattttgggtcatttaatttaagaatgagagtcatgatgttttgatttatgaaggtgaatttaatgcaaaagtgggtaacactacattcatagcaaagttttttattaaattttataaatttttaatagccaattatgtcctaattgtattttggggaatgaacagcagcaaatactgtaaatgtacagttttcttttttttttttttggttatgtatacaaaagttttaactactttttggtgtttatgaaaatcatttagttgacaaggtgcctatgccattgttaaattttctttaagtaatttaacaacagatttgctaatttaaaaaaaaatgaaaaaaaaaatcttaccagcagtttgtaaaggtctggaatcacagttggcatcctttattcaggtctcttctctccaacgtacacttaaaattggtgccgagcagggatataacctgcagttaagtgaaaagaaaatccagcctccccctccaaaaaaaaaaaaaaaa

SEQ ID NO: 56318 - DNA, 1792 bp, Homo Sapiens
ggggactgatggcctggttggcggtgctgagaactgtcgggagcttcttgagaccgaggaccgaaatcccggctccaggcctcggggactgcggactgtggggaggctggccggagagagagggaaggacggggcctggcccccgggactccctgtgccttgcttggagctgacgccgacggggaactgacaagatcacattttgagaagaagttggaaagaatcccaagtggatgaactgaatatctggatgaggacaagatctgtggggagagactgtaagatagaatgagtccatttaagtcccaggacggtggaaactagctagtagattgcagccatgttgtggaagctgctgctgagatcccagtcctgcaggctgtgttctttcagaaagatgcgatcacctccaaaatacagacctttcttagcatgcttcacctatacaactgataaacagtcgagcaaagaaaatacaagaacagtggaaaagctctataaatgttcagttgacattaggaaaattcgtagattaaaaggatgggtacttttagaggatgaaacctatgttgaagaaattgcgaatattttacaagaactaggtgccgatgagactgctgtagccagtattttggaacgctgcccggaagcaattgtctgtagtccaaccgctgttaacacccagagaaaactctggcagttggtctgcaaaaatgaggaagagttaatcaagttaatagagcagtttccagaatctttctttactattaaagaccaagagaaccagaagctgaatgttcagttctttcaagagttgggactaaaaaatgtggtcattagcagacttttgacagctgcacctaatgtttttcataatcctgttgagaagaataagcaaatggtaagaattctccaagagagttatctagatgtaggtggctctgaggccaacatgaaagtttggctactaaaattgttaagccaaaacccatttattttgttaaattctcccacagctataaaggaaacactagaatttctccaggagcaaggtttcaccagctttgaaattctccagcttctatccaaactcaaaggatttctttttcaactttgcccaagaagtatacagaatagtatttccttctctaaaaatgcttttaaatgcacagatcatgacctgaagcaattagttttgaaatgtcctgcccttttatattattctgttccagttttagaagagagaatgcaaggattattgagagaaggaatttccatagctcagataagagagacgccaatggttcttgaattaacaccacagatagtacagtacaggataaggaaactgaattcctcaggctacagaataaaggatggacatctagcaaatctaaatggatcaaaaaaagagtttgaagctaattttggcaaaattcaggccaaaaaagtaaggccattatttaaccctgtggcaccattaaatgttgaagaatgacatactgactgttgttgcttctttctagcagtgcagggtgaaactaactagcaaagacaaaaattcaggcagtttgtagacaccagtaattttaagaacctgcttagcttctgtgttgtatttaagttatctctaaatagataaattctgactcgtgccatattataaaatataaatcatatttattttaataaggttggtaacttttaccttgaaccattatttcaaaaactcatatactattaaatggcatatcagtgtgatcaaaaaaaaaaaaaaaaaaaaaaaaaaaaa

SEQ ID NO: 56319 - DNA, 2717 bp, Homo Sapiens
ttgacctctcgtccctgagaggcgggtgggtgttagttcagagggttatgggagggctctggcgtcctggatggaggtgcgttcctttctgtggctggcgctggatccaccctgggtctccaaccagggctgcagagagggtagagccgtttcttaggccagagtggagtgggacaggaggtgccgagagaggactgaggtggcttgggacatggaagcgctgcagccttcgagcccggcatccagcattgcagccgccgcggcggcctaagagctcgaaccctttcacacgcgcgcaggaggaggagcggcggcggcagaacaagacgaccctcacttacgtggccgctgtcgccgtgggcatgctgggggcgtcctacgctgccgtacccctttatcggctctattgccagactactggacttggaggatcagcagttgcaggtcatgcctcagacaagattgaaaacatggtgcctgttaaagatcgaatcattaaaattagctttaatgcagatgtgcatgcaagtctccagtggaactttagacctcagcaaacagaaatatatgtggtgccaggagagactgcactggcgttttacagagctaagaatcctactgacaaaccagtaattggaatttctacatacaatattgttccatttgaagctggacagtatttcaataaaatacagtgcttctgttttgaagaacaaaggcttaatccccaagaggaagtagatatgccagtgtttttctacattgatcctgaatttgctgaagatccaagaatgattaaagttgatcttatcactctttcttacactttttttgaagcaaaggaagggcacaagttgccagttccaggatataattgaagtcagcaactaagtcttccttcaaagttgtgatttttgggaaaatcatatatcctatcttctcaaaggagaaatattgtacaataatatgaaggcttatattttaaataattattttttctcaactaatttttttcacttaaacttgagagaacaagttcagcttttatcataagaaactcatatgcctagctagaatatatgactgactattcaataccatactgaagagtttgatactattaaaataagccgctttgttttttaaatatgcaggcatgggttcagcttaattccataattcccttccagattattaactcttcatacttacagcaatgaatctgacaatgtttttcaaaaatgtatgctcagggttatttgtttcaagtcataggccagaacttctaaccatgtttattgtgtctaaaagagttggttgctattttccttcattatgaatagtcagtattttaaaagctcaaagtagaagaggagtcactaagccctaacagcttgtccaaagatttaaattcttatttcaaatttgatttgtcctttaaggtttagggctattttatattcagagttctgaataattactttgaaactgtagtatcataaaattgaaataaaatacatctactaggctgttagccaaagcatcaccattacaagtccatgaatgttaaaatgtacaggtgggattgtgaagatttactgacatcaaaagttcttctggaaacaaacctttgttaaaaaaaaaaagtattaaattgttttaatagtgatttatttgtcatcaaatgtacaacttattctaaatattttcattttctgtgttctaaatagaaatattaagttgcagtaaaaagagaaaaaaaggctatttagcattacaaagaatcatatttaaaggctgcccaatgtagagtctagtgacctgttcaggacacctgaaatataattaaatgacaattatcaaggttttaacaatttataattctaaaccagaggattataaagaagtgcaaattgacttttacattcaactttagttaaatgaaggcactcagtattcttcctgaataatacattcagtttctcacattttatgctttcatctattcagaattatttcatagtaaaataatctactcttatcacagctgtgtgacgatttctaaatgtaggaaggcctgtgaaacatgacactgcagttaaattggttggcctaaggactaagtaatttttcttctgctgaagttttaagtgagtatttgttccaaacaagttctgttgaaatctcacgctgttgtcaggaatcagtgttatcctggaactgttattctatttaatcttcattatagcagaaatgtgccaccatggctttgacatgttggtaggtattgtcttccaggcttcaaagctgcacagagtctacgttttagagagttggcacctttgatgtggtagtgagctgatcatccactttcttctaaaataaagagaagaaaatggccagtattcatcctgtccttctctttccccattccttgataactctcttgtctttactgggaagctggagagtcacagtctagtagaagaaagattagaaaaatttcaactgtaggtgcctttgcaacctatcctgggagaccctaaaacatatttagttttagtgcctagagattttcactcctctaacatctctggatacagtgtccctggtcaacatgaagaagttacagaagaacgctttctgatcctggcccctaaagaatttacttgtgctaagtaataaaattcctattgatcaaaaaaaaaaaaaaaaaa

SEQ ID NO: 56320 - DNA, 3286 bp, Homo Sapiens; identical to SEQ ID NO: 29716

SEQ ID NO: 56321 - DNA, 2320 bp, Homo Sapiens; identical to SEQ ID NO: 31867

SEQ ID NO: 56322 - DNA, 1698 bp, Homo Sapiens
tgagactggggcctcgctcgctcccgacccggttgcaagtgttgcggtgggagaaagtcgcgtccgcatcggaggggaagcgccgtcatgcctaagtattatgaggacaagccgcagggcggcgcgtgcgcgggcctgaaggaggacctgggcgcgtgtctgctgcagtcggactgtgtggtccaggaaggaaaatcacctcggcagtgtttgaaggaaggatactgcaactctttgaagtacgcattttttgagtgtaaaagatcagtgttggataacagggcaagattcagaggaagaaaaggatattgatgcattatgttgaagccaacatggaaaacaacaaatattttccctggtcattaacacaaagaagccaaaacaggaaacatactttttactacatctgtttggttggaccagatttcccctccgtggaacactgaagaaagtggatgagttgttttcgaatatgtataaagtaaatgattctcttgatccaagttatttttagaagaaaaacctaattgaacaggtatgggttgggagcataataaatgtgttttgagaattgttctaaagcacagaaaatggaaagactgttatttgcaaacttgactcttcaattgaattacccaattagtacaggccactgatttgactgacacagtcgataacatgcagcctatccagaaggtgtctgttgggaaagtttaggataaaactttttctttagttcagtcttttcctgtctagttctaaaatgaattgtgtttgattccttagagaagaaatacttcatttgtgctctgattcactgaagtaataacctcagcactttaatagcgtccacaggcatagctgatgctaggccccagattgtgttgcccaggctctttaccatcatcttcggactgtttttgtttcctggttacattttcagtctggcccgctctacataatgggccagtgtcagctccaagtccacatccttattatccatgattcaaaagggagagagagaacttcctttttcagggtccacaaatcaaatctataaaaggactctggtcttcccaggatcacctgcccttgcattggaccagtccctgtggaagaggggatgggggcctgtgatcttggccaggcctgggctatctatctgcactgtcattgctaactcctgtcagaatcacatggatgagtagtgggctgaatcccaaaaggaaaggggtttagagcaagtggaaacaacagatgttcactatagaaagcaagaatgaaaaccatgaagtggttgaagattagccttacagtaattttattctgatcacttaatacagtagagtcaaacaggaatccaagtttccaactttattatttttggcactgaagaattacaaagaactctagcgtctttatacctccgtggttcactggagttaaagcaatcggggcgttgtacagctcacttgagtttttaaaggttctactaaaaagtgagaattccacagcaatatgggtcattgttgcagaatatcacaaaggtctgttgtgtatactccttttcaccaggaaagggacaataatagtttttttcaatgtatatatatataagtgatctaactttttattaataaaagtaaacaactctaaaatgtaaaaaaaaaaaaaaaaaaaaaaaaaaaaaaaaaaaaa

SEQ ID NO: 56323 - DNA, 5418 bp, Homo Sapiens; identical to SEQ ID NO: 29934

SEQ ID NO: 56324 - DNA, 6076 bp, Homo Sapiens
gattcctgcagggagggaggagagaagggcggcagtgggagggggaggtacctggaactgggagtgatgtcagctcccagctcggtgcctgcccggattcctgacatggtgtagtgcaggcagggtggggaaaggacggggaaggactcgtgtgctgcgagctggcggccgggccggagtgctggggctttgaactccgagaggaggtggaccagaacttttggaactagtgccggcggctctccaccccccagtataaaagaacgtgtggatcactttgctgagtacatccaagatttgaagaactgaaataaatcagctttaaacctgctttttaaaaatatctgggttggaatttgcccctgacaaataataaaatgatgagtgatgcaagtgacatgttggctgcagcgttggagcagatggatggtatcatagcaggttctaaggctctggaatattccaatgggatttttgattgccaatctcccacctctccattcatgggaagtttgcgagctctgcaccttgtggaagacctgcgtggattgttagagatgatggaaacagatgagaaagaaggcttgagatgccagatcccagattcaacagcagaaacgcttgttgaatggcttcagagtcaaatgacaaatggacacctaccagggaacggagatgtgtatcaagaaaggctggcacgtttagaaaatgataaagaatccctcgttcttcaggtaagtgtgttaacagaccaggtggaggctcagggagagaagattcgagatttggagttttgtcttgaagagcacagagagaaggtgaatgccacagaagaaatgctgcagcaggagcttctaagtaggacatccttagaaactcagaagttggatctgatggctgaaatatctaacttgaagttgaaactgacagctgtagagaaggacagattggattatgaagataagttcagagacacagaggggctgattcaggagatcaatgatttgaggttaaaagttagtgaaatggacagtgagagacttcagtatgaaaaaaagcttaaatcaaccaaagatgaactggcatctttaaaagaacaactagaagaaaaggaatctgaagtaaaaaggctacaagaaaaattggtttgcaagatgaaaggagaaggggttgaaattgttgatagagatgaaaattttaaaaagaagctcaaagaaaaaaacatcgaagtacaaaaaatgaaaaaagctgtggagtccttgatggcagcaaatgaagaaaaggatcggaaaatagaagatcttcgacagtgcctgaacaggtacaagaaaatgcaagacacggtggtactggcccaaggtaaaaaaggcaaagatggagaatatgaagagctgctcaattccagttccatctcctctttgctggatgcacagggtttcagtgatctggagaaaagtccatcacccactccagtaatgggatctcccagttgtgacccatttaacacaagtgttcccgaagagttccatactaccatcttgcaagtttccatcccttcattattgccagcaactgtaagcatggaaacttctgaaaaatcaaagttgactcctaagccagagacttcatttgaagaaaatgatggaaacataatccttggtgccactgttgatacccaactgtgtgataaacttttaacttcaagtctgcagaagtccagcagcctgggcaatctgaagaaagagacatctgatggggaaaaggaaactattcagaagacttcagaggacagagctccggcagaaagcaggccatttgggacccttcctcccaggcccccagggcaggacacctccatggatgacaaccccttcggcactcgaaaagtcagatcttcctttggccggggcttttttaaaatcaaaagtaacaagagaacagcaagtgcaccaaacttagatcgtaaacgaagtgccagtgcacccaccctagctgaaacagaaaaagagacagcagagcacctagatctggctggtgcttcttctcggccaaaagattcacagaggaacagtcccttccagataccgcctccatctccagattccaaaaagaaatccagaggtatcatgaaactctttggaaaacttaggagaagtcaatcaactacattcaacccagatgacatgtctgagcctgaattcaaaagaggagggacaagggcaaccgcggggccccgattaggttggtctcgagacttgggacagtctaacagtgacttggatatgccatttgccaagtggaccaaggagcaggtttgcaattggctgatggaacagggcttgggctcgtacctgaattctggcaagcactggattgcatctggccaaacgcttttgcaggcttctcaacaagatctagagaaggaacttggaatcaagcattcacttcatcgaaagaaactccagctagcactccaagccctgggatctgaagaagaaaccaatcatgggaagctggatttcaactgggtcactagatggttggatgacattggcctccctcaatataagacccagtttgatgaaggacgggttgatggtcgaatgctacattacatgactgttgatgacttactgtctctgaaggttgtaagtgtgctacaccatctcagtatcaaaagggccatccaggtcctgaggatcaataactttgaaccaaactgtctacggaggcggccatctgatgagaataccatcgccccatcagaagttcagaagtggactaaccatcgagtgatggagtggctgcgctccgtggacttggcagaatatgcgcccaatctcagaggcagtggtgtccatggtgggctcatggttctagagcctcgttttaacgtagaaacaatggctcagttattgaacatcccacccaataagactttgctgcgaagacatttggccactcatttcaaccttctgattggggctgaggcacagcaccagaagcgagatgccatggagctgccggattatgtacttctaacagctactgccaaagtgaagccaaagaaacttgcctttagcaattttgggaatttgagaaagaagaaacaggaagatggtgaagaatatgtttgtccaatggaattgggacaggcatcaggaagtgcatctaagaaaggatttaaacctggtttggatatgcgcctgtatgaggaagatgatttggaccggttagagcagatggaagattcagaagggacagtgagacagataggtgcattctctgaaggcatcaacaatctgacgcacatgttaaaagaagatgacatgtttaaagattttgctgcccgttcccccagtgccagcattacagatgaagactcaaacgtttgaccgtagcacctggatgaacattaggagtgcttagtcttttttctacttgcttttccaaacactcacagtatatacaacaggcagcggattgtctattgtttgttgttccaacttctgctgtcgagaagtttaaacagaaagcaggagtaatgtgccgattctgaagttgccacaaaaaataagacactggtgaatgagagtataattgtttttcttctatttaatgtaaaaatctgtgatatattatatttaaagtgttgcatttaagatgagtattttaccagagtgtttccattcatatccgcggtatggaggatttgaggaacagtaaccaggatgtgaatgattttgttacatcagtgttcactgtagccacctaagtaggacattatatgatttcagaatcaatatgtggaacttctttaagcattcagtgtgcccactaaatgccagccacacctccacttgcctcttattgtcttatttttatatatttttctaaatatatgtatatatacagtacatagaaaatagaacttttattttgtgacctaaggacgatggtgaaaagatcacgttttcaaaacaatctggtgatcagaatgttcatataccagctggtttctgaagaggtcagaatgatctttctccatactgacttttaacaatgttgatcattgaggctaaattaatatatatgaaatattcctttttgatgacaccacaaaattgttgaacagtttaagaatttcaaccttaatcttggatccctttacctcatatggaagaacttgagggacattagtatacttttttttaagatggagtcttgctctgtcacccaggttggagtgccatggcatgatcttggctcactgcaacctccacctcctgggtcaagccattctgcttcagccccaagtaggtgggactccaggcatgcaccaccatgcctggctaatttttgcatttttagtagagacagggtttcaccatattggccaggctgggactcgaactcctgaccttgtgatctgcccgcctcagcctcccaaagtactgggattataggcatgagccaccacgcccagcctgttatttttttattattattgtttttttttagtgacagagtctcattctgttgcccatgctggagtgcagtggcgtgatcatagctcactgcagccttgaattcctaggctccagtgatcctctcacctcagcttccctaatagctaggattacaggtgtgtggcctcccaccccaccccacccttcacacctggctgatttttcaaaaagtttttttgtagaaacagggtctcaccatgttgtccagcctggtctcaaactcctgtcctcaagtgatcctcccacctcagcctttcaaagtgctggaattacaggtgtgagccactctgcctggcctaccactaacttgaatacattcagaatcacctcctctccccaaaatttgtagaaatagtttttgaggaagccaaaagcaaagcagaaacctttacagtattgtttcttttctctttgttaactgtgtcattacagcaaaatactagcagtctgcctaaacatgttcattgtacatttctcaggctatcaatgaatggaggtttttaaaaagttgaatatttgtctgaacattttatttcaaagttcaaaaaaacagaggctgcaaaattcattttataatggctattttgtgacgataagatgtagttcatgtttttctgtagcactgggcccaaatattctttgtaaagaaaatcgctgcagcaaaaactgttactgtgtttattatatttgtagaagtattagaaaaatattctattttttattcagtgctgcgtaattacccatggtagccaaccctacaaaagacaggttttcacaaattgaggtggaggtgggcggttcagtatctgccactggacttgattataaactgtatttgaatatcagtggtattatcttttaagttgtcagcaagttaccaaggtattcattaaagaacttgtaatatcaaattactatttattcataacaattgatttgatgctaataataattttctttaaactctaccattcattatgtggtaactgtattgaacttactttatttggattttattttaatgtgactagatgtcaccacttcaaaaaatcaatttgttcttagaacctggttgaaaataccaggaaactgttacagacgccattttttttttttttgagacggagtcttgctctgttgcccaggctggagtgcagtggcacaatctcagctcactgcaagctccgcctcctgggttcacgccattctcccacctcagcttcccaagcagctgggactacaggtacctgccaccacgcctggctaattttgtttttgtatttttagtagagacggggtttcaccgtgttagccaggaaggtctcaatctcctgacctcgtgaatcgcccccctcggtctcccaaagtgctgggattacaggcgtgagccaccatgcccggcccaaatattttttattcaggatggtataacctaactgataataggtaataaggttaaatttttttatgacgtattttatttacaaatatcatacactgctggtgttaccatatgaaaggaaataaagtcaattgataattgcctc

SEQ ID NO: 56325 - DNA, 4881 bp, Homo Sapiens; identical to SEQ ID NO: 29916

SEQ ID NO: 56326 - DNA, 2320 bp, Homo Sapiens
atggcaactcctcgctccacgttccgcgcagaggaacgtggctccaaattcaaatcaacgcagcctcacgccggcgttccgggtcaggcccttctcccgcctccctcggccttagccatggcgagtagcagcggtgctggggcggcggcggcggccgcggcggcgaatctgaatgcggtgcgggagaccatggacgttctgcttgagatttcaagaattttgaatactggcttagatatggaaactctgtctatttgtgtacggctttgtgaacaaggaattaacccagaagctttatcatcggttattaaggagcttcgcaaggctactgaagcactgaaggctgctgaaaatatgacaagctgactttctggagaaattctgatgagatatgtcaagctctgcaagagggtttgaagattgcattgtagttgagaatgtacaatgaaattactgcatgcagcagtgtagaaaaattttactttttaaaagaattataaaaccatagctttataaatcagtggaaagtggcttacagagagaactatcagatgtgtttacatcacatcttattcactttttttaacagctctaatgctttggcattgctatgttcatatttatgtattccttatttatagctctgatagctttaattttctaagcagtctgtctatcagatgtgcacatctgctgtgccaggttgaagtatagtggaacccatcagtagtaatgtgtagtagttatgacttgttgacatttccattataaactttaattttgaattgtttatgcattataactgtggatttatattgtattgggctgaaagttgacaggatttcagccaccacttgtgaatttttatttagattcattatgtatatcagaatcttgttttttgaaataagagcatggaaaacatttcttgtaatctactcttgaacaaagaatatttagtttttcaaacagtttgttgggcagctaatagtgtgaaccaggtcatttttgtattgagtaaaaaaatcaaactttgagaaacttggattttaaaagtaatgacaatgcttaggttagtattatttgtaatttgaatcatttacatctaatgagaatgttagttgagaatgttttcttaaagttttatatcctataaataacggaataaaaaaatttgtaaaatgaaacaacaaacatgcaaaattcctatttacttttattacataaaagtaattttagtgcttacctaataaatcttgaatggttatttaataaattattagatgggtgatgtgtttcaaaagatacttgctattttttgaagaaataaggatttccagtcattaaacaaaactaaacaatcttattagatgggtgatgtgtttcaaaggatacttgctattttttgaagaaataaggatttccagtcattaaacaaaactaaacaatcaaatgttctatattaggaatctcaagtatggctttttttaaaaaacctttttaacatcttgatgtcaaggattataagtatggcttttcagaattgttttgtttgtcattattcttgcctttaaaattttaactcatcaaagtgaagattagaaataaattttagaaaatgtagaatagtattgattctgttcctgtaatagaatctcagtggagtttttttgcaaaactaatatggatttcatctgattttattatttcttaaattttagattttattgagtaccatttatatgattgtacaagcattcactctttactagcattttttgtttttcagacaagctgaagtggttttattaagatttggtaatatttaaatagcaaccttctctgcctttttttttttttaatatagaattttgaccattttgactttttaaatgcctggcatctttaccaaccaagtaaactggaagatctgttactggtagaacaggttgaggagacagtaggaatttgtaaaaagtcatttgatttataatcaacactacaaatactatgtgttatttataaaatcataaagaacacttttgtcagactccaaaatttgtatatacttccaggccataagagttgatagtattatttatgactttgtagattaagttatttatgtatgaaacaaagcaggaaaatatattgagaagggatcgtgtttacagaggacttctttaaagtgtcacatttttaaaatgtaaacatatttttaatgcatacttaagtaatatttaagaaactaaacaaaataatgatacaattgcagtgttgtgcttgttgtcaatgacaaaaataaaaccattttggtggt

SEQ ID NO: 56327 - DNA, 7122 bp, Homo Sapiens; identical to SEQ ID NO: 32043

SEQ ID NO: 56328 - DNA, 11072 bp, Homo Sapiens; identical to SEQ ID NO: 29619

SEQ ID NO: 56329 - DNA, 4653 bp, Homo Sapiens; identical to SEQ ID NO: 30821

SEQ ID NO: 56330 - DNA, 3218 bp, Homo Sapiens
aaaatagtgaaggatgcttagactacttaacatacaaactgctttctggttaatcatctttagaagactggatttctggatatctactccactccatctctattgacttttaaaacatgataatgcaaacctataacactggcaaccatcagtgaacctttaatttcattgattaatagcgtttgaagcttcctcagggaataacaatgacatcagcagtggttgacagtggaggtactattttggagctttccagcaatggagtagaaaatcaagaggaaagtgaaaaggtttctgaatatccagcagtgattgtggagccagttccaagtgccagattagagcagggctatgcagcccaggttctggtttatgatgatgagacttatatgatgcaagatgtggcagaagaacaagaagttgagaccgagaatgtggaaacagtggaagcatcagttcacagcagtaatgcacactgtacagataagacaattgaagctgctgaagccctgcttcatatggaatctcctacctgcttgagggattcaagaagtcctgaattcatccatgctgctatgaggccagatgtcattacagaaactgtagtggaggtgtcaactgaagagtctgaacccatggatacctctcctattccaacatcaccagatagccatgaaccaatgaaaaagaaaaaagttggccgtaaaccaaagacccagcaatcaccaatttccaatgggtctcctgagttaggtataaagaagaaaccaagagaaggaaaaggaaacacaacctatttgtgggagtttcttttagatctacttcaagataaaaatacttgtcccaggtatattaaatggactcagagagaaaaaggcatattcaagctggtggattcaaaggctgtctctaagctttggggaaagcataagaacaaaccagacatgaactatgaaaccatgggacgagctttgagatactactaccaaaggggaattcttgcaaaggttgaaggacagaggcttgtatatcagttcaaggatatgccgaaaaacatagtggtcatagatgatgacaaaagtgaaacctgtaatgaagatttagcaggaactactgatgaaaaatcattagaacgagtgtcactgtctgcagaaagtctcctgaaagcagcatcctctgttcgcagtggaaaaaattcatcccctataaactgctccagagcagagaagggtgtagctagagttgtgaatatcacttcccctgggcacgatgcttcatccaggtctcctactaccactgcatctgtgtcagcaacagcagctccaaggacagttcgtgtggcaatgcaggtacctgttgtaatgacatcattgggtcagaaaatttcaactgtggcagttcagtcagttaatgcaggtgcaccattaataaccagcactagtccaacaacagcgacctctccaaaggtagtcattcagacaatccctactgtgatgccagcttctactgaaaatggagacaaaatcaccatgcagcctgccaaaattattaccatcccagctacacagcttgcacagtgtcaactgcagacaaagtcaaatctgactggatcaggaagcattaacattgttggaaccccattggctgtgagagcacttacccctgtttcaatagcccatggtacacctgtaatgagactatcaatgcctactcagcaggcatctggccagactcctcctcgagttatcagtgcagtcataaaggggccagaggttaaatcggaagcagtggcaaaaaagcaagaacatgatgtgaaaactttgcagctagtagaagaaaaaccagcagatggaaataagacagtgacccacgtagtggttgtcagtgcgccttcagctattgcccttcctgtaactatgaaaacagaaggactagtgacatgtgagaaataaaatagcagctccaccatggacttcaggctgttagtggcagtactgacataaacatttgcaagggaagtcatcaagaaaagtcaaagaagactttaaaacatttttaatgcatatacaaaaacaatcagacttactggaaataaattacctatcccatgtttcagtgggaaatgaactacatattgagatgctgacagaaaactgcctcttacagtaggaaacaactgaacccatcaataagaaaaaggatcgaaagggaccaagcagctcactacgatatcaagttacactaagacttggaacactaacattctgtaagaggttatatagttttcagtgggaggggttgggatgggtaatctcattgttacatatagcaatttttgatgcattttatatgcataccagcaattattactgtgttcgcacagttctcacttaactggtgctatgtgaagactctgctaatataggtattttagaatgtgaattgaagaatggatcccaaaaacttcagaaagaggatagcaaaaaaagatctagtgcgattttatatatatatatatatatatatacatacatatatatatatcatatagcttaagctgatttaaaacaaaggccttagactaattttcgattttctttcttgaaataagctaatggcttgtttgtgtaaagcttttttattaaaagaaaaattttaaaaatcttgtacctagcacagtattgttatagaatatacatgtaacattttatatggtagtttaagtctgtcagtttcttaattgtggacaaattaacagttggctctggccttttgctgtaacatgcctgtgtcactcacttagccttggcatttgtgcagacataccattttcagttctgctgtcacttggaagttcaggctcagcatgaatttttggcaggtagctctaatacctggagttttctttgtttttttttcttttttttagttgaagtttatgagggaaataccagtgttcagttttgaactataatagtttgtatattcaacatttgaagtatattctattttgttgtactcttgtttcaaagtgtattcaagtaggttttctgaaatatagaaatgaaatttatcttctgttttggtctctggtgatattttaaacaatatttaaaagtcagtatagaagtgttttagttaggaagtgataaaacatctctcttctccttcccaactactgcatgaagaaattctacttccattatattaatatttgg

SEQ ID NO: 56331 - DNA, 4476 bp, Homo Sapiens
gggccggaaagttccggcgaactgggggagcggcagtgggagagcgtcgggcgggaggcggtggtcctgggagcggccccggcgccccgaagccgccccgagctggtggggagggcccggccggtggggccccgggggcctgcgggggaggggcgcctgggggtgcaagaggcgaattggctgcccggggtgcaggagggacaggtggtgcgggctgtccaggaaacctacctgaacgggaaggagccccaggagggagagggacccggcgaggggctcaggacccggaggcgccggcggaggaggaggtggtgactggcaggcccgggccccacggtacctccggggctgaaggggacgcaggatgtaggggcatggggagtcgggcgcagaagagtgcggggaaccgctgagctctgggagccactgcctgagggcaggccgcggccggcgggaacctcttctgccgtctcagcctgggcgtcgctgaagctgtgtctgcggggaggcagcggaaggcggcagaggctgggaggcggcagaatgcagccagaggagggcacaggctggctgctggagctgctgtccgaggtgcagctgcaacagtacttcctgcggctccgagatgacctcaacgtcacccgcctgtcccactttgagtacgtcaagaatgaggacctggagaagatcggcatgggtcggcctggccagcggcggctgtgggaggctgtgaagaggaggaaggccttgtgcaaacgcaagtcgtggatgagtaaggtgttcagtggaaagcgactggaggctgagttcccacctcatcactctcagagcaccttccggaagacctcgcccgcccctgggggcccagcaggggaggggcccctgcagagcctcacctgcctcattggggagaaggacctgcgcctcctggagaagctgggtgatggttcctttggcgtggtgcgcaggggcgagtgggacgcgccctcagggaagacggtgagtgtggctgtgaagtgcctgaagcccgatgtcctgagccagccagaagccatggacgacttcatccgggaggtcaatgccatgcactcgctcgaccaccgaaacctcatccgcctctacggggtggtgctcacgccgcccatgaagatggtgacagagctggcacctctgggatcgttgttggaccggctacgtaagcaccagggccacttcctcctggggactctgagccgctacgctgtgcaggtggctgagggcatgggctacctggagtccaagcgctttattcaccgtgacctggctgcccgcaatctgctgttggctacccgcgacctggtcaagatcggggactttgggctgatgcgagcactacctcagaatgacgaccattacgtcatgcaggaacatcgcaaggtgcccttcgcctggtgtgcccccgagagcctgaagacacgcaccttctcccatgccagcgacacctggatgttcggggtgacactgtgggaaatgttcacctacggccaggagccctggatcggcctcaacggcagtcagatcctgcataagatcgacaaggagggggagcggctgccccggcccgaggactgtccccaggacatctacaacgtcatggtccagtgctgggctcacaagccagaggacagacccacgtttgtggccctgcgggacttcctgctggaggcccagcccacagacatgcgggcccttcaggactttgaggaaccggacaagctgcacatccagatgaatgatgtcatcaccgtcatcgagggaagggccgagaactactggtggcgtggccagaacacacggacgctgtgtgtggggcccttccctcgcaacgtggtgacctccgtggccggcctgtcggcccaggacatcagccagcccctgcagaacagcttcatccacacagggcatggcgacagtgacccccgccactgctggggcttcccggacaggattgacgaactgtatctgggaaaccccatggacccccccgacctcctgagcgtggaactgagcacctcccggcccccccagcatctaggaggggtgaaaaaaccaacctatgaccctgtgagcgaggaccaagaccccttgtccagcgacttcaagaggctgggcctgcggaagccaggcctgccccgagggctgtggctggcgaagccctcggcgcgggtgccgggcaccaaggccagccgaggcagcggggctgaggtcacgctcatcgacttcggtgaggagcccgtggtcccggccctacggccctgcgcgccctccctggcgcagctggccatggacgcctgctccctgctggacgagaccccgcctcagagccccacgcgggcactgccccggcccctgcaccccacgcctgtggtggactgggacgcacgcccgctgccccccccgcccgcctatgacgacgtggcccaggatgaggatgactttgagatctgctccatcaacagcaccctcgtgggcgcgggggtccctgccgggcccagccagggccagaccaactacgcctttgtgcctgagcaggcgcggccgccccctcccctggaggacaacctgttcctcccgccccagggtgggggcaagccgcccagctccgcacagaccgcagagatcttccaggcgctacagcaggagtgcatgaggcaactgcaggctccggccggctccccggccccctctcccagcccggggggtgacgacaagccccaggtgcctcctcgggtacccatcccccctcggcccacgcgcccacacgtccagctgtctccagcccccccgggcgaggaggagaccagccagtggcctggacctgcttcccctccccgggtgcctccgcgggagcccctgtcccctcaaggctcgaggacacccagccccctggtaccacctggcagctccccgctgccaccccggctctcaagctcacctgggaagaccatgcccaccacccagagctttgcctcagaccccaagtacgccaccccccaggtgatccaggcccctggcccgcgggctggtccctgcatcctgcccatcgtccgggatggcaagaaggtcagcagcacccactattacttgctgcccgagcgaccatcctacctggagcgctaccagcgcttcctgcgtgaggcccagagccccgaggagcctacccccctgcctgtgcctctgctgctgcccccacccagcaccccagcccccgccgcccccacggccaccgtgcggccgatgccccaggctgccttggaccccaaggccaacttctccaccaacaacagcaacccaggggcccggccaccacccccgagggccactgctcggctgccacagaggggctgccctggcgatgggccagaggcgggccggccagcagacaagatccagatggccatggtgcatggggtgaccacagaggagtgccaggcggccctgcagtgccacggctggagcgtgcagagggctgcccagtatctgaaggtggagcagctcttcgggctgggtctgcggcccagaggggagtgccacaaagtgctggagatgttcgactggaacctggagcaggccggctgccaccttctgggctcctggggccctgcccaccacaagcgctgagatgcgtctggagagccagagggcctgcctgaaggaatcacctgagcctgtccgtccaccaggagtggggagatgcccccatccagtcctggaggacccgctgctcctgctgctcccggggatggagcaaggccaaggctgcgggaggctgggagccctgccctgcccatccctcctgcaccagcgctgtccctgcacactttggttcagtcccggtgcccctgccaagatgtggaaggggccgggtgaagacaggcttgagggctgccccagcaggctctgggtatgacctgcctctggccctggtcctgggcggggcctgtgggtggagtagtacccccaggccctgccctgggtgacagactgggaggaaaccaggctggacctgggcaggcgggatgtgttggccacagggagaggcggaccggcacccggtgggacctcctaggactgggccttcttccagggggcccctggcagcagctggggtgtcgggcagaatgtgacttgtggccttaccatggacttgaatgggacttggctggcctcaggatcttgtgcctggaaatagcctgaggtggctcaggaagcggagaaagggtgccagaccattctctggcggggaccagggcccaaggccccagggctggaaggagaccaaggggcagccgccctggagggacatcagtgcttcctcttccacccaattcccccacgcggttccatgttttcccaccagcctgttggcgaagttgctgctccggcattcagtacctgcttcttccagagaaataaagttagtttctattttatgtt

SEQ ID NO: 56332 - DNA, 6099 bp, Homo Sapiens; identical to SEQ ID NO: 29097

SEQ ID NO: 56333 - DNA, 3846 bp, Homo Sapiens; identical to SEQ ID NO: 30634

SEQ ID NO: 56334 - DNA, 2984 bp, Homo Sapiens
gaaccgctgaggcgggcgcgggcccgggtggggccaaggttccggccactctgcagaatggagataatcaggagcaattttaagagtaatcttcacaaagtgtaccaggccatagaggaggccgacttcttcgccatcgatggggagttttcaggaatcagtgatggaccttcagtctctgcattaacaaatggttttgacactccagaagagaggtatcagaagcttaaaaagcattccatggactttttgctatttcagtttggcctttgcacttttaagtatgactacacagattcaaagtatataacgaagtcatttaacttctatgttttcccgaaacccttcaatagatcctcaccagatgtcaaatttgtttgtcagagctccagcattgactttctagcaagccagggatttgattttaataaagtttttcgaaatggaattccatatttaaatcaggaagaagaaagacagttaagagagcagtatgatgaaaaacgttcacaggcgaatggtgcaggagctctgtcctatgtatctcctaacacttcaaaatgtcctgtcacgattcctgaggatcaaaagaagtttattgaccaagtggtagagaaaatagaggatttattacaaagtgaagaaaacaagaacttggatttagagccatgtaccgggttccaaagaaaactaatttatcagactttgagctggaagtatccgaaaggcattcatgttgagactttagaaactgaaaagaaggagcgatatatagttatcagcaaagtagatgaagaagaacgcaaaagaagagagcagcagaaacatgccaaagaacaggaggagctgaatgatgctgtgggattttctagagtcattcacgccattgctaattcgggaaaacttgttattggacacaatatgctcttggacgtcatgcacacagttcatcagttctactgccctctgcctgcggacttaagtgagtttaaagagatgacaacatgtgttttccccagactcttggatactaaattgatggccagcacacaaccttttaaggatatcattaacaacacatcccttgcggaattggaaaagcggttaaaagagacacctttcaaccctcctaaagttgaaagtgccgaaggttttccaagttatgacacagcctctgaacaactccacgaggcaggctacgatgcctacatcacagggctgtgcttcatctccatggccaattacctaggttcttttctcagccctccaaaaattcatgtgtctgccagatcaaaactcattgaacctttttttaacaagttatttcttatgagggtcatggatatcccctatctaaacttggaaggaccagacttgcagcctaaacgtgatcatgttctccatgtgacattccccaaagaatggaaaaccagcgacctttaccagcttttcagtgcctttggtaacattcagatatcctggattgatgacacatcagcatttgtttcccttagccagcccgagcaagtaaagattgctgtcaataccagcaaatatgcagaaagctatcggatccaaacctatgctgaatatatggggagaaaacaggaagagaagcagatcaaaagaaagtggactgaagatagctggaaggaggctgacagcaaacggttaaacccccagtgcataccctacaccctgcagaatcactattaccgcaacaatagttttacagctcccagcacagtaggaaagagaaatttgagtcctagtcaagaggaagctggcctggaggacggagtgtcaggggagatttccgacactgagcttgagcagaccgattcctgtgcagagcccctctcagagggaaggaaaaaggccaagaaattaaaaagaatgaagaaggagctttctccagcaggaagcatctcgaagaacagccctgccacactctttgaagttcctgacacatggtaaccaagacctgagggcagcaaaccgctggtgctgtcgctgtgagcaagagccggctggcacatttggaagccgcactgtatttaacttaatcaaatgtggtatgggaggggttggaaaccaagttgtctcctgggggggagaaaacaggttttatttttgtggctgtggttttttcccctttttaatctaactgcctgttgacattgacactcatcacggttgtaggctgtcatgaatgtgtacgtgcttaaccagtgaattccgtgttgctcttgtgaggcctttcctgtcatgacccagtgtgcttaagaacctgcctgatggggagtgtcggctgtgaaatctgcaaaaagagctgacattccagctgctgtgatcatgaatttgggggtgtactgtcctgcctgtgcatcttctcgcactgagattttgaggcagttgcagccctcggttagtctcccagtggaaaaatcggttgtgcctccctgcttcccaccatagctgcctgaaaacatgacgctctcaagcttgtccttccttcaggaagatgtccactcatgcccacccatgagagggcttgccgtatgccctggcctttgggcatatttatgtagagttcctttctcctaagacgtgagtttctcatgggggatgtacgagtaaaaaggttaacttctgttcttatgcgtggcgctgtgttcactttccagagtctctgttcgtttgtttggatggcggtctcggggtacggcagcgtgtgtgcgtacgtgtctgtgtgtgtgtgtgtgtgtgtgtgtgtgtgtgtgtgtgtgaaatcgtgcaaatctacaacatgtcccagcccattctccgttgaaacagatcacagcaacgacaaacgctcatggcgctgctttgctccacccgcttcagatagatcattgttagatatttcacatttttgtatggtggaaataaaaatgaaaaatgtatttccaaaagatgaaaattaaaaacattttcatagg

SEQ ID NO: 56335 - DNA, 5765 bp, Homo Sapiens; identical to SEQ ID NO: 30825

SEQ ID NO: 56336 - DNA, 4272 bp, Homo Sapiens; identical to SEQ ID NO: 27734

SEQ ID NO: 56337 - DNA, 4368 bp, Homo Sapiens
ggcggcgcagttgcgagcgcaggtgagttccgggccgccaccggctgcttctgtgggccgggcctctgagcattggcgacccccgcccggctccgggctgacagggcctggcttcgccaggctccttgccagaggcctccactcactccagacccctatagcccgtcgctgtcagctgtcaacaaaggatgcgaatgctggccgcttcctgtgggcttcgtgtcacccagaggtgagcccaggccaggatgggggactccagggacctttgccctcaccttgactccataggagaggtgaccaaagaggacttgctgctcaaatctaagggaacctgtcagtcgtgtggggtcaccggaccaaacctatgggcctgtctgcaggttgcctgcccctatgttggctgcggagaatccttcgctgaccacagcaccattcatgcacaggcaaaaaagcacaacttgaccgtgaacctgaccacgttccgactgtggtgttacgcctgtgagaaggaggtattcctggagcagcggctggcagcccctctgctgggctcctcttccaagttctctgaacaggactccccgccaccctcccaccctctgaaagctgttcctattgctgtggctgatgaaggagagtctgagtcagaggatgatgacctgaaacctcgaggcctcacgggcatgaagaacctcgggaactcctgctacatgaacgccgccctgcaggccctgtccaattgcccgccgctgactcagttcttcttggagtgtggcggcctggtgcgcacagataagaagccagccctgtgcaagagctaccagaagctggtctctgaggtctggcataagaaacggccaagctacgtggtccccaccagtctgtctcatgggatcaagttggtcaacccaatgttccgaggctatgcccagcaggacacccaagagttccttcgctgcctgatggaccagctgcacgaggagctcaaggagccggtggtggccacggtggcgctgacggaggctcgggactcagattcgagtgacacggatgagaaacgggagggtgaccggagcccatcagaagatgagttcttgtcctgtgactcgagcagtgaccggggtgagggtgacgggcaggggcgtggcgggggcagctcgcaggccgagacggagctgctgatcccagatgaggcgggccgagccatctctgagaaggagcggatgaaggaccgcaagttctcctggggccagcagcgtacaaactcggagcaagtggacgaggacgctgatgtggacactgccatggctgcccttgaccagcccgcggaggcccagcccccgtcaccacggtcctccagcccctgccggacgccagagccggacaatgatgctcacctacgcagctcctctcgcccctgcagccccgtccaccaccacgagggccatgccaagctgtctagcagcccccctcgtgcaagccccgtgaggatggcaccgtcgtacgtgctcaagaaagcccaggtattgagtgctggcagccggaggcggaaggagcagcgctaccgcagcgtcatctcagacatctttgacggctccattctcagcctcgtgcagtgtctcacctgtgaccgggtatccaccacagtggaaacgttccaggacttatcactgcccattcctggaaaggaggacctggccaagctccattcagccatctaccagaatgtgccggccaagccaggcgcctgtggggacagctatgccgcccagggctggctggccttcattgtggagtacatccgacggtttgtggtatcctgtacccccagctggttttgggggcctgtcgtcaccctggaagactgccttgctgccttctttgccgctgatgagttaaagggtgacaacatgtacagctgtgagcggtgtaagaagctgcggaacggagtgaagtactgcaaagtcctgcggttgcccgagatcctgtgcattcacctaaagcgctttcggcacgaggtgatgtactcattcaagatcaacagccacgtctccttccccctcgaggggctcgacctgcgccccttccttgccaaggagtgcacatcccagatcaccacctacgacctcctctcggtcatctgccaccacggcacggcaggcagtgggcactacatcgcctactgccagaacgtgatcaatgggcagtggtacgagtttgatgaccagtacgtcacagaagtccacgagacggtggtgcagaacgccgagggctacgtactcttctacaggaagagcagcgaggaggccatgcgggagcgacagcaggtggtgtccctggccgccatgcgggagcccagcctgctgcggttctacgtgtcccgcgagtggctcaacaagttcaacaccttcgcggagccaggccccatcaccaaccagaccttcctctgctcccacggaggcatcccgccccacaaataccactacatcgacgacctggtggtcatcctgccccagaacgtctgggagcacctgtacaacagattcgggggtggccccgccgtgaaccacctgtacgtgtgctccatctgccaggtggagatcgaggcactggccaagcgcaggaggatcgagatcgacaccttcatcaagttgaacaaggccttccaggccgaggagtcgccgggcgtcatctactgcatcagcatgcagtggttccgggagtgggaggcgttcgtcaaggggaaggacaacgagccccccgggcccattgacaacagcaggattgcacaggtcaaaggaagcggccatgtccagctgaagcagggagctgactacgggcagatttcggaggagacctggacctacctgaacagcctgtatggaggtggccccgagattgccatccgccagagtgtggcgcagccgctgggcccagagaacctgcacggggagcagaagatcgaagccgagacgcgggccgtgtgatctgctgggctagtctccccatgtgccccaccccgcggaaggcgtgtttgtgcccagaagagaggccgggctgctgcagaaccccgccgtgtaaagaggcagaaaagttggtttggtttgcagtaacgctgcaactagaaaatatatgcacttcaggcttgttgaaacgaccaagactctgtgacgttaatttgggtctttgtcctggcagtgcctctgccagtcactgtcatcgttgtgtcccccacaactgtcctcttgctagctcggcccagctttgtccctggagcccgatgctacccctgtcagacagaggctgcggcctgggccagagtcagggagtagctgctgcttcacggcgtctccactgtgcgattggcccggagccccgaagactcggagggagctgctcagggccggtgagcgcagccagaagccctggccagtgaggagctcacaggtcctccctggtggtcccgccgcacctctgcatctcctgggcgtcaccaggaaggctctgaagtcccgggctgctctcagcacttctcctgcagactgaagactctggactcattgctgattggaacaccaggaggaggttggatttctgccagtgggggatgtttctggaggcagctggtcccccacaccgcgtcctgctgagcctgccccctggattggctgtaatttgcctcgaagttcagcagttcatcttcatgggaaatttgctgagcccccaccagggaaccggatgatgaaacagggatacctcacagcttggccatttgaggcaaaggcagcttcccgagctgatgctaaagaagacagactttcccttcctcccagcagcagcagtgcagagcccgcctggagggatgtgggggctgtgcagggtgcagcgctcaggtggatcctgggaagcagcctctggatgctgagtggagggagccactgagcacagcaaggcaccaaagcccctggagaaaccgccagggcgaggtgcgaccatcatcaggatcaaagcagacggggcgtgggtggggaaggggctctgggaccagaccccccacactactgcgtctttgtttctatcagtctttgtagaagcaggtggtggtggaaattccagcaggtgggtcccgcagaggccctgaggcctcacttttcggatcttctgtcccagatcctgctccctccctgctgagcctggggttcccctggcattggccccagccttctgaaagccggcgctgcagccagaggccgcacgctgcactgtcgcgacgcagagaggcttctgtgcaggctgggatcgggccccatgtctgtgctgtctagtttgtgttcaaaatgtcagaataaacacagaataaatgtt

SEQ ID NO: 56338 - DNA, 1213 bp, Homo Sapiens; identical to SEQ ID NO: 29272

SEQ ID NO: 56339 - DNA, 2796 bp, Homo Sapiens
gcggcggcttccaacaggctctggggcgccgagcggacaggaacgcagcacgggggctccgaggcggggtctgggtgttgaggggcgactggagccatggcggagtcggcgcctgctcggcacaggagaaaacgacgctccacacctttaacttcttccacacttccttcacaagcaacagagaaaagctcctattttcagaccaccgagatttcactctggacggtggtggccgctattcaggctgtggagaagaagatggagtcccaggctgcccggctacagagcctggaggggcgcacggggacagccgagaagaagctggctgactgcgagaagatggccgtggagttcgggaaccagctggagggcaagtgggccgtgctggggaccctgctgcaggagtatgggctactgcagaggcggctggagaacgtggagaacctgctgcgcaacaggaacttctggatcctgcggctgcccccgggcagcaagggggaggcccccaaggtgtccaggtcactggagaatgatggcgtctgtttcaccgagcaggaatgggagaatctggaggattggcagaaggagctctacagaaacgtgatggagagtaactatgagacactggtctctctgaaggtccttggccagacagagggagaagcggagttgggtacagagatgctgggtgacttggaagaggaaggtcctggtggtgcccacccagcaggtggggtcatgatcaaacaggagctacagtatacacaggaaggccctgcggatcttcctggagagttctcatgcattgctgaagagcaggctttcctgagcccagagcagaccgaactctggggtggtcagggcagttctgtcctcttggaaacaggtcctggggactctactctagaggagcctgttggtagtagagttcctagcagcagcagaactgtgggctgcccgaagcagaaatctcataggcaggtacagctggaccaggaatgtgggcagggcctgaagctgaaaaaggacacttcccgcccctacgaatgttctgagtgtgagatcaccttccgctataagcagcagctggccacacatctgcgcagccactctgggtgggggtcttgtacacctgaggagccagaggagagccttaggcccaggccacggctgaaaccacagaccaaaaaggccaagctgcatcagtgtgatgtgtgcctgaggagcttcagctgcaaggtgagcctggtgacccatcagcgttgccacctgcaggaggggcccagtgccggccagcatgtccaagagaggttctcacccaacagcctggttgccctgcctggccacatcccttggaggaaaagccggagttccctcatctgtggttactgtggcaagagcttcagtcacccatctgacttggtgcggcaccagcgcatccacacgggtgagcggccctacagctgcactgagtgtgagaagagctttgtccagaagcagcacctcctgcagcaccagaagatccaccagcgggagcggggtgggctggccctggagcccggaaggcccaatggcctgctttaagggtgcagcccctcgcccgtctgggggatggaggggggtggcattggttcccccgaagagacactgcagtcagggactgagttcttcctgagggcagttgtttgtgattgccttcccttgtcccagtaccaagccaagcccaaaggctgtcctgaaaaccctgtggaagaagagtccaggccaggtcttcatcctgctgccaagtttgctgtttcttggcaccttcaggtctctggttttctcattcatgccaatgcttgtgggctggggttggcgttctgaccccacagggactggtggctggttccagggctcgtcccggcatttcatgtcttcccacggggttgagtcgggccataggggtgagcagctgcctggaagagttctgggaagtataaccctccattttttcttgttttataatctctttgtttaataataagtagaagaaataatttaaatgaactgcttagccctgctctgaagaaccttttttggaattagattttagttgattttttaaagaatacagcccaacacttgttttttacattttaagagttgtagaagttgttcctaacttggggactggacctaccctctaggagggagttgttaatggggctcttttagcccactgatgcttacttaggccggagagcaggggacacggtgctaggttccctcgtgcagtgcctggtgctctcaaattgtctcaaaaggaccaagaggaaaagagtcggaggggtagaccctgcagccctgttgagaagaaagattccagtgaagttgctgatggtatggctgtggtctgggacttgcggtgtctcggcatacccctctcctcttcccacctcctcctggctatgttctgcagcctcccagagtagaaaactactttgttacttaaggttgttcaccttgtaccagtggttatttgagtttgttcctattacaccaatccttacttgaggtggttcggattacagtttccaaatgcattctgggattgcctattccagagagggtacagaaaaagcacacagatggcttgtctcaggagtgttgaatgtgtgccccgctgctgtctggggggatgggagtgggctctggggtcatatgtgaacatccccttggatgatttgcggttgcttagaataaaacttgctactagcaaaagaaaaaaaaaaaaaaaaaaaaaaaaaaaaaaaa

SEQ ID NO: 56340 - DNA, 1977 bp, Homo Sapiens
cactccagtgtggcatcatgtggcagctgctcctcccaactgctctgctacttctagtttcagctggcatgcggactgaagatctcccaaaggctgtggtgttcctggagcctcaatggtacagggtgctcgagaaggacagtgtgactctgaagtgccagggagcctactcccctgaggacaattccacacagtggtttcacaatgagaacctcatctcaagccaggcctcgagctacttcattgacgctgccacagtcgacgacagtggagagtacaggtgccagacaaacctctccaccctcagtgacccggtgcagctagaagtccatgtcggctggctgttgctccaggcccctcggtgggtgttcaaggaggaagaccctattcacctgaggtgtcacagctggaagaacactgctctgcataaggtcacatatttacagaatggcaaagacaggaagtattttcatcataattctgacttccacattccaaaagccacactcaaagatagcggctcctacttctgcagggggcttgttgggagtaaaaatgtgtcttcagagactgtgaacatcaccatcactcaaggtttggcagtgtcaaccatctcatcattctctccacctgggtaccaagtctctttctgcttggtgatggtactcctttttgcagtggacacaggactatatttctctgtgaagacaaacatttgaagctcaacaagagactggaaggaccataaacttaaatggagaaaggaccctcaagacaaatgacccccatcccatgggagtaataagagcagtggcagcagcatctctgaacatttctctggatttgcaaccccatcatcctcaggcctctctacaagcagcaggaaacatagaactcagagccagatcctttatccaactctcgatttttccttggtctccagtggaagggaaaagcccatgatcttcaagcagggaagccccagtgagtagctgcattcctagaaattgaagtttcagagctacacaaacactttttctgtcccaaccattccctcacagtaaaacaacaatacaggctagggatggtaatcctttaaacatacaaaaattgctcgtattataaattacccagtttagaggggaaaaaagaaaataattattcctaaacaaatggataagtagaattaatgattgaggcaggaccctacagagtgtgggaactgctggggatctagagaattcagtgggaccaatgaaagcatggctgagaaatagcagggtagtccaggatagtctaagggaggtgttcccatctgagcccagagataagggtgtcttcctagaacattagccgtagtggaattaacaggaaatcatgagggtgacgtagaattgagtcttccaggggactctatcagaactggaccatttccaagtatataacgatgagccctctaatgctaggagtagcaaatggtcctaggaaggggactgaggattggggtgggggtggggtggaaaagaaagtacagaacaaaccctgtgtcactgtcccaagttaagctaagtgaacagaactatctcagcatcagaatgagaatgagaaagcctgagaagaaagaaccaaccacaagcacacaggaaggaaagcgcaggaggtgaaaatgctttcttggccagggtagtaagaattagaggttaatgcagggactgtaaaaccaccttttctgcttcaatgtctagttcctgtatagctttgttcattgcatttattaaacaaatgttgtataaccaatactaaatgtactactgagcttcactgagttacgctgtgaaactttcaaatccttcttcagtcagttccaatgaggtggggatggagaagacaattgttgcttatgaaaaaaagctttagctgtctcctgttttgtaagctttcagtgcaacatttcttggttccaataaagcattttac

SEQ ID NO: 56341 - DNA, 1283 bp, Homo Sapiens
ggcctgcgcctccacgtggatttggtagagaaaccccggactgggatcatggcagccgagactcggaacgtggccggagcagaggccccaccgccccagaagcgctactaccggcaacgtgctcactccaaccccatggcggaccacacgctgcgctaccctgtgaagccagaggagatggactggtctgagctatacccagagttcttcgctccactcactcaaaatcagagccacgatgacccaaaggataagaaagaaaagagagctcaggcccaagtggagtttgcagacataggctgtggctatggtggcctgttagctgacaaagatgttcttcctcttccccgacccacatttcaagcggacaaagcacaagtggcgaatcatcagtcccaccctgctagcagaatatgcctacgtgctaagagttggggggctggtgtataccataaccgatgtgctggagctacacgactggatgtgcactcatttcgaagagcacccactgtttgagcgtgtgcctctggaggacctgagtgaagaccccgttgtgggacatctaggcacctcaactgaggaggggaagaaagttctacgtaatggagggaagaatttcccagccatcttccgaagaatacaagatcccgtcctccaggcagtgacctcccaaaccagcctgcctggtcactgactgcttactctaccttagctggacctcgtctcccagggattagagaaaagagcaggagtcctgggtcttcccagttgagactgctggagctgagacacagtactctcttaaagaaggtggggagctgcccagggcagaacccactggtgttcatgactacccctggctcctctcaccttgtccctccactgccaacagaaaacaaagcagctgactgagatggtcaaaggactttggaccataggggatctttggaaggctgtggggtcttgctcttccttagcactcctttctccttgtgagatctctcctcagctggaatgaggaatgtagtccatctaaactgcttgctaggctcaattaccacttctgtttgctttgtggatcctgggataacatgtatatgtgtacacatgcctattctgccatttctcaggaaagggtggagtatgtatcatatgccttctaccatcctcctgtcctctccctgcgtaagacttgacctggggaatctgtgttccctaaaaaaaaaaaaaaaaaaaaaaaaaaaaaaaaaaaaaaaaaaaaaaaaaaaaaaaaaaaaaaaaaa

SEQ ID NO: 56342 - DNA, 4318 bp, Homo Sapiens
gcttcccggctgccaggctacagaactcgcctcgccactcctgagacatggacaacgccgttgacggactggacaaagcttctatagcaaactcagatggccccacagcaggttcccaaacacctcccttcaaaagaaaggggaaactatccaccattggtaaaatctttaagccttggaaatggaggaaaaagaagaccagcgacaaatttagagaaacctcggcagtattagaaaggaagatatccacacgacaaagtagagaggagctgataagaaggggagtgcttaaggaattgcctgatcaagatggagatgtaacagttaactttgaaaattcaaacgggcacatgatacccatcggagaggaatctacccgagaggaaaatgtagtaaagtctgaagaaggtaatggctctgtatctgaaaaaacaccacctctggaggaacaggcagaagataagaaagagaacactgaaaaccactctgaaacaccggcagctcctgctctacctccttctgctcctcctaagcctagatccaaacctaaacccaaaaaatcacctgtgcctccgaaaggggccactgctggggccagccacaaaggtgatgaagtgcctcccattaaaaaaaataccaaggctcctggtaagcaggcccccgtccctccacccaagccagcaagccgaaacacgacccgagaggctgctggctcctctcattcaaaaaaaacaactggctctaaagcatcagcttcgccatccacttcatccacctcatctcgtcccaaagcttcaaaggagacagtttctagcaaagcagggacagtggggaccaccaagggcaagagaaaaactgacaagcagccaataacttctcacctgtcctcagacacaacaacttctggcacatccgacctgaaaggagagcctgcagagaccagagtggagagtttcaaactcgaacagactgtccctggagctgaggagcagaacacaggcaaattcaagtccatggtccctccaccccctgtggctccagcaccttctcctctggccccccctctccctcttgaggatcagtgcattactgcctcagacactccagttgtcctcgtcagcgttggagctgacctgcccgtctctgccttagacccaagtcagcttctttgggctgaagagccgacgaacagaaccactctctactcaggcactggcttaagtgttaacagagaaaatgcaaaatgtttcacaaccaaagaggagctggggaagacagtgcctcagctactgactcctgggctgatgggcgaatcttcagaatcctttagtgcctcagaagatgaaggccacagggaataccaagccaatgactctgactcggacgggcctatcttgtacaccgatgatgaggacgaagacgaagatgaggatggcagtggagaaagtgctttggcaagtaaaatacgccggagggatactcttgctatcaaacttggcaacagaccatctaagaaagaactagaggacaaaaacatcttgcagcgtacatctgaagaagagaggcaggaaatccgacaacaaattggaaccaagttagtcaggaggctgagccagaggcccacaactgaagaattagagcaaagaaacatcctaaaacaaaagaatgaagaagaggaacaagaagcaaaaatggaacttaaacgcagactcagcagaaagctcagcctgagacccacagtggcagagctacaagctcgaaggatcctgcgatttaacgagtatgtagaagtcacggattctcctgactatgaccgccgagcagacaagccctgggccaggttaacacctgcagacaaggcagcaataaggaaagaactaaatgaatttaaaagcacagaaatggaagttcatgaagagagtcgacagtttacaaggtttcatcgtccataacgaagagtgagactatttggaaacagagactgatcatctttgggggaagccctgcttcctgaaaacctgatattgcactgggatttgaatgtgtgtgtttccgtttaacttgtggtgaaggaagtgtgtgactcagcttggctgggaagtgctcctcacctgtgtggcccagatggctccaacaagcaaaaggaaggatgcagtgactcttgctgcccagaatgcacagcgatggtaagagacaccgtggatattcttcatcagaagctttaatcaaagaagatgagcagaagacaatcactggctccctgttaccagaaagccaaattttataatgcgggtgaaagaaaaatatagattaaaattgctgggcactgaaaaggggtgggagttggaaatcagaaagaaagagaaatatttcattatgttaatgaagaaaagagaaaattgaagcataaatgtatttttgaagtagttattcggtagctgagaacttattaagggatttaggaatttaacctcctgatgtggattcctcaaagacttgatcggagaatactcttgtttcaccattatgttggtacagtatagtaccattattttatgttgtgccagtgaatccagttgccagaaataagtctgaatgttttcatgcatctttttcttaaatgcaagagcttctactgactcttaacaagcatgcttacccaaattttgttgcatgcttttaagtagcattagctatgcacacttgacatttttaaatatccctttcctagtgtaccagccttcacaggataagaggactgggaataaagtcagatgtaatgtgaccctagaaaactgtagcaagcttcagaaataaatcttttgatctttccctatcttgattagatccaaagtcaaagcaaccatacttcacctagagaagacagtattggcaatcatgacacctgtaataaaaacttgaatccaaagtcaaaacttaagcaagatacaaatgtgctgcctgcagttagtcctgcatgggaataaggactagttatttttttagtgctgcatttttttaaagttggattgctgctatttaaaaaaaaaaaaaggacacagatcaaaaaaacacccaaaggcttaacagaacatggaaagttcccactaagttgtgtgtgaggaaatcctcatcttgtattttaagaatctgcagatggcatccatagatacagtacagtatttactgtcaatgcaaaagaatcagtgaggttaaagtagtggaagttttccctatgagcctacagtctgtattgtttacattaagaaactctctattattgtgttgctattttccatggagtcacaggcacactatgacttctgctcccaaatacatatgaccatatgtaaataccaccttgcatttcattgttcttcacaagtgctttgtgcccctttaattaaaaacacatgaaatgaataacaaaacaagacccaaatagagtttattttattctcagagtttggactacaattttctaagatgtttctggttcaagactgtcattttctatttcaaccgaaaagtaagcatttaacccggtgaataaatgtagatcctgccattcattggtattttaaagaaccacttgaaatcggatcattttatttaaaaataaaaaatgttaatgccagttggcctactataaaaagccaggaccatgttagaattaggaaaagtaaccagcattactgcacctcttgttagactctgtgcattaataaaacacacctagagtctgttgtcatttcactaataggataagacaaattttttgctttgaaaaaatttttctgcatgcccaggtgtctgtctctggctgaggttttgtctattttacagtgtttcaatccagccataaaaattaacttgtgattttttttttcccaaagtcatgcttttccttaattatatttttattttattattttagtgtcttgagaaaaataccaagagatataatgtttcttttaattgtctatgcttaatcatctttaaacactttttaaatttctaaccacaagacctctctataatggtaaatgtaagacatcaccattttatcactcaaagtatgttattgaaagtttctatttggttgataaaaggaacaattttttcccacttttgatgcctgtgatgcaattttttattgcctacaatgagatacacttagtacaaaaaatgaaaatctggtatttcaaaattgcatttcttgtataataggtcagatttattaactactcatactttttctttacactaatcgatacatttagaaaaaattttctaagttagagacaagtttaaaagt

SEQ ID NO: 56343 - DNA, 1383 bp, Homo Sapiens
cgctaatggtggacgcgtgaggcggaggcgcgggcggcggagggaggccggagcgggcagcgcggcggcgccatgtccgtgaacatggacgagctcaagcaccaggtcatgatcaaccagttcgtgctgacggcgggctgcgcggccgaccaggcgaagcaactgctgcaggcggcccactggcagttcgagacagccctcagcgcctttttccaggagaccaacatcccctacagccaccatcaccaccagatgatgtgcacccccgccaatacccctgctacaccccccaacttccctgacgctctcaccatgttctcccgtctcaaggcctccgagagcttccacagcggtggcagcggcagcccgatggccgcgacagccacgtcacccccgccacacttcccccatgccgccaccagcagctctgcggcctccagctggcccacggcggcctcgcccccggggggcccacagcaccaccagccacagccgcccctgtggactccaacacccccttctccggcttcagactggccacccctggccccccaacaggccacctcagaacccagggcccaccctgccatggaggcagagagataagggaggcccctcccccctcccggaggccaggaccccgtggggcgggggagaggacgtctctgcgggcccccttcaccccttttctgtctgcaccccttgttccccggagccctggaggggagagcgcggactctagccaggcagggacacgtctggtgccagaacacgcagctgcccacacgcaaggtcatggccccagcggccccggcacatggagtggttcagagcggcctgggtgcctggcggacagaacttcagagaccacgcagccttccttcgaagacgcacctgcccagcccagcccaggggtgccgtggaggaccaccctggcggagacattgctgatccctggcttggagctccttgggggccggcaggcctcgacccccaccctagggaatgcagagcctctccgcatgtgtgcgcgtggccgtgtctgtgtatttctacgtgtgtcgctcttcagaagcaacctagttcctggggcagctggactttgcatgttagtgtgagcccccagccccctgcccgccgccccctccccagggccctgcctcctccccaccccctcgtcagccagcgttgctgttccttgcagagaaaaggattgtgggaaactccaggactcttcccaccgcctcccagcgcctgcctgctggggctgcctgcatgcctcccctgcacctgggggtacccgcatccacttcctttcccccttttaacaaaagagaagaacgaattccaaaccaaaaaaaaaaaaaaaaaaaaaaaaaaaaa

SEQ ID NO: 56344 - DNA, 2160 bp, Homo Sapiens
tgggcgggaggaacgcgccgctaggcgggagagcgcggccatggcggggccgggcgtccccggtgcccccgcagcgcgctggaaacgccacatcgtgcggcagctgcggcttcgggaccgtacgcaaaaggcgcttttcctggagctggtgccggcctataaccatctcttagagaaggctgagctgctggacaagttctcaaagaagctgcagccggagccaaacagtgtcactcccaccacccaccagggcccctgggaggagtcagagcttgactcagaccaagtcccatcactggtcgcactgagggtgaagtggcaggaggaggaggaggggctccggctggtctgtggtgagatggcctaccaggtggtggagaagggcgcggccctgggcacgctggagtcggagctgcagcagaggcaaagcaggctggcagccctggaggcccgcgtggcgcagctgcgagaggcgcgggcgcagcaggcccagcaggtggaggagtggcgggcgcagaatgcggtgcagcgggcagcctacgaggcgctgcgcgcgcacgtcgggctccgggaggcggcactgcgcaggctccaggaagaggcgcgcgacctgctggagaggctcgtgcagcgcaaggcgcgcgccgcggccgagcgcaacctgcgcaacgagcgccgggagcgggccaagcaggcgcgggtgtcccaggagctgaagaaggctgccaagcggaccgtgagcatcagcgagggcccggacaccctaggcgatgggatgagggagagaagggagactctggctctggcccctgagccagagcccctggagaaggaagcttgtgagaagtggaagaggcccttcaggtctgcctcagccacctccctgacgctgtcccactgtgtggatgtggtgaaggggcttctggattttaagaagaggagaggtcactcaattgggggagcccctgagcagcgataccagatcatccctgtgtgtgtggctgcccgacttcctacccgggctcaggatgtgctggatgcccacctctctgaggtcaatgctgttcgttttggccccaacagcagcctcctggccactggaggggctgaccgcctgatccacctctggaatgttgtgggaagtcgcctggaggccaaccagaccctggagggagctggtggcagcatcaccagtgtggactttgacccctcgggctaccaggttttagcagcaacttacaaccaggctgcccagctctggaaggtgggggaggcacagtccaaggagacactgtctggacacaaggataaggtgacagctgccaaattcaagctaacgaggcaccaggcagtgactgggagccgcgaccggacagtgaaggagtgggacctcggccgtgcctattgctccaggaccatcaatgtcctttcctactgtaatgacgtggtgtgtggggaccatatcatcattagtggccacaatgaccagaagatccggttctgggacagcagggggccccactgcacccaggtcatccctgtgcagggccgggtcacctccctgagcctcagccacgaccaactgcacctgctcagctgttcccgagacaacacactcaaggtcatcgacctgcgtgtcagcaacatccgccaggtgttcagggccgatggcttcaagtgtggttctgactggaccaaagctgtgttcagcccggacagaagctatgcactggcaggctcctgtgatggggccctttacatctgggatgtggacaccgggaaactggagagcagactacagggaccccattgcgctgccgtcaacgccgtggcctggtgctactccgggagccacatggtgagcgtggaccagggcaggaaggttgtgctctggcagtagggccacgacctgcctgcctgggctggagctcttgcccgaagcctgaagcttccttcggcgccatgcaggggttggggttgggactggagctggccttgggatttaatggggaagaaggcctggcaggacctggcctgtttgtttaaaaatgaagtatgggttgggggattacgctagtttttctttgtatttttatctctatctcctcactttttctcccaaagtagaaaaaaatgatatctgaaaaaaaaaaaaaaaaa

SEQ ID NO: 56345 - DNA, 6020 bp, Homo Sapiens
atggaatccaacctagcatttcccagagaactacaaatcccagcggacattacgcagaacgccgacggacgcggtgacgcaagggggcgtgtcgagcctgagggaggggtcggcctgcgggtagccagaggctggggcggctgtggagcctgtggtgggagcggcattgtggggcagggaaaaggtgagccgagccgacggaggggacgcgctgcggggcgcccccagtctatggagcggggtaagatggcggaggcggagagcctggagacagcggcagagcacgagcggatcctgcgagagatcgagagcactgacacggcctgcatcgggcccacgctcaggtctgtttatgatggtgaagaacatggacgtttcatggagaagcttgaaactcgtatccgtaatcacgaccgagaaattgagaaaatgtgcaactttcattaccagggctttgtggactctataactgaactgctgaaagtgagaggagaagcccagaaactcaaaaatcaagtgacggatactaatagaaaactacaacatgagggaaaggaactggtaatagcaatggaagagctgaagcagtgtcgactacaacagagaaatatttctgccactgttgataaattaatgctgtgtcttccagtcctagagatgtacagcaaactgagggaccagatgaaaactaaaaggcattatcctgcactgaaaactctggaacatctagagcatacctacctgcctcaagtaagccactatcgattctgcaaggtgatggtggacaacatccccaagcttcgagaagaaataaaagatgtttctatgtccgatctcaaagactttctggagagcatccgcaaacattcagacaaaattggagagactgccatgaagcaagcccagcagcaaagaaacctggataacatcgtcttgcaacaacccagaataggtagcaagaggaaatctaagaaagatgcatatataatctttgatacagagatagaaagtactagtccgaagtctgaacaggattcaggaattctggatgttgaagacgaggaagatgatgaagaggtacctggggcccaagatttggtggatttctctccagtttatcgatgtctacatatatattctgtcctgggtgcccgggaaacatttgagaattactaccgaaaacagaggcgaaaacaggctcgtttggtacttcaacctccatctaacatgcatgaaactttagatggctacaggaagtattttaatcaaattgtaggcttttttgtggttgaagatcacattttacatacaacccagggcttagtaaatagagcctacattgatgaactgtgggaaatggcactttcaaaaaccatcgcagcactccgtacccactcgtcttactgttctgatccaaaccttgtgttagatttgaagaacctcattgtgctttttgctgacacacttcaggtgtatggtttccctgtaaatcagctttttgacatgctgttagaaatcagagaccaatatagtgaaactctgctaaagaagtgggcaggtattttcagaaacatacttgattctgacaactacagtcctataccagtaacaagtgaagagatgtacaaaaaggtggtaggacaattcccatttcaagatatagaactggaaaagcaaccatttccaaaaaagtttcctttctctgaatttgtgccaaaagtttacaaccaaattaaagaatttatctacgcttgtctgaagttttcagaagatcttcatctaagctcaactgaagttgatgacatgattcggaaatcaacaaacctgttgctaaccaggactctgagcaactctctgcagaatgtaattaaaaggaagaatattgggcttactgagcttgttcagattattatcaatacaacacatttggagaaatcctgtaagtacttggaagaatttatcaccaacatcactaatgtgcttccagagacagttcacactaccaagctctatggcaccacaacttttaaggatgctagacatgcagctgaagaagagatttataccaacttaaaccagaagattgaccagttcctacagctggcagactatgactggatgaccggagatttgggcaacaaagctagtgattacctggtagacctcattgcctttcttcgtagcacctttgctgtattcacacaccttcctggaaaggtggcccagacagcgtgtatgtcagcttgcaagcatttagccacatccttgatgcaacttttgttggaagctgaagtgcggcagctcaccttgggagcattacagcagttcaacttggacgtcagagaatgtgaacagtttgccagatccggcccggtgcctgggttccaggaggacacgctgcagttggccttcatcgacttgagacaacttttggatcttttcatccagtgggattggtcaacctaccttgctgactatggtcagcccaactgcaagtacctccgggtaaacccagtgactgctctgaccctgcttgagaagatgaaggatactagccgcaagaacaacatgtttgcacagtttcggaaaaatgagcgagacaagcagaaactcattgacaccgtggccaagcagctccgaggactcatcagcagccaccactcatgaagggtgaccccggacccacagaggcgacctgctgcagcctctgtgtcagtctggggtccagccccagctgaccctgcatttgtgcattcttcttcaaagagagcatatgtatttttttattaacccctgtgcagtattcacataacatttccctatagtaaaagaggcacaagaataagcaagtacatgagatgttgctaggctgggactcaggggaagttattactacactatctgtgttatcttagagatggtggtatcatcaattccacagtgatgaaccacctttcatccatggctctaaagcttaggtctggggcttaggaaccataaaaagtgggtatctggcgctgggaggtagagtgagtaagcaaaaggatactaaaatatgtcctgttcactcttggatgcccattcaccacatagatgaggctgattcttctcaatacaaggaaagggcatggcaaacattactatttagtacactaagggcagctctggagggtcatctcctcagtctgctgactttcactggcttgtgaacaagcatggcatatggcaagatgacagcttcattccaatcccccaagaatggcggtttctttagcctgatctaaccccaggcttttattgcaattttttctagggcaggatacagctaagtagacagcagtaataattggatcccatgtttaactgcatattgccccagctctaggagtgttgagtctcaactcgaagagtttttctggatcttgaaagccagttttcatggaatcagagacccaatcccttccctgttcatctcatttccttcacttacagtcagagcacttggttcaggacataaatcaacagttacttccataggccttcacagggcgtttcagacttagcctcctccagtaatgccattgaaatagttcagatttcggaagcctaaaaatggcctttaccttacccttaggtgtaacctgaggattagttgggattgttcctttatgttttaaaaccagctttttggttatcatctttaaggaaatgtcaccagctctgcactgtgggggcagccatgcctggactggatgcctctagggatggagacattgttaccataaagtcgacagagccaaccatggcttgtggcttgttgcctctggcccaactgtccttcactaaataatatcctagatattattttgttgctcaagcccaaggttcccaccctcttttgagatccccaaagccatctttggccttgtctaagaaagattgcctataatcctgtcctccaaactctaaagcctggagcagcttagcgtggaggctgcactcattgacccagatggactcctgagacttaacgcaagggctttgctatgaggtcagtcgggggaaactgtactttaagacacttcagaaagatgctactggctagtagcagaaagatggctagtggcaagagtataattgtgcatcaccaaacaatgacaaataagccacacaggcatttccagcttggattgatgggaggagagactcatcaaacagaattcttcactacctttgtcagctactgagttgcttctggggagggaagtacttccttgcccctccccaacccccctacctcaccatatcctatcatatcttgatagtcatggggaagaggatgtgcacacagacatacaaatttcctcaaagctggagagaccaggctacatgtgagctcatagatgctgctgaggctcatcctgagggctggatggttggccagggtttcagaatgagggtaagggatgagcactgccacccagaacttgataagccaagagaaggcaggagccaaaatggcatcgccaagctctcatctttgttgaaacaagtgagaaacgattatattaatctgaagttctattgcttgagaagagttcaaaacacttctctttgctagtacccagtttgcagcaagatctcttcagctttaagtgctgagagactttgaagtggaaatggagagatgtgtaagcatggcacagtgtttgtctttttagaggatcatcattgctggtctggtctcaaacctctgccttggaagaactgtgctatacaggaaaaagtgaacaaggtggaggaataggggttattctgcacagaagtcccatgaaaggaaaagcttattcaagctcaagacataaagatggaccctttgatatatcttctctccattcttagtctgccttcaccttatctaacaaaaaacaacatgcagctactgagttgtatgtagagacatactcttggtgggccagggaaggtaaaaacagggaccagcaatgtcaagtttttgaactagaaaagtgggatgtttttagttttgtctataacctgtagctgggccaacccttgagaggacttgtgcaaagcatgtgtgcccagacccatcagactcctcagatatggcctcaaatacctagagatgtagaagtaccgtggagggcctcaataagagggcaagcacacagatggctagaagcctgtatggcttctggtcaggatgaacccttggccaagttcttgaggaaaccaggtctatattcctgaagggacagttcagtttgggactctattaggtttcagtagtaatataggctgcttgcatcattttaacattcatagggaaaatctctttgagcaggctataaatgaagctgttgcaggtagggaagaacaggacctgaaaatgggaaccaggaagtgagatcctgttggcaaagggaatgtagagcttccagggtgcattgcccactgttctcattgcataccagtcctccaagtcagtctagccttactgtacacttgacaagtgcttactcagcaagtcccagacccacggccttttatctcccaagactggctttggccatgaccttcctcatcaggcctctgagcacactctctaggaactgctgcagaaattcccctaccttagcctcccttctcccaggactcctctcttgactgcaattgcctcttcttcttcttcttcttcttcctttttgttttttttttttttgcctgcattcacaattacttttcacaaaggtgttggaaatggcatttttattttacacagatagttgcacatatatagagaaaattaggaaagtccatttttaactctaaagggaacttttttctctaaaacttacttgtaaagctactgatacagatgggccgcatggttaggggaaagctcctctgtgaaaagagcatgtttattcctcttgtacattttcctcttttaactgctattaaacaagaaagcctacatacctgtttcaaaagccacg

SEQ ID NO: 56346 - DNA, 3901 bp, Homo Sapiens; identical to SEQ ID NO: 30033

SEQ ID NO: 56347 - DNA, 1775 bp, Homo Sapiens; identical to SEQ ID NO: 30191

SEQ ID NO: 56348 - DNA, 3025 bp, Homo Sapiens
gcacgagcaggcagttcagattaaagaagctaattgatcaagaaatcaagtctcaggaggagaaggagcaagaaaaggagaaaagggtcaccaccctgaaagaggagctgaccaagctgaagtcttttgctttgatggtggtggatgaacagcaaaggctgacggcacagctcacccttcaaagacagaaaatccaagagctgaccacaaatgcaaaggaaacacataccaaactagcccttgctgaagccagagttcaggaggaagagcagaaggcaaccagactagagaaggaactgcaaacgcagaccacaaagtttcaccaagaccaagacacaattatggcgaagctcaccaatgaggacagtcaaaatcgccagcttcaacaaaagctggcagcactcagccggcagattgatgagttagaagagacaaacaggtctttacgaaaagcagaagaggagctgcaagatataaaagaaaaaatcagtaagggagaatatggaaacgctggtatcatggctgaagtggaagagctcataaaaatggaggagcagtgcagagatctcaataagaggcttgaaagggagacgttacagagtaaagactttaaactagaggttgaaaaactcagtaaaagaattatggctctggaaaagttagaagacgctttcaacaaaagcaaacaagaatgctactctctgaaatgcaatttagaaaaagaaaggatgaccacaaagcagttgtctcaagaactggagagtttaaaagtaaggatcaaagagctagaagccattgaaagtcggctagaaaagacagaattcactctaaaagaggatttaactaaactgaaaacattaactgtgatgtttgtagatgaacggaaaacaatgagtgaaaaattaaagaaaactgaagataaattacaagctgcttcttctcagcttcaagtggagcaaaataaagtaacaacagttactgagaagttaattgaggaaactaaaagggcgctcaagtccaaaaccgatgtagaagaaaagatgtacagcgtaaccaaggagagagatgatttaaaaaacaaattgaaagcggaagaagagaaaggaaatgatctcctgtcaagagttaatatgttgaaaaataggcttcaatcattggaagcaattgagaaagatttcctaaaaaacaaattaaatcaagactctgggaaatccacaacagcattacaccaagaaaacaataagattaaggagctctctcaagaagtggaaagactgaaactgaagctaaaggacatgaaagccattgaggatgacctcatgaaaacagaagatgaatatgagactctagaacgaaggtatgctaatgaacgagacaaagctcaatttttatctaaagagctagaacatgttaaaatggaacttgctaagtacaagttagcagaaaagacagagaccagccatgaacaatggcttttcaaaaggcttcaagaagaagaagctaagtcagggcacctctcaagagaagtggatgcattaaaagagaaaattcatgaatacatggcaactgaagacctaatatgtcacctccagggagatcactcagtctgcaaaaaaaaactaaatcaacaagaaaacaggaacagagatttaggaagagagattgaaaacctcactaaggagttagagaggtaccggcatttcagtaagagcctcaggcctagtctcaatggaagaagaatttccgatcctcaagtattttctaaagaagttcagacagaagcagtagacaatgaaccacctgattacaagagcctcattcctctggaacgtgcagtcatcaatggtcagttatatgaggagagtgagaatcaagacgaggaccctaatgatgagggatctgtgctgtccttcaaatgcagccagtctactccatgtcctgttaacagaaagctatggattccctggatgaaatccaaggagggccatcttcagaatggaaaaatgcaaactaaacccaatgccaactttgtgcaacctggagatctagtcctaagccacacacctgggcagccacttcatataaaggttactccagaccatgtacaaaacacagccactcttgaaatcacaagtccaaccacagagagtcctcactcttacacgagtactgcagtgataccgaactgtggcacgccaaagcaaaggataaccatcctccaaaacgcctccataacaccagtaaagtccaaaacctctaccgaagacctcatgaatttagaacaaggcatgtccccaattaccatggcaacctttgccagagcacagaccccagagtcttgtggttctctaactccagaaaggacaatgtccctattcaggttttggctgtgactggttcagctagctctcctgagcagggacgctccccagaaccaacagaaatcagtgccaagcatgcgatattcagagtctccccagaccggcagtcatcatggcagtttcagcgttcaaacagcaatagctcaagtgtgataactactgaggataataaaatccacattcacttaggaagtccttacatgcaagctgtagccagcccttcagcaccactgcaggataaccgaactcaaggcttaattaacggggcactaaacaaaacaaccaataaagtcaccagcagtattactatcacaccaacagccacacctcttcctcgacaatcacaaattacagtaagtaatatatataactgaccacgctcaccctcatccagtccatactgatatttttgcaaggaactcaatccttttttaatcatccctccatatcccccaagactgactgaactcgtactttgggaaggtttgtgcatgaactatacaagagtatctgaaactaactgttgcctgcatagtcatatcgagtgtgcacttactgtatatcttttcatttacatacttgtatggaaaatatttagtctgcacttgtataaatacatctttatgtatttgaaaaaaaaaaaa

SEQ ID NO: 56349 - DNA, 4633 bp, Homo Sapiens; identical to SEQ ID NO: 30906

SEQ ID NO: 56350 - DNA, 8105 bp, Homo Sapiens
gtagagctggttcctgctcgccgcggtgccgcgcgcgccggccggccgctgggcgctccgcgctcccagcctcgagttgtgcaatcctttgtagcacgccagagtcctcctcctccgctgttgcctctcgccctctctcttttttttttttcaagctgtgagctcaaccgatgagtcagagccgtgcaatcctgacactgcatcgcaggactgggggtgacacggagggaggcagagcgctcgcgaggcggacggcacgggtgcggggcgcgccgaggctcctgcatcgcaagcggggggtgacagcccgcgcgtcccgcccgggccctgccagcaaacttctcagcctcgggaggcgcgggctggcggaagccccgcgagcgccgcggggaggcgacggcgcctgtttgtttttaaaatcgggagtgcgtgcaggcggctggagtcccggaggcgaccgaaggcggcgacccgcggcggaagggggacagccgagcccggagcccggagcccgggcaagagctgggtgccagaaccctgtggagcatcatgaactgggaagagtagctgagccccagagcctctctggaagagaaaggaagagccagcagttctttctcccagtgtccgacctcactgtccagcgtcttcctctgcccctgctctgccctccctggctcctggactagagcccggcttccagcaggacgtttccccaggggatgggcgactgttgaaggggatctcaccgccagggctcagttggccacatcatgaacctccaggcccagcccaaggctcagaacaagcggaagcgttgcctcttcgggggccaggaaccagctcccaaggagcagccccctcccctgcagcccccccagcagtccatcagagtgaaggaggagcagtacctcgggcacgagggtccaggaggggcagtctccacctctcagcctgtggaactgccccctcctagcagcctggccctgctgaactctgtggtgtatgggcctgagcggacctcagcagccatgctgtcccagcaggtggcctcagtaaagtggcccaactctgtgatggctccagggcggggcccggagcgtggaggaggtgggggtgtcagtgacagcagctggcagcagcagccaggccagcctccaccccattcaacatggaactgccacagtctgtccctctacagtgcaaccaaggggagcccgcatcctggagtgggagtcccgacttactataaccaccctgaggcactgaagcgggagaaagcggggggcccacagctggaccgctatgtgcgaccaatgatgccacagaaggtgcagctggaggtagggcggccccaggcacccctgaattctttccacgcagccaagaaacccccaaaccagtcactgcccctgcaacccttccagctggcattcggccaccaggtgaaccggcaggtcttccggcagggcccaccgcccccaaacccggtggctgccttccctccacagaagcagcagcagcagcagcaaccacagcagcagcagcagcagcagcaggcagccctaccccagatgccgctctttgagaacttctattccatgccgcagcaaccctcgcagcaaccccaggactttggcctgcagccagctgggccactgggacagtcccacctggctcaccacagcatggcaccctaccccttcccccccaacccagatatgaacccagaactgcgcaaggcccttctgcaggactcagccccgcagccagcgctacctcaggtccagatccccttcccccgccgctcccgccgcctctctaaggagggtatcctgcctcccagcgccctggatggggctggcacccagcctgggcaggaggccactggcaacctgttcctacatcactggcccctgcagcagccgccacctggctccctggggcagccccatcctgaagctctgggattcccgctggagctgagggagtcgcagctactgcctgatggggagagactagcacccaatggccgggagcgagaggctcctgccatgggcagcgaggagggcatgagggcagtgagcacaggggactgtgggcaggtgctacggggcggagtgatccagagcacgcgacggaggcgccgggcatcccaggaggccaatttgctgaccctggcccagaaggctgtggagctggcctcactgcagaatgcaaaggatggcagtggttctgaagagaagcggaaaagtgtattggcctcaactaccaagtgtggggtggagttttctgagccttccttagccaccaagcgagcacgagaagacagtgggatggtacccctcatcatcccagtgtctgtgcctgtgcgaactgtggacccaactgaggcagcccaggctggaggtcttgatgaggacgggaagggtcctgaacagaaccctgctgagcacaagccatcagtcatcgtcacccgcaggcggtccacccgaatccccgggacagatgctcaagctcaggcagaggacatgaatgtcaagttggagggggagccttccgtgcggaaaccaaagcagcggcccaggcccgagcccctcatcatccccaccaaggcgggcactttcatcgcccctcccgtctactccaacatcaccccataccagagccacctgcgctctcccgtgcgcctagctgaccacccctctgagcggagctttgagctacctccctacacgccgccccccatcctcagccctgtgcgggaaggctctggcctctacttcaatgccatcatatcaaccagcaccatccctgcccctcctcccatcacgcctaagagtgcccatcgcacgctgctccggactaacagtgctgaagtaaccccgcctgtcctctctgtgatgggggaggccaccccagtgagcatcgagccacggatcaacgtgggctcccggttccaggcagaaatccccttgatgagggaccgtgccctggcagctgcagatccccacaaggctgacttggtgtggcagccatgggaggacctagagagcagccgggagaagcagaggcaagtggaagacctgctgacagccgcctgctccagcattttccctggtgctggcaccaaccaggagctggccctgcactgtctgcacgaatccagaggagacatcctggaaacgctgaataagctgctgctgaagaagcccctgcggccccacaaccatccgctggcaacttatcactacacaggctctgaccagtggaagatggccgagaggaagctgttcaacaaaggcattgccatctacaagaaggatttcttcctggtgcagaagctgatccagaccaagaccgtggcccagtgcgtggagttctactacacctacaagaagcaggtgaaaatcggccgcaatgggactctaacctttggggatgtggatacgagcgatgagaagtcggcccaggaagaggttgaagtggatattaagacttcccaaaagttcccaagggtgcctcttcccagaagagagtccccaagtgaagagaggctggagcccaagagggaggtgaaggagcccaggaaggagggggaggaggaggtgccagagatccaagagaaggaggagcaggaagaggggcgagagcgcagcaggcgggcagcggcagtcaaagccacgcagacactacaggccaatgagtcggccagtgacatcctcatcctccggagccacgagtccaacgcccctgggtctgccggtggccaggcctcggagaagccaagggaagggacagggaagtcacgaagggcactacctttttcagagaagaagaaaaaaacagagacattcagtaagacccagaatcaggagaacactttcccctgtaaaaaatgtggcaggtaaggtgggcagcgctgtccccgctgggacccccgcgggctggtgcgcggagggggcgggggtggggtggaggggagggggaagaggtacaggcggtgtccgcctcgtttctggttggctcagcgggtttctagggttgtgacgtcatggggcagctttcggaaaatgacgcgagctggccggccgcggctgtgcagcgtgggggtgaaggtgaaggctggggctcctcgcgcacccgcgctgggggcccccgggtgggctaggccggttctgagcaacccccacccggctgcagggtgttttacaaggtgaagagccgcagtgcgcatatgaagagccacgcagagcaggagaagaaggctgcagcgctgaggctgaaggagaaagaggccgctgctgccgccgccgccgcccaccagcaggccctgcgggaggagagcggtgcgggcgacaagggctgagcgcgggagccaggctggcccagtcctgggcctcggcccttcccgcaccgccgccagcgcccgcagacaccctggcatctcaagagggagtgaggagaggattgcagggacttttccctgcgaaacaaatgagacaatgacataaacggctcttttatttatgaaggccctgggagcagcgttaagggctccaggatccagctctctttgcatttggtctgtcggaagctgtcctcgtgctttcctggaccgggagagtcccggtcccctcgggagggactccaccgcctctcacactccgatttctgctgctctgctgccccgcagtcttttccctttatttgcttccccctcctcccctcggcctccaggaagccaccgtggccggccaagcacaagctcacccactttggagcagcatttctcctccccagaggacctcgaaggctgcaacggccctgccccaagccccagaaaaagaaactcttggagggagtctgcgggcttctctgagaaggggcgcagcctgacacctgtgctgtccctgcagtctctaggcctgtctgagctgctcccgtgaccgtgtcctgagtggccacctcctccttgggagggaggccgcggcaggtactctccctttgctgcttgctggcggccttgctagggctagaaagttttctcagcgttgggggaggggctagcgttcttgtccaaagcactcatcctgctgcagggaagggagctgtacggaggctggaagctgcagggttaggcccgagagagcttttgacaagcctggctcttcctgcttcccacctttttggctgaatacctttgggtcctggaggctgccaagggcgcttcgccttgagcaggtcccggagaggctcagcctgcccctcctggggccagcctccttgcctctgctctgacctcagcagctacacctaaccccaccgcaccctacccagtgtcgatatccacaacccagcccccaggcctgcacgttggagatttctggatccttccctgggagggagaggtctcctaactcgattggacaggagccttcattccttgactcgtgtcatttgggagctatttatttattcttagtatttaatttttaacatcctctcagggaccaggggcctcctgcttttcagaggcccgagtgcatttatcccaaaacgaggcatcttgacatcccctatccccaccccctaaattcccaaggccctaaggtccctcacctggttgctctggaagctcttgctgataggaatgatagcaacactgaaagagcgtgggaaggtggagggtgtcaccagacccacacagagcaagggagatcaaggcagttcttgctgccccttctctggctgtgctttgcctgagggaagagttggcaagaggccagaattctagtttggtttatggggcctggattctggcttgaagaagccatatttggcatgggtgaagtgaaagggccaggaggttctggaggccccttcacttccagtcccatagcggggctcagctatttttctgatcttattcaactttagttgtgcaaaagaaattctaagtgaatgcgcgtatgacaggtcaacgtattaggaaggagccagaaagtattcatactgctactccttatgagatagccaagaagcatcatgtcagtaactgggagtggagagggagttttgttttgaaactatgcaggtatttttcagcatccatttgtacattagtatggttctacaggaccccagctgtggaagtaacaaatttcttctccctccagactcttggatgactacctagatccccagcttaccggttagtttcctccacaggcttccatgagctcagtgtcccaagacagcaaaaatctggtataccctgtagaagcaggggggtagcaaatttaggctctcttcgaaattacttgtacaatacgagtgccttcgcagcttagccccaaagtgctacttatgtttcccaaggtcttttctattcaaatcatatttggtttcaggcccctttatgggcatacggtaacagaaacctccatcattcatatgagacccttttgtcagtggtaacatcttgtacttggaaaaaaaatttttttttttttttttttttttttttgagacagagtctcattctgtcgcccaggctggagtgcagtggtgtgatcttggctcactgcaacctccgcctcttgggttaaaagaattctcctgcctcagcctcctgagtagctgggattataggcacacaccaccacacccagctaatctttttgtatttttttttttagtagagacagggtttcgccatgtcggccaggctggtcttgaactcctgacctcaggtggtccacccgcctcggcctcccaaagtgctggcattacaggcgtgaaccaccgtgcctggccggaagtctttaaaaaataaagtgattctactcttctaagcttacagagaccagaccaggtgaatgtaactggggaaaatcaagatggtacctctctgcattatcccgccagacactgtattttatgcattcatgtctaggatacagtgtgaaaattaaaaagtttagagggcagatgcaattgtggcaagtgacctgccaataaagcaggtgcagctatagaagctggcataggtatatccttaatggtgctttctccctgggcttgtctttttgttgtttttttccccctatattcagagctccttgagaagtgataaacacctccagctttctaacatcctccccacaccatctcaccatatccatctcccagcatccatctgcattcagctaagggcgggaaactgacctagtgcctgtgttgcagaccatttctgaggtctccaccatccaaggaggcacagccgtcattactgtcctccatgccttcagcagcccccctcacagctaaggtacataccaccccttctgccgcgcctccacccctggcaccaaggtcttctgctgcttatgtctaaagggatcacctatatttaactgcctcagtgacctaacctctttcttctcatgtgccagatgttaagatgaaggaggaatacaacacatactcaagcctcagcctgtttagttgttttcactggggctcgcttttctgggacggtatttattatcagactggcaagcctaactccataggtttacaggaagtagggatatttttataaaacaattgtgtcctccccacattttgctatgttaatatttgcttctaacaatttgcagctgtttcactttttcctcatttgtctctaagttgaaggctttgttggaggggacagagcacaggaacagccttgacagtctgtaattattgtacagatattttaatagcatataaataagtatattccttttattttgaaacaaaaatgatcagacactgccttttgtgtgtttgctgcctgtggcatccttttttaaaaagactgttacatattaaaatagtgtacatatataaatattacctcttttgctgtacagttgtgatagagactgaagattttattttttgtgtgctttttataagaaaaaaattaatacactaaagaatcttgctgatgtgattgtaatgtacctatgtaacttatttacttttgaatgttcttctgtatctttaaaccttttattaaataaggttttaaaaattcaaaaaaaaaaaaaaaa

SEQ ID NO: 56351 - DNA, 4865 bp, Homo Sapiens
gcagtgccgccttttttttttttttgcatcccatttttttaaatttgcaattttatattttgcaaatattttgagagacattgatttttctccccgtgctcccccgttcttccctgcggagtgcgctgcgccgcccagccctgtcgccccccggaggtgatccctccctcctgcctgcccgccagcctgacctgtgcccggctcgcgggccgcagcctcggccccggcgcgcccccggcagctctcggcgcgatgagcatagagacgctactggaggcggcccgcttcctggaatggcaagcgcagcaacaacagagagcacgtgaggagcaggagcggcttcgcttggagcaggagcgagagcaggaacagaagaaggccaatagcctggccaggctggcacatacccttcctgtggaggaaccccgcatggaggcgccacccctgcctctgtctccaccggctcccccgccggcacccccaccaccacttgccacccctgccccactgactgtcatccctatccctgtggtgaccaactcccctcagcctctacccccacccccacccttgcccgcggcagcccagcctctgcccctggcgcctcgtcagccggccctggttggcgcccccggactcagcattaaggagcctgcccccctgcccagcaggccgcaggtgcccacccctgctcccctactgccggactcgaaggccaccattccacccaatggcagccccaagcctttgcagcccctccccacgcctgtcctgaccatagcgccacaccctggagtccagcctcagctggccccccagcagccgcccccacccacgctggggaccctgaagttggcaccagctgaagaagtcaaatccagtgaacagaagaagaggcccggggggatcggaaccagagaagtccacaacaaattggagaagaacaggagggcccatctgaaagagtgctttgagaccctgaagcggaacatccccaacgtggatgacaagaagacgtccaatctgagcgtgctgcggacggcgctgcggtacatccagtccctgaagaggaaggagaaggaatatgagcatgaaatggagcggctggcacgtgagaagattgccacgcagcagcggctggcagagctcaagcacgagctgagccagtggatggacgtactggagattgaccgcgtgctgcggcagacgggccagcccgaggatgaccaggcctccacctccaccgcctctgagggtgaggacaacatagacgaggatatggaggaggaccgggcgggcctgggcccacctaagctgagccatcgtccccagccggagctgctgaagtccaccctgccaccccccagcaccacccctgcgcctctgcctccacacccacaccctcacccccactccgtggccctacctcctgcccacctccccgtgcagcagcagcagccacagcagaagacccctctgccagcccctcctcccccaccggctgcccctgcccagacactggtgccagctccagcccatctggtggcgacggctgggggtggctccacggtcatcgcccacacagccaccactcacgcttcagtcatccagactgtgaaccacgttctgcaggggccaggcggcaagcacatcgcccacatcgccccctcggcccccagccctgcggtgcaactggcgcctgccacaccccccattgggcacatcactgtgcaccctgccaccctcaaccatgtggcccacctgggctcccagctgcccttgtacccgcagcccgtggcagtgagccacatcgcccacaccctctcgcaccagcaagtcaacggcacggccggcctggggcccccggctactgtcatggcaaagccggccgtgggggctcaggtggtgcaccacccccagctggtgggccagaccgtgctcaaccctgtgaccatggtcaccatgccctccttcccagtcagcacactcaagctggcttgaggacgaggccactcagaggcccccagtggggacagggagggggacctgtcccccactctctcacccaccagctccacacattccagccaggcccaggccagcccccccacccacccccaggcctcctaggggaagggggtgcaaagactctgagccaagggagggaagggccaccctgctgcactaggacttggtaagatgactctgagaaaatgcgagactctgatggaatgtgccacctgtccggcccagtgccagctccagtgccgctcctgcttcccctccctaccctcggaaatcagtgcgatgtggacgtcacgctccctgacttctcccccgccctgccccgccttcgtgtgctgctgctgctattgctgtctggtgaggtggcccaggcccccggctttcctccggagcctcatgttctcttcccaggcctttggaggggaaatggggaaagcagaactgaagccacttggcccagaaagctgcggattggggtgataaggggccttgctctgagcacaggtgacagatcataggaagtggctggtctggagtcccacccggacaggtggggcctcagcctggggctctctgacccggttgcagtcactgtgattcgttaccgtagatactacttaaaatgattctctaccaacaataaaccaaacccagccactgccaagcttcctgtgccctcaccccaatccctgccactgggctctggacctcaggagggcaggctgaggtggggaaggagggacttggctgtccttccccttccccgtcccctgcagcctgggtctggatgggaggagagccactgggcccctgtccccagtccccagtccccagccctgggcttggctcttggcttccagaaggcagcaaagaggggcgctgtcctgcgttcagcccctgatctctgacctctgctgagtgctgggcactgctccaagggacaggtgggcctggcggcctgtgggtttgggtgcctcctgcagtttgggagacatggaccagcatctggtcttgtttccaggagcatagaagccacatcgttgagacatcaggaaggtaaaaacccagcggcttagccaagccctaagcctgtccccagaccaaccctgggacctatacagaacagagggccagagctagggctgctgcttctgctccagcccctttgcctctgtcctcccatcccctcaacaccctgcttctcccggggacgcttttgagtgggccctgcccggggagctgcagagcagcagcacctttctctgagaagaggtccttggttgggtcaaggacagggctgagcgtggaagggggaggagtcaggggctctgtgttaggatgcggctttctctgcctctgggcagcctgctttggcctttccttgtatgtgggtgtttattacaagtggctttgtgtcagacacgctcggctccccacctggacacacactcaccagtggcctttcagtgtagcgggaggaagccggtgtccctggatgtgaagctcacactgatgggctggggcaggggcctgggccggcgagggggccggggggaggggacagagctgaggatttcctggagtgccctgcaggcacagaggaggtcagcaaaggtcttgaatagattttctctggaaataaagaatccttagatgcctaaaaattcccttcctgttccctcctggtcctggacacctcccaggggactgttccttatttctctctcctggtgtgggtaaagggacagttacaaaccaggtcaccatcctcagaggctgagccctgtacccaccccagcacagccacctccgccagaccccgtggctctgggagagccagctttgctattcccattgtgacagcgatggcaggcctgacccacggggcagttagagcagcctcgtggagctcgcccctcccctcagcctgcccacctctccctgcatcctgaggccagtggcccccgggcctgcacagatacctcatcatccacccgctgcccctccccgtccctgtcccccagcatcgggggcctgcaaatctagtgccgaatgactatgtccagattggtgacgatgggtgttgctgtttttcttgtcgtttgtgaacgctgtgatgctgtgtgcccaagtgggcagtcaccacccagcccttccttgggcgtctcccccagagtgctgtcgggaccacatctgtcctcaccctgtgggaccgcctggccctccctccctagcccttccagcctgggacacacacacacacacacacacacacacacgcacgcacacgcacacatcttacctctcatgcgtgttttaccttttgatgttcagagtggctcactggctgggagtccttacctcggggagagggggaggttggttccttggggggccaaagaaggcagggaatgcctggagggtaactggggggccaccatgaccccttctctctccagaaacagctgcttctccccccatcccagggtcccacccccaacccccagaggtggcccttgtttacagtgaggactcggccactgtgtctctgtttcctgaaatataaactgtagcgaccccagactgtagagatttttatgtgtttggatacatctgctgtgtggaaaaaaaaaaaaactacaaaaaccctaattttgtacatactgtatttttactattgaactgtattctagtggctgttcatgctccaagactttagttaccgagacatgaatactatccatgtaataagcacttgcctggaataaaatataaaactgaaataaacctgcactgaaacctgagatggagctgccaaaaaaaaaaaaaaaaaaaaaaaa

SEQ ID NO: 56352 - DNA, 7709 bp, Homo Sapiens
attttgaagagaggggtcccggggagctccctccaagatctagaggctccgcggccacccctgccgggtcctgccaagacttgctagaaggaacgagtcgcgtgccttagttagttggttcccgtcacaggaagaaacgcctttgcagtgggtttaattgcttctgggccgagcgaattccccgccgtacaactcagtggtgcggactttgcctcctgctaccctgttgctgcgccgagcggggtgggaaagtttctggagttgtcagtcgcgcagcccgtggccacctagacccgaggtgcgggcgcctgcgaagggcccccgcggggtggccggggccgccggggcatgcagcgcgggggcgcggctcggtgacgccgcgggcggggacccggcatccgggcaggctgcgcgcgggtgcggggcgagggcgccgcggggactgggacgcacggcccgcgcgcgggacacggccatggaggacgcgggagcagctggcccggggccggagcctgagcccgagcccgagccggagcccgagcccgcgccggagccggaaccggagcccaagccgggtgctggcacatccgaggcgttctcccgactctggaccgacgtgatgggtatcctggacggttcactgggaaacatcgatgacctggcgcagcagtatgcagattattacaacacctgtttctccgacgtgtgcgagaggatggaggagctgcggaaacggcgggtttcccaggacctggaagtggagaaacccgatgctagccccacgtcacttcagctgcggtcccagatcgaagagtcgcttggcttctgtagcgccgtgtcaaccccagaagtggaaagaaagaaccctcttcataaatcaaactcagaagacagctctgtaggaaaaggagactggaagaagaaaaataagtatttctggcagaacttccgaaagaaccagaaaggaataatgagacagacttcaaaaggagaagacgttggttatgttgccagtgaaataacgatgagcgatgaggagcggattcagctaatgatgatggtcaaagaaaagatgatcacaattgaggaagcacttgctaggctcaaggaatacgaggcccagcaccggcagtcggctgccctggaccctgctgactggccagatggttcttacccaacgtttgatggctcatcaaactgcaattcaagagaacaatcggatgatgagactgaggagtcggtgaagtttaagaggttacacaagctggtaaactccactcgcagagtcagaaagaaactaattagggtggaagaaatgaaaaaacccagcactgaaggtggggaggagcacgtgtttgagaattcgccggtcctggatgaacggtccgccctctactctggcgtgcacaagaagccccttttctttgatggctctcctgagaaacctcccgaagatgactcagactctctcaccacgtctccatcctccagcagcctggacacctggggggctggccggaagttggtcaaaaccttcagcaaaggagagagccggggcctgattaagccccccaagaagatggggacattcttctcctacccagaagaagaaaaggcccagaaagtgtcccgctccctcaccgagggggagatgaagaagggtctcgggtccctaagccacgggagaacctgcagttttggaggatttgacttgacgaatcgctctctgcacgttggcagtaataattctgacccaatgggtaaagaaggagactttgtgtacaaagaagtcatcaaatcacctactgcctctcgcatctctcttgggaaaaaggtgaaatcagtgaaagagacgatgagaaagagaatgtctaaaaaatacagcagctctgtctctgagcaggactcgggccttgatggaatgcctggctcccctccgccttcacagcccgaccccgaacacttggacaagcccaagctcaaggccgggggttctgtagaaagtcttcgcagttctctcagtgggcagagctccatgagcggtcaaacagtgagcaccactgattcctcaaccagcaaccgggaaagcgtcaagtcggaagatggggatgacgaagagccgccttaccgaggcccgttctgcgggcgtgccagggtgcacaccgacttcacccccagtccctatgacacagactcactcaagctcaagaaaggagatatcatcgatataatcagcaagccacccatggggacctggatgggcctgctgaacaacaaagtcggcacgttcaagttcatctacgtggacgtgctcagtgaagacgaggagaaacccaaacgccccaccaggaggcgtcggaaaggacgaccaccccagcccaagtctgtggaggatctcctggatcggattaacctaaaagagcacatgcccactttcctgttcaatggatatgaagatttggacacctttaagctgctggaggaggaagacttggatgagttaaatatcagggacccggaacacagagctgttctcttgacagcagtggagctgttacaagagtatgacagtaacagcgaccagtcaggatcccaggagaagctgctcgttgacagccagggcctgagtggatgctcaccccgagactcaggatgctacgaaagcagtgagaacctggaaaacggcaagactcggaaagctagcctcctatctgccaagtcatccaccgagcccagcttgaagtcttttagcagaaaccagttgggcaattacccaacattgcctttaatgaaatcaggggatgcactgaagcagggacaggaggagggcaggctgggtggtggccttgccccagacacgtccaagagctgtgacccacctggtgtgactggtttgaataaaaaccgaagaagcctcccagtttccatctgccggagctgtgagaccctggagggcccccagactgtggacacttggccccgatcccattccctggatgaccttcaagtggagcctggtgctgagcaagacgtgcctaccgaggtgacagaaccgccccctcagattgtacctgaagtgccacagaagacgaccgcctcttccacgaaggcccagcccctggagcaagactctgctgtcgacaatgcattgctactgacccaaagcaagagattttctgaacctcagaaattgacaactaagaaactggagggctcaatcgcagcctctggtcgcggcctgtcaccccctcagtgtttgcccagaaactatgatgctcagcctcctggagctaaacacggtttagcaaggacgcctctggagggccacagaaaaggacacgagtttgaaggaacacaccatcccctgggcaccaaagaaggggtagatgctgagcagagaatgcagcccaaaattccatcacagcctccacctgttcctgccaaaaagagcagagaacgccttgctaacggactccaccctgttcccatgggccccagtggggccctccccagtcccgatgcgccatgcctgccagtgaaaaggggcagccccgccagccccaccagccctagcgactgtcccccagcactggctcccaggcctctctcagggcaggcgcctggcagcccaccaagcacaaggccgcccccctggctctcagagctccccgagaacacaagcctccaggagcacggtgtgaagctgggcccggctttgaccaggaaggtctcctgtgcccggggagtggatctagaaacgctcactgaaaacaagctgcacgctgaaggcatcgatctcacggaggagccgtattctgataagcatggccgctgtgggattcctgaagccctggtgcagagatacgcagaggacttggatcagcccgagcgggacgtcgccgccaacatggaccagatccgggtgaagcagcttcggaagcagcaccgcatggcgattccaagtggtggactcacggaaatctgccgaaagcccgtctctcctgggtgcatttcgtctgtgtcagattggctcatttccatcggtctgcccatgtacgccggcaccctctccaccgcgggcttcagcacactgagccaagtgccttctctgtctcacacttgccttcaggaggccggcatcacagaggagagacacataagaaagctcctatctgcagccagactcttcaaactgccgccaggccctgaggccatgtagccaggcccggaatgggcctctctggacaagagccaccctttcactgtgcatatgatgctgatgcaattcctccatcatctctggacgtgcagaccagatccagaagaaaggcctggcgtgtggccaaacagcgtgaaaccttggcacaggactgaggatcctctcctccagaaaagccccctcgaggaaataaattagtgcggttctctttgacccccaaagacaagacaagcacttatttttattttcagaagacaaaagaaccaagatgccaactggctgcgaatgctctatctccagtctgtctctgtgtactggtagaggctgggaggagtagggggcagcctgttccatttctgatagtgcccttgctcttctgtctgtcatcttgcaggatgcccgagggccagatgggcttagctaggccaaagtaacagactcaagagttattgtacattactgaccacgctcatttgttcaaaagttagaacatctggctgcaccaggaaaaaaaaaaaaaaaaagtcctgttcttctttagataaacaagagacattttcataattgctttctagcaatcagcttttatttgccttaatataagcttttaagcagttatctaactagtgtccacaaccctgtaaccatacttccacatcttcagcttaggcagacatcgaacctctctgggatgtttccagcaaaagtgagcttttctaatcgtctcattgtaacatggcttattttgtagaggtattcatcagccacacacttcatgttggtttttggtttttaagctaactacaaatctagtaaaaagctatctgaaattcacaaatatcatgtgtgtgcgtgcgtgcgtgcgcgtgtgtgtctgtattcatagtgactgcttttggttttaaccagtttagtatcgttactgtgtggatcgtcgcgctgcagtattgacttggaatcctgaccatgtccatcccaaaattcagtcctcagttaacggatcatgtttgcaaaaggtcactgtgaggctgcatatttcagaaagatgtccttaataagggaagtcatgtataagatgttttctaaaagacttttcagtattacaactaatactattattatccttctttttttatttagataattcttttaatttaaacaaaggttcactatggaaccagacaaatctcattagccatgtgttaagtatttgctactttaaattgttttacaactgatttcagcacattctatccttttttttttttgaaatggagtttcgctcttgtcacccaggctggagtgcaatggcacgatcttggctcactgcaacctcagtctcccaggttcaagtgattctcctgccttagcctcccgagtagctgggattataggcacccaccaccacgcccagctaatttttgtattattagtagagacagggtttcaccatgttggccaggctggtctcaaactcaactcctgacctcaggtggtccacccgcctcagcctcccaaagtgctgggattacaggtgtgagccaccgcacctggcctctgtcctcttttagtctagtgtctggttttctagcaaacagtaaatttaaacaagtaaactattatggtttccattgcttacaaaatgattttcctttacattcttatcatgaacactattttaagcatcaaatgcaatcatctaaaatataaaggtcaatcatttataatagaaacaccttgaccacaagcccttgattgaacattttataatatttcatctacttattaaaacaaataatttcccttgggttggaggggaagtgatttcataaattaattagaaagccatctttagcatattgcttatgtctggatccatgtttctgaggaaaaagacattctcaggtgatgtatttttttcatgcattagtatgcatttttaaaaaataatgcatgtttctttaataattaattttcatcttctataagatgccatgtgaagaagttgtggaaatgtagaataaaaagctaaagctgccaaatttctgttgaactcttaaaaacagctcatgtttgtttgtcctctcgggttgtggcctagcctatttgcaatgtaatgaagctgcagggttcttgtatagctaaagcgttcaatgcatttcacgtgctgtggtggatgtgggtgctgtagacaggcttcttctcttcctgctctcaaaatacctcggcttgacatttggacagatcctgtcattgtttaagctgagcaaaaaaccacacaaaagttgtgtaagagatgagataacaaaggagcgagagaaatctcatgtgaatttccaagttttaattcgttctccatgaaggattttcatttcagtgaaagtcgcagcagaagagggaactttctggagtttttgagaatgccaaaccacatttttatcacacttctttggaaatcaatgcctttgcatagaaaatcaaattcagggaccacaaagaattttcagtgggaatgtctagtctgaggggtctgaggttgtttttactttattgtgttgtttaaatattttaaaaatatctttagcgtttggtcttttttttttctgtaaacatttaatttggtctgagaaaagctgaatgtttgggtgtgacgtttgactgaggtggattggggctgcctgtggacattagtgaacaggtggtaggcttcaggaatatccagttttaatcagttgcatttggtacagaattttgagtaatggtgaaaattgttgtctttggaaagcacaaaagaaacctggaaaggcagttcggctcaggtagctacacataacattgtgtatgattttcacttcaaagctgtctggaaggaaatgcagtcagctccagctagtactatttatgtacccagataactaagatattgtttcatggccttgccttagtcagaggcccttttctctgtcctgaacccccaggtatgggtgaaattggaaattactaatctattggaaatcagttcctgacatagtaaagtttgctttcataactgcagcaaaaaaggtcaacttgccaagtcactgctgccatgtgtgtactgtattattttcagaaaaaaatataatagtctgagtccaagttatcttgatttaaaattgatagagaaaagaaactgtcgagcaagttatataacaactaacaacattgcactttctgtatatgaaatcaatatttaaataacttatttttctccattgctgttcttaaaaacattgtaagtagctgtaatataccagtaccaatatgttcttgcaattgcttcagcccaagaaagctgtgtattgttttaaaaattgtaaaaattattgtgatgattcatttagcataaagagaggtggacggaagggttttcctatgtatcaaaacttgtctataattatgtcatctatgtacctagaaaaaagtaaataaatttcttcagttgaatatg

SEQ ID NO: 56353 - DNA, 2106 bp, Homo Sapiens; identical to SEQ ID NO: 30960

SEQ ID NO: 56354 - DNA, 8459 bp, Homo Sapiens; identical to SEQ ID NO: 29677

SEQ ID NO: 56355 - DNA, 1999 bp, Homo Sapiens
agtggcaagatggcgtccctggatcgggtgaaggtactggtgttgggagactcaggtgttgggaaatcttcgttagtccatctcctatgccaaaatcaagtgctgggaaatccatcatggactgtgggctgctcagtggatgtcagagttcatgattacaaagaaggaaccccagaagagaagacctgctacatagaattatgggatgttggaggctctgtgggcagtgccagcagcgtgaaaagcacaagagcagtattctacaactccgtaaatggtattattttcgtacacgacttaacaaataagaagtcctcccaaaacttgcgtcgttggtcattggaagctctcaacagggatttggtgccaactggagtcttggtgacaaatggggattatgatcaagaacagtttgctgataaccaaataccactgttggtaatagggactaaactggaccagattcatgaaacaaagcgccatgaagttttaactacgactgctttcctggctgaggatttcaatccagaagaaattaatttggactgcacaaatccacggtacttagctgcaggttcttccaatgctgtcaagctcagtaggttttttgataaggtcatagagaagagatactttttaagagaaggtaatcagattccaggctttcctgatcggaaaagatttggggcaggaacattaaagagccttcattatgactgaattacactcatcctttggaagagtgagcaagcagtggcagtttttcacagctcatcttgctgtgttcaattattaccatcacagccttttaacaaaatcatcttaaaatgctacccttcagccttaccctttaatggaaaaatgaaaggaagtgacaatacgggaggtccaaactttgtccctgttctctgtgttccttacctttctgtccctgtgtatagattatgtaaaagccttgtgtaaatatgagatgttgtcaaaatgatgcagtaaatgagcaatgacagtgtactgcagagaaaatttactcttgcctagaactggagggtttttatgggtctgtaattttcccacactcattgctgaaagcttaattaagtacttcaaaaacgtatctccattgttttaccttcttgaggggaacggtcttgttaaccagcactgagttgtctaccccaaacaatctctgtcattttcaaagatgcaaaatggtgttatttaattgtctccaccattgtcacacacaggaatgcctaataatagcaacccttgtctccctcttctctcctttgcaaatgggtcagtgactggaagaggcggactaatagccagagttaaatataaatacaaattaataatacatagagaacagcaataccagaaaaaaagaattctggtaaaatgatgtgaaaaattgacagctccctcactcttaaggttgctgctatatacagtctaggttttctgtttggaaataggtagggtaaaatctaagacctgcacaagggcagtgagagacatttacagcctcctctctatttgtttttttaaggaaaagtcaactcctgaaatgtcccttagctataatcagaaaactaagaatattattctgtgtcaacaatgtatttatggagagaagtaaaaataagttccacagcaacacatttacatgaattatgaactaggattcttggatttcataatcactccaaagctttttggggatggtgtgtgtgtgtgtgtgtgtccgtaattgttcatcattactttttttaacctatctttttgcttgcttaatcttctctgccccagttcttcctgagtatatgaatttgatttctaaaaacaatttattcaacactctatcacccgtattctctctctggctctgctgcaggtctctgcactcctgattttgctccatacttttaaataacaataataaatatacagttttcatttctcatctaaaaaaaaaaaaaaaaaaaaaaaaaaaaaa

SEQ ID NO: 56356 - DNA, 3767 bp, Homo Sapiens; identical to SEQ ID NO: 26614

SEQ ID NO: 56357 - DNA, 3794 bp, Homo Sapiens
ccaagttctacctcatgtttggaggatcttgctagctatggccctcgtactcggctccctgttgctgctggggctgtgcgggaactccttttcaggagggcagccttcatccacagatgctcctaaggcttggaattatgaattgcctgcaacaaattatgagacccaagactcccataaagctggacccattggcattctctttgaactagtgcatatctttctctatgtggtacagccgcgtgatttcccagaagatactttgagaaaattcttacagaaggcatatgaatccaaaattgattatgacaagccagaaactgtaatcttaggtctaaagattgtctactatgaagcagggattattctatgctgtgtcctggggctgctgtttattattctgatgcctctggtggggtatttcttttgtatgtgtcgttgctgtaacaaatgtggtggagaaatgcaccagcgacagaaggaaaatgggcccttcctgaggaaatgctttgcaatctccctgttggtgatttgtataataataagcattggcatcttctatggttttgtggcaaatcaccaggtaagaacccggatcaaaaggagtcggaaactggcagatagcaatttcaaggacttgcgaactctcttgaatgaaactccagagcaaatcaaatatatattggcccagtacaacactaccaaggacaaggcgttcacagatctgaacagtatcaattcagtgctaggaggcggaattcttgaccgactgagacccaacatcatccctgttcttgatgagattaagtccatggcaacagcgatcaaggagaccaaagaggcgttggagaacatgaacagcaccttgaagagcttgcaccaacaaagtacacagcttagcagcagtctgaccagcgtgaaaactagcctgcggtcatctctcaatgaccctctgtgcttggtgcatccatcaagtgaaacctgcaacagcatcagattgtctctaagccagctgaatagcaaccctgaactgaggcagcttccacccgtggatgcagaacttgacaacgttaataacgttcttaggacagatttggatggcctggtccaacagggctatcaatcccttaatgatatacctgacagagtacaacgccaaaccacgactgtcgtagcaggtatcaaaagggtcttgaattccattggttcagatatcgacaatgtaactcagcgtcttcctattcaggatatactctcagcattctctgtttatgttaataacactgaaagttacatccacagaaatttacctacattggaagagtatgattcatactggtggctgggtggcctggtcatctgctctctgctgaccctcatcgtgattttttactacctgggcttactgtgtggcgtgtgcggctatgacaggcatgccaccccgaccacccgaggctgtgtctccaacaccggaggcgtcttcctcatggttggagttggattaagtttcctcttttgctggatattgatgatcattgtggttcttacctttgtctttggtgcaaatgtggaaaaactgatctgtgaaccttacacgagcaaggaattattccgggttttggatacaccctacttactaaatgaagactgggaatactatctctctgggaagctatttaataaatcaaaaatgaagctcacttttgaacaagtttacagtgactgcaaaaaaaatagaggcacttacggcactcttcacctgcagaacagcttcaatatcagtgaacatctcaacattaatgagcatactggaagcataagcagtgaattggaaagtctgaaggtaaatcttaatatctttctgttgggtgcagcaggaagaaaaaaccttcaggattttgctgcttgtggaatagacagaatgaattatgacagctacttggctcagactggtaaatcccccgcaggagtgaatcttttatcatttgcatatgatctagaagcaaaagcaaacagtttgcccccaggaaatttgaggaactccctgaaaagagatgcacaaactattaaaacaattcaccagcaacgagtccttcctatagaacaatcactgagcactctataccaaagcgtcaagatacttcaacgcacagggaatggattgttggagagagtaactaggattctagcttctctggattttgctcagaacttcatcacaaacaatacttcctctgttattattgaggaaactaagaagtatgggagaacaataataggatattttgaacattatctgcagtggatcgagttctctatcagtgagaaagtggcatcgtgcaaacctgtggccaccgctctagatactgctgttgatgtctttctgtgtagctacattatcgaccccttgaatttgttttggtttggcataggaaaagctactgtatttttacttccggctctaatttttgcggtaaaactggctaagtactatcgtcgaatggattcggaggacgtgtacgatgatgttgaaactatacccatgaaaaatatggaaaatggtaataatggttatcataaagatcatgtatatggtattcacaatcctgttatgacaagcccatcacaacattgatagctgatgttgaaactgcttgagcatcaggatactcaaagtggaaaggatcacagatttttggtagtttctgggtctacaaggactttccaaatccaggagcaacgccagtggcaacgtagtgactcaggcgggcaccaaggcaacggcaccattggtctctgggtagtgctttaagaatgaacacaatcacgttatagtccatggtccatcactattcaaggatgactccctcccttcctgtctatttttgttttttacttttttacactgagtttctatttagacactacaacatatggggtgtttgttcccattggatgcatttctatcaaaactctatcaaatgtgatggctagattctaacatattgccatgtgtggagtgtgctgaacacacaccagtttacaggaaagatgcattttgtgtacagtaaacggtgtatataccttttgttaccacagagttttttaaacaaatgagtattataggactttcttctaaatgagctaaataagtcaccattgacttcttggtgctgttgaaaataatccattttcactaaaagtgtgtgaaacctacagcatattcttcacgcagagattttcatctattatactttatcaaagattggccatgttccacttggaaatggcatgcaaaagccatcatagagaaacctgcgtaactccatctgacaaattcaaaagagagagagagatcttgagagagaaatgctgttcgttcaaaagtggagttgttttaacagatgccaattacggtgtacagtttaacagagttttctgttgcattaggataaacattaattggagtgcagctaacatgagtatcatcagactagtatcaagtgttctaaaatgaaatatgagaagatcctgtcacaattcttagatctggtgtccagcatggatgaaacctttgagtttggtccctaaatttgcatgaaagcacaaggtaaatattcatttgcttcaggagtttcatgttggatctgtcattatcaaaagtgatcagcaatgaagaactggtcggacaaaatttaacgttgatgtaatggaattccagatgtaggcattccccccaggtcttttcatgtgcagattgcagttctgattcatttgaataaaaaggaacttgg

SEQ ID NO: 56358 - DNA, 2041 bp, Homo Sapiens
aattgttcggcgatcgctggctgccgggacttttctcgcgctggtctcttcggtggtcagggatggcgcggaagtcgaacttgcctgtgcttctcgtgccgtttctgctctgccaggccctagtgcgctgctccagccctctgcccctggtcgtcaacacttggccctttaagaatgcaaccgaagcagcgtggagggcattagcatctggaggctctgccctggatgcagtggagagcggctgtgccatgtgtgagagagagcagtgtgacggctctgtaggctttggaggaagtcctgatgaacttggagaaaccacactagatgccatgatcatggatggcactactatggatgtaggagcagtaggagatctcagacgaattaaaaatgctattggtgtggcacggaaagtactggaacatacaacacacacacttttagtaggagagtcagccaccacatttgctcaaagtatggggtttatcaatgaagacttatctaccagtgcttctcaagctcttcattcagattggcttgctcggaattgccagccaaattattggaggaatgttataccagatccctcaaaatactgcggaccctacaaaccacctggtatcttaaagcaggatattcctatccataaagaaacagaagatgatcgtggtcatgacactattggcatggttgtaatccataagacaggacatattgctgctggtacatctacaaatggtataaaattcaaaatacatggccgtgtaggagactcaccaatacctggagctggagcctatgctgacgatactgcaggggcagccgcagccactgggaatggtgatatattgatgcgcttcctgccaagctaccaagctgtagaatacatgagaagaggagaagatccaaccatagcttgccaaaaagtgatttcaagaatccagaagcattttccagaattctttggggctgttatatgtgccaatgtgactggaagttacggtgctgcttgcaataaactttcaacatttactcagtttagtttcatggtttataattccgaaaaaaatcagccaactgaggaaaaagtggactgcatctaatccatctttactgtcaacatctgtatttaaagaagaaagaaacaaaggctgaaaaggctgctcactctcatcatctagtgttcctcatgtgttctaaagtctttttgtaaaataaacacaaaaataaatttatgttgaattggcactttctatatctgaaattgtattatctatttttatttaacctttcttatattatctgaagatgaatatgtatgtggctgtattttgtatatatttaagttttaagtgacacttggatttctgatcagtgttgcaaaaaattgctactttgagatttatttccacagtgatatattaaacccaaaaggaatcatcatatttggatgcttaaaatagagtatacaagttttttagacccaaagaaaaaaacagcagagtctcagcatgatcagtcctgattgaatttcattatgtcacagtgatgcatgtcttagcactgattattggttttacttaatattccctaaaaacttgaggaaggaagatgatagaacatgagatactctttgttttgtacatactagaaaatacagctatcttctgatgagcaattgtgttgattttctttgcttttttcctcttatggagctctcagtgtgtgaaagttctaaagccacaagaatcaatgatgttttagctgctaatatttagtattgatcgtttcttttaaaaatgatttggggaacttgatctgtactgtaattttactaattccttgtgcagaggtgggtatggcaattagaagtcaagaaatgggttgtttagcttggtttgtttccctaacttctgattaactctctgtatgacaactctacagaagttgtgcgcgtgctttctcagcagcatttttccttcaaaatcatctttttaatcaacagtcattaataaatgtacatgtacgatattcaaacttt

SEQ ID NO: 56359 - DNA, 3031 bp, Homo Sapiens
aggaagatgtcgtaatgagcgatccacagaccagcatggctgccactgctgctgtgagtcccagtgactacctgcagcctgccgcctccaccacccaggactcccagccatctcccttagccctgcttgctgcaacatgtagcaaaattggccctccagcagttgaagctgctgtgacacctcctgctcccccacagcccacaccgcggaaacttgtccctatcaaacctgcccctctccctctcagccccggcaagaatagctttggaatcttgtcctccaaaggaaatatacttcagattcaggggtcacaactgagcgcctcctatcctggagggcagctggtgttcgctatccagaatcccaccatgatcaacaaagggacccgatcaaatgccaatatccagtaccaggcggtccctcagattcaggcaagcaattcccaaaccatccaagtacagcccaatctcaccaaccagatccagatcatccctggcaccaaccaagccatcatcaccccctcaccgtccagtcacaagcctgtccccatcaagccagcccccatccagaagtcgagtacgaccaccacccccgtgcagagcggggccaatgtggtgaagttgacaggtgggggcggcaatgtgacgctcactctgcccgtcaacaacctcgtgaacgccagtgacaccggggcccctactcagctcctcactgaaagccccccaaccccactgtctaagactaacaagaaagcaaggaagaagagccttcctgcctcccagccccctgtggctgtggctgagcaggtggagacggtgctgatcgagaccaccgcggacaacatcatccaggcaggaaataacctgctcattgttcagagccctggtgggggccagccagctgtggtccagcaggtccaggtggtgccccccaaggccgagcagcagcaggtggtacagatcccccagcaggctctgcgggtggtgcaggcggcatctgccaccctccccactgtaccccagaagccctcccagaactttcagatccaggcagctgagccgacacctactcaggtctacatccgcacgccttccggtgaggtgcagacagtccttgtccaggacagccccccagcaacagctgcagccacctctaacaccacctgtagcagccctgcatcccgtgctccccatctgagtgggaccagcaaaaagcactcagctgcaattctccgaaaagagcgtcccctgccaaagattgccccagccgggagcatcatcagcctgaatgcagcccagttggcggcagctgcccaggcaatgcagaccatcaacatcaatggtgtccaggtccagggcgtgcctgtcaccatcaccaacacaggcgggcagcagcagctgacagtgcagaatgtttctgggaacaacctgaccatcagtgggctgagccccacccagatccagctgcaaatggaacaagccctggccggagagacccagcccggggagaagcggcgccgcatggcctgcacgtgtcccaactgcaaggatggggagaagaggtctggagagcagggcaagaagaagcacgtttgccacatccccgactgtggcaagacgttccgtaagacgtccttgctgcgtgcccatgtgcgcctgcacactggcgagcggccctttgtctgcaactggttcttctgtgggaagaggttcacacggagtgacgagctccaacggcatgctcgcacccacacaggggacaaacgcttcgagtgcgcccagtgtcagaagcgcttcatgaggagtgaccacctcaccaagcattacaagacccacctggtcacgaagaacttgtaaggccaactgcggcgggaggccctgaagatgcagtcccccacctgtgtcctccctgggcccctggtggaaaggagccctgtggctgccttgggcctgccctcagccccactcctgttctgcaactgtccccacaggaaggggctctgttccctgtattgtcctccttctgaagccccttggctctgccttggcccttcccctcaccacgagctcccggcctgcccagactgtggacactggccgtgcccaatgagacgttctaaaccaggacgcgtgggaacccttatttccaaaggaaaaacatgcatttcactccgtcgaggagcaaagtgagcccctaccccccaccccgatccccgctcccaacactgccggagtcgcgtcatgccatgccccctctcctgcacctccctggccctgccggccactgtggacgccctggggcttggcacccacctctggagaaactcggggccacctccactccatgtgcccagccccgccacaacctctcctccagcacattccagctctatttaaaaagtaaagacacccaccgactcctgatccccctctttttctatggagaacgttgccttatactctctacttcagatgatgaacactgtgtactgtgtgtgctttaaagaagttttatttaattgctcccttcttcctttccttgttattcacctccctgatgcctgctttcagttgagggttgggggcaatgatgagcatatgaattttttctcactctagcaattcccttttctaaatgacacagcatttaaactcaaatctggattcagataacagcacctgcacatcctgcacctcctccctctcccttcacctcacccctgcccggcccaagctctacttgtgtacagtgtatattgtataatagacaattgtgtctactacatgtttaaaaacacattgcttgttatttttgaggcttttaaattaaacaaaaatccaactttatttttagttgtaactgcttgaggtatgttttatgaattaagtgacagatttgttatcctttattaacgtactttgttggtcagcactgggctgacaaaaattttttcttgctaataaatttagttgcctgaggcaaaatcttcaaaaaaaaaaaaaaaaaaaaaaaaaaaaaaaaaaaaaaaaaa

SEQ ID NO: 56360 - DNA, 2813 bp, Homo Sapiens; identical to SEQ ID NO: 22783

SEQ ID NO: 56361 - DNA, 6608 bp, Homo Sapiens; identical to SEQ ID NO: 28408

SEQ ID NO: 56362 - DNA, 2240 bp, Homo Sapiens
gtccttcggtgtctgggtgtggtgagtagaggtgtgtgtcacaaagtacagaccattgtgtgtgacaaagcccatcgtgtgtctgtgtgtgtctttatccacgtggatggacgtctctttcttgctctgccccaagacacaccctagcccctccttattctcaaaagggggagctggggagcctccccctaccctggggcctcccctgcccctccccgccctgcctggccgtcaccactccccagagggcacagggctctgctgtgcctcagagcaaaagtcccagagccagcagagcaggctgacgacctgcaagccacagtggctgccctgtgcgtgctgcgaggtgggggaccctgggcaggaagctggctgagccccaagaccccgggggccatgggcggggatctggtgcttggcctgggggccttgagacgccgaaagcgcttgctggagcaggagaagtctctggccggctgggcactggtgctggcaggaactggcattggactcatggtgctgcatgcagagatgctgtggttcggggggtgctcgtgggcgctctacctgttcctggttaaatgcacgatcagcatttccaccttcttactcctctgcctcatcgtggcctttcatgccaaagaggtccagctgttcatgaccgacaacgggctgcgggactggcgcgtggcgctgaccgggcggcaggcggcgcagatcgtgctggagctggtggtgtgtgggctgcacccggcgcccgtgcggggcccgccgtgcgtgcaggatttaggggcgccgctgacctccccgcagccctggccgggattcctgggccaaggggaagcgctgctgtccctggccatgctgctgcgtctctacctggtgccccgcgccgtgctcctgcgcagcggcgtcctgctcaacgcttcctaccgcagcatcggcgctctcaatcaagtccgcttccgccactggttcgtggccaagctttacatgaacacgcaccctggccgcctgctgctcggcctcacgcttggcctctggctgaccaccgcctgggtgctgtccgtggccgagaggcaggctgttaatgccactgggcacctttcagacacactttggctgatccccatcacattcctgaccatcggctatggtgacgtggtgccgggcaccatgtggggcaagatcgtctgcctgtgcactggagtcatgggtgtctgctgcacagccctgctggtggccgtggtggcccggaagctggagtttaacaaggcagagaagcacgtgcacaacttcatgatggatatccagtataccaaagagatgaaggagtccgctgcccgagtgctacaagaagcctggatgttctacaaacatactcgcaggaaggagtctcatgctgcccgcaggcatcagcgcaagctgctggccgccatcaacgcgttccgccaggtgcggctgaaacaccggaagctccgggaacaagtgaactccatggtggacatctccaagatgcacatgatcctgtatgacctgcagcagaatctgagcagctcacaccgggccctggagaaacagattgacacgctggcggggaagctggatgccctgactgagctgcttagcactgccctggggccgaggcagcttccagaacccagccagcagtccaagtagctggacccacgaggaggaaccaggctactttccccagtactgaggtggtggacatcgtctctgccactcctgacccagccctgaacaaagcacctcaagtgcaaggaccaaagggggccctggcttggagtgggttggcttgctgatggctgctggaggggacgctggctaaagtgggtaggccttggcccacctgaggccccaggtgggaacatggtcacccccactctgcataccctcatcaaaaacactctcactatgctgctatggacgacctccagctctcagttacaagtgcaggcgactggaggcaggactcctgggtccctgggaaagagggtactaggggcccggatccaggattctgggaggcttcagttaccgctggccgagctgaagaactgggtatgaggctggggcggggctggaggtggcgccccctggtgggacaacaaagaggacaccatttttccagagctgcagagagcacctggtggggaggaagaagtgtaactcaccagcctctgctcttatctttgtaataaatgttaaagccagaa

SEQ ID NO: 56363 - DNA, 1399 bp, Homo Sapiens
agagagtgcgcgtcagcagtttattagagagctctgtagccagcctcttctgcgcacccacctgctgcatcttagttcagtcggctcttagagtagtaaccgccagaaaggagtcggaagaggtctcacgaggctgtcatcaccgccatgcccaagaataaaggtaaaggaggtaaaaacaggcgcaggggtaaaaatgagaatgaatctgaaaaaagagagttggtgtttaaagaggatggacaagagtatgctcaggtaatcaaaatgttgggaaatggacgattggaagcattgtgttttgatggtgtaaagaggttatgccatatcagagggaaattgagaaaaaaggtttggataaatacatcagacattatattggttggtctacgggactatcaggataacaaagctgatgtaattttaaagtacaatgcagatgaagctagaagcctgaaggcatatggcgagcttccagaacatgctaaaatcaatgaaacagacacatttggtcctggagatgatgatgaaatccagtttgacgatattggagatgatgatgaagacattgatgatatctaaattgaaccaagtgtttttacatgacaagttctctgaggatggttctacagttgggattttggccatcatcaaccaagaagagaaattcatttagtgtgtagtttctgaaagcaaactgatttattttcattgttttaaagtatttatttctttaaaagctgaggacactgaattaccttaagttaaatgttaatactttattgttttgatgtaatggaacttaaggataaaagaccataatatttgctgttaaaataaataaacgagtgcctttcctactgtgataacgtcaagtaattggatattttgaatacatttctgcctgataatcatgctgggttctaataagccctacttccacctaatctgtttacagtcttttggtatgtttcagttacttagatggtctcataaggtttctgatacaatttgaagacagaaatctgcatttagaatcagaaaacatggacatatttttcatatttatctagtcatatgtaattttatgctaacattgatagtttataaatccttttcatcctttgtgcctcggttattaaggaaaaaaaaatgtccaacatacagtttttaaagtgtggcagttttgagtagtaacttagaatgtataagattaagagttaaagaaaccgaacaataagtggcaaccaattatcttaacattggaaatactggggtgccattttgttttcaaaagttattcattgtaatccactgttttggctttcatgaacaagtaaattacagtgtataaatgaaaagcaatttcataataaattctataaactgaaaaaaaaaa

SEQ ID NO: 56364 - DNA, 1354 bp, Homo Sapiens
ccagggctggaatggggccgcccggctccccatggcagtgggtgacgctgctgctggggctgctgctccctcctgccgcccccttctggctcctcaatgtgctcttccccccgcacaccacgcccaaggctgagctcagtaaccacacacggcccgtcatcctcgtgcccggctgcctggggaatcagctagaagccaagctggacaaaccagatgtggtgaactggatgtgctaccgcaagacagaggacttcttcaccatctggctggatctcaacatgttcctaccccttggggtagactgctggatcgataacaccagggttgtctacaaccggagctctgggctcgtgtccaacgcccctggtgtccagatccgcgtccctggctttggcaagacctactctgtggagtacctggacagcagcaagctggcagggtacctgcacacactggtgcagaacctggtcaacaatggctacgtgcgggacgagactgtgcgcgccgccccctatgactggcggctggagcccggccagcaggaggagtactaccgcaagctcgcagggctggtggaggagatgcacgctgcctatgggaagcctgtcttcctcattggccacagcctcggctgtctacacttgctctatttcctgctgcgccagccccaggcctggaaggaccgctttattgatggcttcatctctcttggggctccctggggtggctccatcaagcccatgctggtcttggcctcaggtgacaaccagggcatccccatcatgtccagcatcaagctgaaagaggagcagcgcataaccaccacctccccctggatgtttccctctcgcatggcgtggcctgaggaccacgtgttcatttccacacccagcttcaactacacaggccgtgacttccaacgcttctttgcagacctgcactttgaggaaggctggtacatgtggctgcagtcacgtgacctcctggcaggactcccagcacctggtgtggaagtatactgtctttacggcgtgggcctgcccacgccccgcacctacatctacgaccacggcttcccctacacggaccctgtgggtgtgctctatgaggatggtgatgacacggtggcgacccgcagcaccgagctctgtggcctgtggcagggccgccagccacagcctgtgcacctgctgcccctgcacgggatacagcatctcaacatggtcttcagcaacctgaccctggagcacatcaatgccatcctgctgggtgcctaccgccagggtccccctgcatccccgactgccagcccagagcccccgcctcctgaataaagaccttcctttgctaccgt

SEQ ID NO: 56365 - DNA, 2828 bp, Homo Sapiens; identical to SEQ ID NO: 29228

SEQ ID NO: 56366 - DNA, 5086 bp, Homo Sapiens
gcctgcgccgcgcagcccgcctcgggcgggaggcgggaggcgggaggccgggcccaggccggggcagcccctccaccgcaccgtcctgggccggtgcccaggtccgagtcgccttccgcctgccccccccgccaatcccccgccgcggcagccccagccaggtcccgccgccaggccggctcccgcccccgctccgcccccggagccgcagccccgcccgccatcgccgtcgccatgttgtggctcccgcagccggcgctggggacgcgcgcggccgagactctggcctgcagtcgccgccgccgccgccaggtggtgtttggactctagaccatgtgcctaggtagaagtttttcctttctccgcagctctgctcccctagcaacgctcgccacacccttgttttgagatcctctctaaggagcggagagtttaataggcaagaaggaagggagaagacagaaggaagacgctcccccgtacggagacagagggagggggggctccaaagccgaaagaggaggtccctacctgccacggataccagtcagcccttgccagcatccagccatgggggatatgaaaaccccagattttgatgaccttctggctgcctttgacatcccagaccccaccagccttgatgccaaggaggccatccagacacccagtgaggagaatgagagtcccctcaaacctccaggcatatgtatggatgaaagtgtgtccttgtctcactcaggatcagcccccgatgtgccggccgtgagtgtcattgtcaagaacaccagccgccaggagtcatttgaagcggagaaagaccacattactcccagtctcctacacaatggattccggggctcagatctgcctccagatccccacaactgtgggaaatttgattctacttttatgaatggagacagtgccaggagtttccctggcaaactggagcctcccaagtcagagccattacccaccttcaaccagttcagtccaatctccagcccagaacctgaggatcccatcaaagataacggatttgggataaagcccaaacactctgacagttatttcccaccccctcttgggtgcggggctgtgggaggcccagtcctggaggctctggctaagtttccggttccagagctgcatatgtttgatcatttttgtaagaaagaacccaagccagaacccctgcccttggggagccagcaggaacacgagcaaagtgggcagaacacagtggaacctcacaaggatccggatgccactcgattcttcggggaagctttggagttcaacagccatcctagcaacagtattggagagtccaaggggcttgcccgggagcttggtacctgctcatcagtcccccctaggcagcgtctaaagccagctcattccaagctgtcctcttgtgtggcagccttggtggccttgcaggccaaaagagtggctagtgtcactaaggaggatcagcctggccacacaaaggatctctcagggcccactaaagagagttctaaaggtagccccaaaatgcccaagtcaccaaagagtccccggagccctctggaggccactagaaaaagtatcaagccatcggacagccctcgtagcatctgcagtgacagcagcagcaaaggctcaccgtctgtggctgccagctccccaccagcaattcccaaagtgagaatcaaaaccattaagacatcatcaggggaaatcaaacggactgtcacaaggatcctgccagatcctgatgatccaagtaagtcccctgttgggtcacctctagggagcgccattgcagaggcccccagcgagatgccaggggatgaggtgcctgtggaagagcactttcctgaggcaggcacaaattcagggagcccccagggggccaggaaaggggacgagagcatgacaaaggccagtgactcgtcatctcccagctgcagttctgggccccgggtcccaaagggggctgccccaggctcacagacaggcaagaagcaacagagcacagcactgcaggcatccaccctggcccctgccaacctcctgcccaaagccgtgcacttggccaacctgaacctcgtcccccacagtgttgctgcatcagtgacagccaagtcttcagtgcaaagacggagccagccacagcttacacaaatgtcggtgcccctggtccaccaggtgaaaaaggctgccccactgattgtagaggtcttcaacaaggtccttcacagctccaaccccgtgcccctctatgcgccaaatctcagcccgcctgcggacagcaggatccacgtgccggccagtgggtactgctgcctggagtgtggagacgcatttgccttagagaagagcctgagccagcactatggccggcggagcgtccacattgaggtactgtgcacactgtgctccaagacgctgctcttcttcaacaagtgcagcctgctccggcacgcccgtgaccacaagagcaaggggctcgtcatgcagtgttcccagctgctggtgaagcctatctctgcggaccaaatgttcgtgtcggcccctgtgaactccacggcaccagcagccccagccccttcatcctctcccaaacatggcctcacttcgggcagtgccagtccccctcctccagccttgccactctacccagaccctgtgaggctcatccggtactcaatcaagtgtcttgaatgtcacaagcagatgcgggactacatggtcctggctgcacatttccagaggacaacagaggagacagaggggctgacctgccaggtatgccagatgctgctgcccaaccagtgcagtttctgtgcccaccagcggattcatgcacacaagtccccctactgctgcccggagtgtggggtcctctgccgctctgcctacttccagacccatgtaaaggagaattgcctgcactatgcccgcaaggtgggctacaggtgcatccactgtggtgtcgtccacctgaccttggccttgctgaaaagccacatccaggagcgacactgccaggttttccacaaatgtgcattctgccccatggccttcaagactgccagcagcactgcagaccacagtgccacccagcaccccacccagccccacagaccctcccagctcatttataagtgctcctgtgaaatggtcttcaacaagaagaggcacattcagcagcatttttaccagaatgtcagcaagacgcaggtgggcgtcttcaagtgccctgagtgcccactcttgttcgtgcagaagccggagttgatgcaacacgtcaagagcacccacggtgttccccgaaatgtggacgagctgtcaaacctccagtcttcagcggacacatcctcaagccgccctggctctcgagttcccactgagccaccagccactagtgtggctgctcggagcagctccctgccttctggccgctggggtaggcctgaagcccaccgcagggtggaagccaggccgcggctgaggaacactggctggacctgccaggagtgccaggagtgggttccagatcgggagagctacgtgtcccacatgaaaaagagccacggtcggacattgaagcggtacccatgccggcagtgtgaacagtccttccacacccccaacagcctgcgcaaacacatccgcaacaaccatgacacagtaaagaagttctacacctgcgggtactgcacagaggacagccccagctttcctcggccctcccttctggagagccacatcagccttatgcatggcatcagaaaccctgatttgagccagacgtccaaagtgaaacctccgggtggacattcccctcaggtgaaccatctgaaaagaccagtcagtggagtgggggacgctccaggcaccagcaatggcgcaactgtctcttccaccaaaaggcacaagtccctttttcagtgcgcgaaatgtagttttgccacagactcggggctcgagtttcagagccacatacctcagcaccaggtggacagctccacagcccaatgtctcctctgtggtttgtgctacacctctgccagctccctcagccgccacctcttcattgtccacaaggtgagagaccaggaggaggaggaggaagaggaggcggcggcagcggagatggcagtggaggtggcagagccagaggagggctccggggaggaggtgcccatggagactagagagaatggactggaagaatgtgccggtgagcctttgtcagctgacccagaggcgaggagattgctgggcccggcccctgaggacgatggtggccacaatgatcacagtcaaccacaggcctctcaggaccaggacagccacacactgtcccctcaggtgtgaccggagactttgcagtgtgcatggtcaggggtggtgccgaagtgtcttccacctgccctgcggaccgtggaaaataaaaggctctgcccccagtgtgagtgtgaccggttgtaccctggagtagtgtctgccctgagctgccagtgctgggtatcccccagccccaggaaatgtggggtcggccaggaccctcacagctctgaatttgcttctgttatttatggcttttcgctgcttcttggtgccccatctcttgtctgtgtccttccaaccccaagctgcttatgtggcccaaccccactgctgtcaactaggcttgaaccccacagcggctgtgctcttctgggaggttcccgcttgctgccttcagccagggcgctcctcagagctctattttcctgcagacaccagctctccttcctgcctttagatcctgagaaggagggaaatgaggggtgctgacacagtccctctgggagagctctgcctagtctggtttggcgagggcccttgatcaccttgcccctcctccctgtcttctctgattcttttccctcaaaatagtcctgagaactaattgtcacagacattggaatatttgtactgctctcgtgccatttgagaggctgctgccccaggcaggccagcccctactcctcttggctacactcatgttgctcagactatatttcaaataaaaaatcttctcacc

SEQ ID NO: 56367 - DNA, 3105 bp, Homo Sapiens; identical to SEQ ID NO: 26297

SEQ ID NO: 56368 - DNA, 2366 bp, Homo Sapiens
cggccgcccgccagagtgccagtggtccttggaggtcgagtccaaggacgtggcttgaagccgggagctggggcgccggagtccacgcaccggggatggaggcgctgggtgacctggagggaccacgcgcaccaggaggtgatgatcctgcaggaagtgcaggagagacccccgggtggctttcgagagaacaggtttttgtactgatatcggcagcttcggtgaacttaggttccatgatgtgctattctatacttggaccgtttttccccaaagaggctgaaaagaagggagccagcaatacaattatcggtatgatctttggatgttttgctttgttcgagttgctggcatccttggtatttggaaactatcttgtacatattggagcaaaatttatgtttgtagcaggaatgtttgtctcaggaggagttacaattctctttggtgtattggaccgagttccagatgggccagtatttattgctatgtgttttctagtgagagtaatggatgcagttagctttgctgcagcaatgactgcatcttcttctatcctggcaaaggcttttccaaataacgtggctacggtattgggaagtcttgagactttttctggactggggctaatactaggtcctcctgtaggtggctttttgtatcaatcctttggctatgaagtgccttttattgttctgggatgcgtcgttttgctgatggtaccactcaatatgtatattttacccaattacgagtctgatccaggtgaacactcattctggaaactgatcgctttacccaaagttggccttatagccttcgtcatcaactcactcagctcgtgttttggcttcctcgatcctactctgtctctctttgttttggagaagttcaatttaccagctggatatgtgggactagtattcctgggtatggcactgtcctatgccatctcttcaccactatttggtctcctaagtgataaaaggccacctctaaggaaatggcttctggtgtttggcaacttaatcacagccgggtgctacatgctcttagggcctgtcccaatcttgcatattaaaagtcagctctggctgctggtgctgatattagttgtaagtggcctctctgctggaatgagtataattccaactttcccggaaattctcagttgtgcacatgaaaatgggtttgaagagggattaagtacattgggacttgtatcaggtctttttagtgcaatgtggtcaattggtgcttttatgggaccaacgctgggtggatttctgtatgagaaaattggttttgaatgggcagcagctatacaaggtctatgggctctgataagtggattagccatgggcttgttttatctactggagtattcaaggagaaaaaggtctaaatctcaaaacatcctcagcacagaggaggaacgaactactctcttgcctaatgaaacctagtccgatggatcctggattgatacaaggttgagaaatgaatgctcctggccttaaacatcaccgtaggaagggtttttaaaattttacgcgcaaaactccgtggaccccgtgccagtgtcttggaagtgtcaacgtgtttttggatgatcctgtattgggctgtacttactgtgatactgaaaagctgtcctgctgaagcagctatatttgaaatattaagtatgaaaggagtaattaaaaacaagcaaaacaaaacaagacttagtttttaaatgaccaaacttgtccttaaagatgttgttattaactcgagttagttcttatttcctctgtttattttttattctaagtacactgattctgtgaatgtaccttttttattaacagggaaagaaatgaattaatttgatatgctctaaatacataaaggtgcttcaaaatatgtagaaacattactatgaaatcagtttttaaaagatatactttctctttgtcctgaggtttttcggtcttgttcaaaaggaagaattcttgcctgccatacagaaactctctagcactccctgaccttaagcttttctaaaaattctgtttgtgtgaaaagtacaagaataacaatacttacaacttccatttttgtaacctacgttcacttatgatctggatttataaacattacttggtataacgtttttcatttcctttaatgtctctgttttttggctctaccatctgttttgtttttgtttttatctatatcttggtagatgtatttcatccctagagcaggtcagcctccttcccctaatgcgaatgcttgttttgttagggaagggcttcctccaacttcgtgtgaaattgtgatgttgaagtgaataaatgtctattgtgtaactctca

SEQ ID NO: 56369 - DNA, 7732 bp, Homo Sapiens
gcggccgcggcgggagcggcggcgcactcggggggaagcaggccccactagacgggccgcgccgacgggctccgcgcactcgcagcccggggcgcccccacccccagcgcccgccgccgcgggcagggccggcccggagcgcggggggcggccggggagcgcgagccgggggcgcccgccgaagctcgctgctccgggtcggggtccgggcccggggccggccgcgcgccgcctttgacgcatcggagcgcggctcctgcaggatggagggctccgcgccgccagcggagttgtttgtgcgcaggcggctcgcggggctgggagcgctcaaggtctgaacttccctccggagccgcagctggaggaggcgagcgcgcgaggaggagaagccgcgcggcgcggaggccaccctcggggcgagaggcgcggaaggcgagcgagcaaagcggtcccggagccacggcggccacgcggcggggacccccgggcgttctaggtactggtgaccccggccggggcaggccccgggactcgacaacatggcttccccaccccaccagcagctgctgcatcaccacagcaccgaggtgagctgcgactccagcggggacagcaacagcgtgcgcgtcaagatcaaccccaagcagctgtcctccaacagccaccccaagcactgcaaatacagcatctcctctagctgcagcagctctggggactccgggggcgtcccccggcgagtgggcggcggaggccggctgcgcaggcagaagaagctgccccagctgttcgagagggcctccagccgctggtgggaccccaagttcgactcggtgaacctggaggaggcctgcctggagcgctgcttcccgcagacccagcgccggttccggtatgcgctcttctacatcggcttcgcctgccttctgtggagcatctattttgcggtccacatgagatccagactgatcgtcatggtcgcccccgcgctgtgcttcctcctggtgtgtgtgggcttctttctgtttaccttcaccaagctgtacgcccggcattacgcgtggacctcgctggctctcaccctgctggtgttcgccctgaccctggctgcgcagttccaggtcttgacgcctgtctcaggacgcggcgacagctccaaccttacggccacagcccggcccacagatacttgcttatctcaagtggggagcttctccatgtgcatcgaagtgctctttttgctctataccgtcatgcacttacctttgtacctgagtttgtgtctgggggtggcctactctgtccttttcgagacctttggctaccatttccgggatgaagcctgcttcccctcgcccggagccggggccctgcactgggagctgctgagcagggggctgctccacggctgcatccacgccatcggggtccacctgttcgtcatgtcccaggtgaggtccaggagcaccttcctcaaggtggggcaatccattatgcacgggaaggacctggaagtggaaaaagccctcaaagagaggatgattcattccgtgatgccaagaatcatagccgatgacttaatgaagcagggagatgaggagagtgagaattctgtcaagaggcatgccacctcgagccccaagaacaggaagaaaaagtcttccatccaaaaagctcctatagccttccgcccttttaagatgcagcagatcgaagaagtcagtattttatttgcagatatcgtgggcttcaccaagatgagtgccaacaagtctgcccacgccctggtgggtctcctgaacgatctgttcggtcgcttcgaccgcctgtgtgaggagaccaagtgtgagaaaatcagcaccctgggagactgttactactgcgtggcgggctgtcccgagccccgggccgaccatgcctactgctgcatcgagatgggcctgggcatgatcaaggccatcgagcagttctgccaggagaagaaggagatggtgaacatgagagtcggggtgcacacgggcaccgtcctttgcggcatcctgggcatgaggaggtttaaatttgacgtgtggtccaacgatgtgaacctggccaatctcatggagcagctgggagtggccggcaaagttcacatttctgaggccaccgcaaaatacttagatgaccggtacgaaatggaagatgggaaagttattgaacggctgggccagagcgtggttgctgaccagttgaaaggtttgaagacatacctgatatcgggtcagagagccaaggagtctcgctgcagctgtgcagaggccttgctttctggctttgaggtcattgacggctcacaggtgtcctcaggccctaggggacaggggacagcgtcatcagggaatgtcagtgacttggcgcagactgtcaaaacctttgataaccttaagacctgcccttcgtgcggaatcacatttgctcccaaatctgaagccggcgccgagggaggagcacctcaaaacggctgccaagacgagcataaaaacagcaccaaggcttctggaggacctaatcccaaaactcagaacgggctcctcagccctccccaagaggagaagctcaccaacagtcagacttctctgtgtgagatcttgcaggagaagggaaggtgggcaggggtgagcctggaccagtcggctctccttccgctgaggttcaagaacatccgggagaaaacggacgcccactttgtggacgttatcaaagaagacagcctgatgaaagattacttttttaagccgcccattaatcagttcagcctgaacttcctggatcaggagctggagcgatcctacaggaccagctatcaggaagaggtcataaagaactcccccgtgaagacgtttgctagtcccaccttcagctccctcctggatgtgtttctgtcgaccacagtgtttctgacgctgtccaccacctgcttcctgaagtacgaggcggccaccgtgcctcccccgcccgccgccctggcggtcttcagtgcagccctgctgctggaggtgctgtccctcgcggtgtccatcaggatggtgttcttcctggaggacgtcatggcctgcaccaagcgcctgctggagtggatcgccggctggctaccacgtcactgcatcggggccatcctggtgtcgcttcccgcactggccgtctactcccatgtcacctccgaatatgagaccaacatacacttcccagtgttcacaggctcggccgcgctgattgccgtcgtgcactactgtaacttctgccagctcagctcctggatgaggtcctccctcgccaccgtcgtgggggccgggccgctgctcctgctctacgtctccctgtgcccagacagttctgtattaacttcgccccttgacgcagtacagaatttcagttccgagaggaacccgtgcaatagttcggtgccgcgtgacctccggcggcccgccagcctcatcggccaggaggtggttctcgtcttctttctcctgctcttgttggtctggttcctgaatcgcgaatttgaagtcagctaccgcctccactaccacggagacgtggaagcggatcttcaccgcaccaagatccagagcatgcgggaccaggcagactggctgctgaggaacatcatcccctaccacgtggctgagcagctgaaggtgtcccagacctactccaagaaccatgacagcggaggggtgatcttcgccagcatcgtcaacttcagcgagttctacgaggagaactacgagggcggcaaggagtgctaccgggtcctcaacgagctcatcggggactttgacgagctcctaagcaagccggactacagcagcatcgagaagatcaagaccatcggagccacgtacatggcggcgtcagggctgaacaccgcgcaggcccaggacggcagccacccgcaggagcacctgcagatcctgttcgagttcgccaaggagatgatgcgcgtggtggacgacttcaacaacaacatgctgtggttcaacttcaagctccgcgtcggcttcaaccatgggcccctcacggccggggtcatcggcaccaccaagctgctgtacgacatctggggagacaccgtcaacatcgccagcaggatggacaccaccggcgtggagtgccgcatccaggtgagcgaagagagctaccgcgtcttgagcaagatgggctatgacttcgactacagagggaccgtgaatgtcaaggggaaaggccagatgaagacctacctgtacccaaagtgcacggatcacagggtcatcccacagcaccagctgtccatctccccagacatccgcgtccaggtggatggcagcatcggacggtctcccacagacgagattgccaacctggtgccttctgtccagtatgtggacaagacatctctgggttctgacagcagcacgcaggccaaggatgcccacctgtcccccaagagaccgtggaaggagcccgtcaaagccgaagaaaggggtcgatttggcaaagccatagagaaagacgactgtgacgaaacaggaatagaagaagccaacgaactcaccaagctcaacgtttcaaagagtgtgtgaggcggcgcccacccgctgcccgaggtgctctgtttgtcgaaacacagtaatatttgtatttggctgttgtgctttccaagcgccacagttgccctccccggacgtggtgttatgtggtcatttcagccctaacttctgtgtggatcacagttattcagggttcattttcatccattcttccctttcgctcccttccctggaaaccccgctgcctctgggtcatccgttcagcacgtggtggagaacaagtgccttcagggctggcctcggcctcgagtctcgggacagaggccgccagtggagatcatggctttgggtattatttgacttttagaacaaaagctgtggttaagatctcatttttattgctttttcccacgtcccacgagacactattttcggttctctggctaataccctgtttttgagtttattttgtttctgtctatgtcacagtgttcctctacgacccgacctctctatgtaagcacacatgcgcacacacacttgcattcatgaatctgatataaagtgccagtaatccgccaagagggggtgcgaagggggcatgtcacgacagctccgccaccccccattgcccacccgcactttcccgagcaccgcgccccgtgggctgtgggtgagccgcgctccctgcactgagcgggtttaggggctcgcccacatgcatgcaggccaagacagcaaatgccagccgggcacgacgcccgtgtgcccaggcctcgggggtctcagagccgcctctcacccccgaccctccacccaggggtctccccatcgggagtggaggtgttggtcctggaagctgactcatcggagagggaaataccaaataaacatccgaggttgcatttatttatttatttatttacccggaagcatgtgcgctcccgggaggggtgctgggtcctcagggtggggggtcatagccacaggggagggcagttcccaggaaggtaaccagatgtctcttttgtgttttggccacctggggccgcccccaacctccccaccccaagaggggtctgagtgggacctcaaagcatggccagtgcaattctgaggctaggggaataggagaagcccaccagctgcccctgccacccacgggggctcctccctgccggggtccagctcagaaccacgggggtctgtgccggcagcaccggtgccatcttggcttccacaaattccagaagtttcttggctgcctcccgctctcagatggcacagggcctatcagtggcaggatttaatctggggagcaaattccagctctgaaatggagttctcacaccgtatctagggacagaggcatctggatgcaaacgcggggtttgttaggggcggaatcccgagggtggtgtgggggagctccgtccgggcagttggctgctggtcctgtctgattatgttttgccatattgagtctgaagtttgtgtggaagtgagctcgcccgagttgtccggtcggagttgtagccagtctttcaggggaccccgggacgctgatgaggcccagggtgcactccttgtcagtcttgcccgttgtccctgtgcattttgctttccgctgtcaaatctcactgtctcgttttcacaccgcatcagtccccatcatcactactcctccccagagacatacagattgccctccccggcatgaagaagtcacaattctgacccgccacctctccaggggcggtgcctgggatggccacccatcaggacagccagagccagggtcccggcgtcctgagagtccagggcacctccccccattagctgtaaggtttcctgtcaggtgtgactgtcagtttgctggtcttccaataccgaagaaagggtggttgtgacaatacctcttgcttctaaagaatgtattataaaacaccgcagatttttttttttccttaaaaaacactacctgatgctttccttgttcgtggggattgtggtcacatgaagctctttctgcatcagtattaaggtgtatatttgaatgtcctcccctcccctttcccctccaggctgtgtagctttgaggggctgggcgtttgctcacgaccttgctgtctcgctcagaacatgctccgcaaagttctccgcacacacttcttccccatcaagcccatttccttccccaaccacaaaggtgtttgtgattcctcaccccgggaaaccaaggagctgcaaagtggagtctggttcagccccgtgcagactcacccagagcttaacgttgtctttcaaacaccctgagccttcctaaacagccagtgcagacgttctctctgggccacgaagcccctcgggtcctccccgtcccctgctccgatgcatacctcagtgcagaaccacagaatctctgcagcggaaacgccgtgcatctcttgtctgttggcagcgagcacatcgtgctggagacacgagtttctaagcagctggcacgagggctgctgacggcatgggtcgtgcttcagggtggcaatacctcttaggaacttagggcaggaagcaatacttcagcattgaatgtgtgtaaatagttgctttgagttgcaattgctattttcttctcagtcccagctcagatcgaattatatatccatatatatatatatatatatatatatatatatatatatatatatatggtaaacaagcacacacaattttatccaatgcaaacaaatgtagagcatcagttacaaaaccctcgaatagcttgagagccccacaggctctgccacacccgtgacttcatccacactgacgtcacccgcgggggctccccctgcacatttgcacacgatccggagagccgaaggccgcgtgcttcctgtcacatgggctgtaatcatttgtagtttccaaagacacgtctgcatttgaatttctagattttcgaggtaaggagttttttttaattggttgtttggaaaatcacatcatgcctagaatctgaaattgaattagcaagaaccgactgtttgcattttccatatatccttttatctgctctttttaaattgttaattctaataatttcaaaatgcattcactgaagaaatggacattaaaatattctaaaatttaaataaaaaaaa

SEQ ID NO: 56370 - DNA, 9020 bp, Homo Sapiens
cgctgctgggcggcggcagggtggcggacggagcgggggaccggggagcggcggccgcgaggaggttatgtttgtgtttggggttgtcaagtgaaggagggatcccaggcgccgccgccgccgccgcgggggtcgcgagatcccgagccgcggccgccgccatcagcagcgcagtccagggccggctgcagcggcagctccgccgggcgtcctggcagcagcacatggattaattgatgtatgttgagtttatggagctgccttttggtggcttgctttatctgcagtttttaagaagaaaaagaaggccctgagtcaaagaagatgcctcgaactaaacaaattcatcccagaaatctaagagacaaaattgaagaagcacaaaaagaacttaatggggcagaagtttcaaaaaaagaaatcttacaggctggtgttaaaggaacttcggaatcccttaaaggtgtgaaacgcaaaaagatcgtagctgagaatcacctgaaaaaaataccaaaatccccactgagaaatcctcttcaggcaaaacataaacaaaatacagaagagtcatctttcgccgttcttcatagtgcttcggagtctcacaagaaacagaattatattcctgtaaaaaatgggaagcagtttaccaaacaaaatggagaaacacctggaataattgctgaagcctcaaaatctgaagaatctgtctccccaaagaagcccttgtttctgcagcaaccatctgaactgcgtagatggagatccgaaggcgctgatcctgccaaattcagtgacctcgatgaacaatgtgactcaagttccttgtcaagtaaaaccaggactgacaatagcgaatgcatctcttctcattgtggcactacgtccccctcctatacaaacactgcattcgatgtcttactgaaagcaatggagccagaactgagcaccttgtcacaaaagggctcaccttgtgcaattaagacagaaaaactgaggccaaataaaactgcacgttcccctcccaaattaaaaaacagttcaatggatgccccaaatcagacttcacaggaattggttgctgaatcacagtcttcttgtacctcatacacagtccatatgtctgctgctcagaagaatgagcaaggggcaatgcagtcagcttctcatttgtatcatcaacatgaacactttgttcccaaatccaaccaacataatcaacagcttccggggtgttcaggtttcacaggatcactgacaaatctgcaaaatcaagagaatgccaaacttgaacaggtttataatatagcagtgacatcatctgtaggcctaacttcaccttccagtagatctcaggttactcctcaaaaccagcaaatggattctgcttcacctttgtcaataagtccggctaattctacacagtcgccccccatgccaatctataattcaactcatgttgcctctgttgttaatcaaagcgtagagcaaatgtgcaatcttcttctgaaagatcagaagccaaaaaaacaaggaaaatatatttgtgagtattgcaatagagcatgtgcaaagcctagtgtgcttttaaagcatatccgctcccacactggagagcgaccctatccctgtgtgacttgtggattttcatttaagactaaaagtaatctgtataagcacaagaaatcccacgcacatactatcaaactgggtcttgtcttgcaaccagatgctggtggcttgttcttgtcccacgagtcccccaaagcacttagtattcattcagacgtagaagacagtggggagagcgaggaggaaggcgccactgatgagagacagcatgacctgggcgccatggagctgcagaatgtgcacataataaagaggatgtcaaatgctgaaactttactaaaatcaagcttcactccaagcagtccagaaaatgtgataggtgactttttgctacaggacagatctgcagaatcacaagctgtgacagagttaccgaaagttgtggtccaccatgtcactgtgtcccccttaagaactgacagtccaaaggccatggatcccaagcctgaactttctagtgcacaaaagcagaaggaccttcaggtgacaaacgtacagccactttcagccaacatgtcccagggtggagtctccaggttggagactaatgagaattcccaccagaaaggcgacatgaatccactggaaggaaagcaagactctcacgtaggaacggtacacgcccagctacaaaggcagcaggctaccgattactcccaagagcagcaaggaaagctcctgagtcctcgaagtttaggaagtacggattctggttacttttcacgttctgaaagtgccgatcaaacagtgagtccaccaactccctttgccagaaggttcccagcacagaacaagactctggaaggagtaacggaccctctgcagctcttgtcaccacgtcaacaccctctgctttgccacagggaaaaggcattgcttttaccaggtcagatgcgcccacctttggccacaaaaacacttgaggagcggatatcgaagcttatctcagacaatgaagctttggtagatgacaagcaactggatagtgtgaagccgcggagaacctcactgtcaagacgaggaagcattgattcccccaaatcatacatatttaaagattctttccagtttgatttaaaaccagtgggacggagaacaagttcaagctctgatataccgaagtcacctttcacccctactgaaaaatcaaagcaagtgtttcttctgtctgtaccttcacttgactgtttacctatcacaagaagtaattccatgccgaccacaggttattcagcagtacctgcaaatataatacctcctcctcatccactaagaggaagtcagtcatttgatgacaaaattggcgctttctatgatgatgtctttgtatcgggacctaacgctcctgtgccccagagtgggcatccccgtacacttgtgagacaagcagccatagaagactcttcagcaaatgaaagtcatgttcttggtactggacagtccctggatgagagccaccaaggatgccatgctgctggtgaagccatgtcagtgaggagcaaggcactggcacaaggcccacatatagaaaaaaagaagtctcatcaagggcgagggacaatgtttgagtgtgaaacttgtagaaacaggtataggaaactggaaaattttgaaaatcataagaaattttactgttctgagttacatggaccaaaaacaaaggtagccatgagagaacctgagcacagccctgtgcccggcggtctgcaacctcagattctacactacagagtcgctgggtcctccggcatctgggaacagacgccccagataagaaaaaggaggaaaatgaaaagtgttggggatgatgaagaacttcagcaaaatgaaagtggaacatctccaaaaagttctgaaggccttcagtttcagaatgctctgggctgtaatcccagtttgcctaaacatagtgttaccataagaagtgaccagcagcataaaaatatacagttgcaaaactcccatattcaccttgttgccaggggccctgagcagaccatggatcccaagctgtcgaccatcatggaacaacagataagttcagcagcccaggacaagatagaactgcagagacacggaactggaatctctgtcatccagcacaccaactccctgagcaggcccaactcatttgacaagcctgagccttttgaaagagcctccccagtttctttccaggagctgaatagaacggggaattccgggtctctaaaagtgataggaatctcccaagaggaaagtcacccttctcgggacgggtctcatcctcaccagcttgcactatcagacgctctcagaggagaacttcaggaaagctccagaaagagtccaagtgaacgacatgtgttaggacagccctcaagacttatccggcagcacaacatccaagttccagagattttggtcacagaagaaccagatcgagacctggaagctcaatgccatgatcaagaaaagtcagagaagttcagttggccccagcgtagtgaaaccttgtcaaaattgccaacagagaaactgccacccaaaaagaaaaggctccgtctggctgagatagaacattcctcaacagaatcgagctttgattccactctctccaggagtctaagtagggagagcagtttatctcacacttcaagtttctcagcctctttagacatagaggacgtttctaaaacggaggcttcccccaaaatcgattttctaaataaagccgagtttcttatgattccagctggcttgaatactctgaatgttcctggatgtcaccgggaaatgaggcgtactgcatcagaacagattaattgcacgcaaacgtcaatggaggtctctgatctcagaagcaaatcattcgattgtggaagcatcaccccaccccagacaacaccacttactgaattgcagcctccatcttcaccttctcgagtgggagtgactgggcatgtgcctctcttagaaagaaggagaggcccactggtacggcaaatatctttgggcatagccccagatagtcatctgtctcctgtacacccaacatctttccaaaatactgctcttcccagtgtgaatgcagtgccatatcaggggcctcagctcactagtacatctttagctgagttttctgcaaatactttgcactctcagactcaggttaaggatctgcaggcagaaacatcaaactccagctctaccaacgtttttcctgttcaacagctctgtgatatcaatttgttaaatcaaatccatgcaccgcctagccaccagagcacacagctatctctgcaagtgtctacgcagggtagcaagccagataaaaattctgttttatctgggtcttctaaaagtgaggattgctttgctcccaaataccaattgcattgtcaggttttcacttcaggcccatcttgctcttctaatcctgtgcattctttgccaaatcaagttatttcagatccagttggaacagatcattgtgtgacatcagcaacattaccaaccaaattaattgacagcatgtctaattcgcatcctctgctaccaccagagctcaggccccttggaagtcaggtgcagaaggtgccatcatcattcatgctgcccatacgcctgcagagtagtgttcctgcttactgttttgctacactcacatccctgccacaaatactagtgacccaagatctgcccaatcagccaatttgccagactaatcatagtgtagtgccaatcagtgaagaacaaaattctgtgccaacattacaaaaaggtcatcagaatgctttgccaaacccagagaaggaatttctatgtgaaaatgttttttcagagatgagccaaaattcttctctatcagaatccttgcccataactcagaaaatatctgttggtcgactttcccctcaacaagaatcttcagcttcgagtaaaaggatgctttccccagcaaatagtttagacattgccatggaaaagcaccagaagcgggccaaagatgaaaatggagctgtttgtgcaacagacgtgagacctttagaggctttgagttcgagagttaatgaagctagtaaacagaagaagcctattttagtgagacaggtttgtactacagagcccctggacggtgtgatgttggaaaaggatgttttttctcaacctgaaattagtaatgaggctgttaatttgacaaatgttttaccagctgataattcatcaacaggatgctctaaatttgtcgttatagaacctataagtgaattgcaggaatttgaaaacatcaagtcatccacatcattaactcttacagttcgaagttcacctgctccttcagaaaatactcatctttctcctttgaaatgtacagacaataaccaagaaaggaagtctccaggggttaaaaatcaaggtgacaaagtgaacatccaagagcaaagtcaacggccagtcacttctctttcattgtttaacatcaaggacacccagcagctggctttccctagcctgaaaactacaaccaactttacatggtgttatctcttaaggcagaagtcgttgcatttgcctcagaaggaccagaaaacttcagcctatactgattggacagtaagcgccagtaatccaaatccactcggtttgcccacaaaagttgcacttgctctccttaattcaaaacagaacactggaaaatcactatactgtcaagcaataactacccattccaagtcagacttattggtctattcaagcaagtggaaaagcagcttaagcaagagagcattaggtaatcaaaagtccacagtagttgaattcagcaataaagatgcctctgaaattaacagtgagcaagataaagaaaattccttaatcaaaagtgaaccaagaagaattaaaatatttgatggaggatataagtcaaatgaagagtatgtatatatccgaggcaggggaagaggaaaatacatttgtgaagaatgtggaatacgttgtaagaaacctagcatgttaaagaaacacatacgaacccatacagatgtccgcccctaccactgcacttactgtaacttctcctttaagactaaaggaaatctgacaaaacacatgaagtccaaggcacatagcaagaaatgtgtggatttaggcatctcagtaggtttaatagatgaacaggatacagaagaatcagatgaaaaacagagattcagttatgagcgatctggatatgatcttgaagaatctgatggcccagatgaggatgacaatgaaaatgaagacgatgatgaggacagccaggctgaatcagtcctgtcagccacaccctcagtcacagctagcccgcagcaccttccatctagaagtagccttcaggaccctgtgagtactgacgaggatgtcaggatcaccgattgcttttctggggtacacacggacccaatggacgttctgcccagggcgctgctcaccagaatgactgtcctgagcacagcacagtctgactacaataggaagacactctctccggggaaggccaggcagcgtgctgcgagagatgaaaacgacacaattccgtctgtagacacttccaggtccccgtgtcatcagatgtctgtggactaccctgagtcagaagaaattctgagaagttctatggcaggaaaagctgttgctataacacagagcccatcatctgtaagacttcctcctgctgcagctgagcacagcccccagacagcagcggggatgccttctgtggcctcaccacatcctgaccctcaagaacagaagcagcaaataactctacagccgactccaggcttgccttctccccacactcatttgtttagccaccttcctttgcattcccagcagcaatcgaggacaccttataatatggttccagttggggggatccatgtggtacctgctggcctcacatactccacgtttgtgccccttcaggctggaccagtgcagctcacgatccctgctgtcagtgtcgttcacagaactttgggtactcataggaatacggtcacagaagtgtctggcactacaaaccctgctggagtggctgaattaagcagtgttgtgccatgtattcctatcggccaaatccgcgtgccaggccttcagaacctaagtaccccaggcttgcagtcactcccctcgttaagcatggaaaccgtcaatattgtaggcctagccaatacaaatatggccccacaagtccatccaccaggactggctctgaatgctgtcggactgcaggttctgactgcaaacccttcatcacaaagcagccccgcccctcaggcacacattccaggtctccagatcttgaacatagcattgcccaccttaatcccctcagtcagtcaagtagccgttgatgcacagggagctccagaaatgccagcttcccaaagcaaagcatgcgagacacaacccaagcagacttctgtagccagcgcaaaccaggtcagcaggaccgagtctcctcaggggttacctacagtccagcgggaaaatgcaaaaaaagttctgaatccacctgcccctgcaggtgaccatgcaaggcttgatggcctgagtaaaatggacacagagaaggctgcctcggcaaatcacgtgaagcccaagcctgaactcacttccatacagggccaaccagcgtccacgtcacaacctctgctgaaggcacattctgaagtttttacaaagccctcaggccagcagactctctctccagacagacaggttcccaggcccacaggactaccgcggaggcagcccactgtgcacttcagcgacgtgagcagcgatgatgacgaggacaggcttgtgatagcaacctgatggattttattttttatttgctttttttttatataacacttaaaggtttctttgaaaaccctcctttccttaaagcacatttttctgacataaactcatgactaatctttgtgcaatcatgaacttttgaccaataattgttgttttgtgtcagctccagccatttttgtacatgttgtatagacaattgtgccttttaggagctttatgtttagaaactgtacagattgttgaatatctatatacataaaaatatattatatatgtatatgaaaaccaggtagttatttgtgtttagtaaggaaaacctgtcaaataaatcaaatgattaaattatatgttccactgttgaatataaattttatggctatggggcagagtttctgtgtataaattagtatgtaaactccatatttatgtattcatattagtctttgaaaatgggtctgtcctccttgtgtaagacagtaactttacacttcagacagattttctgtgttatgaaatgtttcagtaaaatattgtttactgacctttaaaaa

SEQ ID NO: 56371 - DNA, 4259 bp, Homo Sapiens
gtatccgggtcgctgctttccctattgtctgaggcagccgccctcgcgctgtgcaatttctggtctttcgttgcttctggtccaggctaataaagtttttctttctttaattttttttcttctagttttaacgggagaaattaactccccggggccgccgggttgactgcgctgcctgggccggaggtcttctccggccagggagcgctgtgggaaggggctcgagcggccagggccaggcgaggccgggggggcggggggttaggggaccgcggggctactcttgggagcgcccctgtccggctggctgcgcgccggttttaaatagcatctttcggacttgtcttcgcggccccagtccccgacctcggcgctgcctgggctcctgcagcctctccctaagtcttctccaaacgaccacctcacggattccttatggatcgcagctccaagaggaggcaggtgaagcctttggcagcttctctgctggaagctcttgattatgatagttcagatgacagtgattttaaagttggagatgcctcagattctgaagggagtggtaatggaagtgaagatgcttcaaaggacagtggagaaggttcctgtagtgattctgaagaaaatattttagaagaagaactgaatgaagatattaaagtaaaagaagaacaacttaaaaattctgcagaggaagaagtactatcatcagaaaaacaattaattaaaatggaaaagaaggaagaagaagaaaatggagaaagacctagaaagaaaaaggagaaagagaaggaaaaagaaaaggaaaaggagaaagagaaggaaagagagaaggaaaaagaaaaagcaacagtatctgagaatgtggctgcttctgctgctgccaccacaccagccacaagtcctcctgctgttaacacatccccttctgttcccactacgacaaccgctacagaggaacaagtcagcgagccaaaaaaatggaaccttcgacgaaaccgaccacttctggattttgtgtccatggaagagctgaatgacatggatgactatgacagtgaggatgacaatgattggcgacctactgtagtaaagagaaaagggagatctgcgtctcagaaagagggaagtgatggagacaatgaggatgatgaagatgagggaagcgggagtgatgaagacgagaatgatgaaggcaatgatgaagatcatagtagccctgccagtgaagggggttgcaagaagaagaagagtaaagttcttagcagaaacagtgctgatgatgaggaactgaccaatgatagcctgaccctatctcaaagcaagagtaatgaggactcgctgattcttgagaagagtcaaaactggagctctcaaaaaatggaccatattctgatttgctgtgtttgtctgggagataatagtgaggacgctgatgaaataattcagtgtgacaattgtggcattacagtccatgaaggttgttatggagttgatggagagagtgactctattatgagttcagcttctgaaaactccactgaaccttggttttgtgatgcctgtaaatgtggtgtttctcctagctgtgaactgtgtcctaatcaggatggaattttcaaggagacagatgctggaagatgggttcatattgtttgtgccctgtatgttcctggagtagcctttggagatattgacaaattacgaccagtaacactaacggaaatgaactattccaaatatggtgccaaggagtgtagcttttgtgaagaccctcgctttgctagaactggggtttgcattagctgtgatgcagggatgtgcagagcctatttccatgtgacctgtgctcaaaaggaaggtctgctttcagaggcagcggcggaagaggatatagcagatccattctttgcttattgtaagcaacatgcagataggttagacagaaagtggaagagaaaaaactacttggctctacagtcctattgtaaaatgtctttgcaagagagagagaagcaactatcaccagaagcacaggcaaggatcaatgcccggcttcagcagtatcgtgccaaagcagaactagctcgatctaccagaccccaggcctgggttccaagggaaaaattgcccagaccactcaccagcagtgcttcagctattcgtaaacttatgcggaaagcagaactcatggggatcagtacagatatctttccagtggacaattcagatactagttctagtgtggatggaaggagaaaacataagcaaccagctctcactgcagattttgtgaattattattttgagagaaatatgcgcatgattcaaattcaggaaaatatggctgaacaaaagaatataaaagataaattagagaatgaacaagaaaagcttcatgtagaatataataagctatgtgaatctttagaagaactacaaaacctgaatggaaaacttcgaagtgaaggacaaggaatatgggctttactaggcagaatcacagggcagaagttgaatataccggcaattttgcgagcacccaaggagagaaaaccaagtaaaaaagaaggaggcacacaaaagacatctactcttcctgcagtactttatagttgtgggatttgtaagaagaaccatgatcagcatcttcttttattgtgtgatacctgtaaactacattaccatcttggatgtctggatcctcctcttacaaggatgccaagaaagaccaaaaacagttattggcagtgctcggaatgtgaccaggcagggagcagtgacatggaagcagatatggccatggaaaccctaccagatggaaccaaacgatcaaggaggcagattaaggaaccagtgaaatttgttccacaggatgtgccaccagaacccaagaagattccgataagaaacacgagaaccagaggacgaaaacgaagcttcgttcctgaggaagaaaaacatgaggaaagagttcctagagagagaagacaaagacagtctgtgttgcaaaagaagcccaaggctgaagatttaagaactgaatgtgcaacttgcaagggaactggagacaatgaaaatcttgtcagatacccttcatgagacccaactctgccacagctcatcctcggaggcaatcccggaaacctcttttataagtgtgattttaaaaatgtggattaaactctcgatagagtacataaagtaaaggagaacagctatattgtcctttctataagcttgtcactgcaaaaagttgccttttgcttgtcaggtttggatagaatataattgattggtttgttacttggactaacaaggcagtagatttgcctgtgtggaattttttttcctatttttcttctttttgctttttttgcacttatcagaaatatttgatgtgtgcattgttgaaaaatactggatacatgtcttgtcagaattgtcgtattaagtaatgtctttccctcttgcttctttggcaaatgttgatacacagtgtttggacttactgaagagttactgaagcctgtgggacttaataaatacaatatgctactccctgttgtgattgaacaatacaaataacaaacaagaaagacaatgcattccattagtctgctattctgtttccttcaacttcatacatagattcatatatgaagtactgcattgtaaaacaactatagactcatattaaatgttatttctatttataatattcagcaaaagtgaaagacttgtgaagcatatgacattctatttttgacttattagtcctagtgtgaaagcattaatattattagcatgaaatttttacttcagattttaagctcatgaataaagatatatctgtgttgatctctagatatttttagtaatacccaaatatattcagtccttattgttttaatataagctttctgtgttcagtataattttatttttctcaaccttaaatatgaacttaggaaataaggagggaagtacaaagattattgactatacaacctaccagctgaaagaaagatcttcatcaacatctgtatctttccagaggtatacagaattaaaatttgatcttcaagctttaatgatccagttttaagtcaacggcagaagtatgttgaatatttcatcactcaatcttgaactgatttagaagagactctttgctgaaattgaattgcacttatacatgtaaattgtcaacatgtaatttggaattttctgattaataaatgtggttttggacatct

SEQ ID NO: 56372 - DNA, 3163 bp, Homo Sapiens
agtgcgcaggcgcaactgcctggctctgctcgctccggcgctccggcccagctctcgcggacaagtccagacatcgcgcgcccccccttctccgggtccgccccctcccccttctcggcgtcgtcgaagataaacaatagttggccggcgagcgcctagtgtgtctcccgccgccggattcggcgggctgcgtgggaccggcgggatcccggccagccggccatggcggggctgtactcgctgggagtgagcgtcttctccgaccagggcgggaggaagtacatggaggacgttactcaaatcgttgtggagcccgaaccgacggctgaagaaaagccctcgccgcggcggtcgctgtctcagccgttgcctccgcggccgtcgccggccgcccttcccggcggcgaagtctcggggaaaggcccagcggtggcagcccgagaggctcgcgaccctctcccggacgccggggcctcgccggcacctagccgctgctgccgccgccgttcctccgtggcctttttcgccgtgtgcgacgggcacggcgggcgggaggcggcacagtttgcccgggagcacttgtggggtttcatcaagaagcagaagggtttcacctcgtccgagccggctaaggtttgcgctgccatccgcaaaggctttctcgcttgtcaccttgccatgtggaagaaactggcggaatggccaaagactatgacgggtcttcctagcacatcagggacaactgccagtgtggtcatcattcggggcatgaagatgtatgtagctcacgtaggtgactcaggggtggttcttggaattcaggatgacccgaaggatgactttgtcagagctgtggaggtgacacaggaccataagccagaacttcccaaggaaagagaacgaatcgaaggacttggtgggagtgtaatgaacaagtctggggtgaatcgtgtagtttggaaacgacctcgactcactcacaatggacctgttagaaggagcacagttattgaccagattccttttctggcagtagcaagagcacttggtgatttgtggagctatgatttcttcagtggtgaatttgtggtgtcacctgaaccagacacaagtgtccacactcttgaccctcagaagcacaagtatattatattggggagtgatggactttggaatatgattccaccacaagatgccatctcaatgtgccaggaccaagaggagaaaaaatacctgatgggtgagcatggacaatcttgtgccaaaatgcttgtgaatcgagcattgggccgctggaggcagcgtatgctccgagcagataacactagtgccatagtaatctgcatctctccagaagtggacaatcagggaaactttaccaatgaagatgagttatacctgaacctgactgacagcccttcctataatagtcaagaaacctgtgtgatgactccttccccatgttctacaccaccagtcaagtcactggaggaggatccatggccaagggtgaattctaaggaccatatacctgccctggttcgtagcaatgccttctcagagaattttttagaggtttcagctgagatagctcgagagaatgtccaaggtgtagtcataccctcaaaagatccagaaccacttgaagaaaattgcgctaaagccctgactttaaggatacatgattctttgaataatagccttccaattggccttgtgcctactaattcaacaaacactgtcatggaccaaaaaaatttgaagatgtcaactcctggccaaatgaaagcccaagaaattgaaagaacccctccaacaaactttaaaaggacattagaagagtccaattctggccccctgatgaagaagcatagacgaaatggcttaagtcgaagtagtggtgctcagcctgcaagtctccccacaacctcacagcgaaagaactctgttaaactcaccatgcgacgcagacttaggggccagaagaaaattggaaatcctttacttcatcaacacaggaaaactgtttgtgtttgctgaaatgcatctgggaaatgaggtttttccaaacttaggatataagagggctttttaaatttggtgccgatgttgaactttttttaaggggagaaaattaaaagaaatatacagtttgactttttggaattcagcagttttatcctggccttgtacttgcttgtattgtaaatgtggattttgtagatgttagggtataagttgctgtaaaatttgtgtaaatttgtatccacacaaattcagtctctgaatacacagtattcagagtctctgatacacagtaattgtgacaatagggctaaatgtttaaagaaatcaaaagaatctattagattttagaaaaacatttaaactttttaaaatacttattaaaaaatttgtataagccacttgtcttgaaaactgtgcaactttttaaagtaaattattaagcagactggaaaagtgatgtattttcatagtgacctgtgtttcacttaatgtttcttagagccaagtgtcttttaaacattattttttatttctgatttcataattcagaactaaatttttcatagaagtgttgagccatgctacagttagtcttgtcccaattaaaatactatgcagtatctcttacatcagtagcatttttctaaaaccttagtcatcagatatgcttactaaatcttcagcatagaaggaagtgtgtttgcctaaaacaatctaaaacaattcccttctttttcatcccagaccaatggcattattaggtcttaaagtagttactcccttctcgtgtttgcttaaaatatgtgaagttttccttgctatttcaataacagatggtgctgctaattcccaacatttcttaaattattttatatcatacagttttcattgattatatgggtatatattcatctaataaatcagtgaactgttcctcatgttgctgaatttgtagttgttggtttattttaatggtatgtacaagttgagtatcccttatccaaaatgcttgggaccagaagtgtttcagattttttaaaattttggaatatttgctttatactgagcttttgagtgttcccaatctgaaattcaaaatgctctaatgagcatttcctttgagcatcatgcctgc

SEQ ID NO: 56373 - DNA, 3941 bp, Homo Sapiens
tcttacctcacaaaggtagctcctccgccggcagcaactcggcgcccgcggtccatggaccggaacctcgggccgacggacgggaacccgggccgcgatcgccgcctccccgcctcaggctcctcctcctcgctctccgccgcctccgccggactcccgcaggccctgcaccgccgccgccaggctagcggagctgccccgggaagctgggtgacgggttcgcggctgccgccggactgcggcctactccgccgcctctcagtgctattgtccctgggcctggccttgagcgggtccactggggaaggccgtgtgcgccggctccgcggaagatgccggaccaagccctacagcagatgctggacagaagttgctgggtttgttttgctactgatgaagatgatagaacagctgaatgggtgagaccatgcaggtgcagaggatctacaaaatgggttcaccaggcctgtctacaacgctgggtggatgaaaagcaaagaggaaacagtacagccagagtggcatgtcctcagtgcaatgctgaatacctaatagtttttccaaaattgggtccagtggtttacgtcttggatcttgcagatagactgatctcaaaagcctgtccatttgctgcagcaggaataatggtcggctctatctattggacagctgtgacttatggagcagtgacagtgatgcaggttgtaggtcataaagaaggtctggatgttatggagagagctgatcctttattccttttaattggacttcctactattcctgtcatgctgatattaggcaagatgattcgctgggaggactatgtgcttagactgtggcgcaaatactcgaataaactacaaattttaaatagtatatttccagggataggttgtcctgttcctcgaattccagctgaggccaatcctttagcagatcatgtctctgctactcgaatcttgtgtggagcccttgtctttcctactattgctacaatagttggtaaattgatgttcagtagtgttaactctaatttacaaaggacaatcttgggtggaattgcgtttgttgccataaaaggagcatttaaagtttacttcaaacagcagcaatatttacgacaggcacaccgcaaaattctgaattatccagaacaagaagaagcataaaactgacttctggttgttctgcagttctctcatccttatgaatctgttgtgttgttttgattccatcattaatgcacttgtggagacttgtgataagctgctgctcctatattttttaagaaatataataaagcacttagggcaggggaaatcatctcggtaatcatggaacctaaggatgtgatttgttttcattgtttgtatgtactacttttatggcagtcatatgaaccattatcttagcatggtaaacctgggttttgttcatattttctccagacagaaatgcaaagatcaaactgtgcaaatattaaaaaaatgcacatgctgttttattcaaatgcctcttttgtacatgttcatgtttagtgttttctcagaatcagcaactcaaggtactatgaggatttttctcactgacataatttgattacatactaaataagaggatatgttaatatgaggaaatgtaaattaaattagttataaataaataaccaaaaatgtatgtaaacattcaaatgattatctgaacaaatgagattttgtggtgttttctttaacccatgtgatgtcctccaaaatgtgtagggtaaaaattcacagggcttccagatcactttttcaatattaaattttatttacataatgttgacatctcatacttcatgaagtaattttgactcatgcagtcgtgtgtgtgtgtgtgtgtgtgtgtgtgtgtgtgtgtgtatttgtgtgtttcagtgtttcatcaggtccttccatctctgggagttttttcaacccatatttctagaaattacagctgccagtttatagtagtttgagcagaggatgatttgcaaaaataaaaataaagttattttactctcctcttgcattgattcagttattgagatattcgttgatcacctcctatttcccaggcactgtgcagagtgctgtaggacatagtggtgaacaagacagacttggtccaagctcttacagagttgacagtctagtttcagcacatagaaaaccagcagtgaataaaccaaggtgaggccttgagctctttgtttttatattaatgaggagaaaagtatgaaaacaagaagtcttaagtaaatattgaggtcattgtttttggcttaagtttattatagaaaatcaacactaatgtttttagattttaattgtcctattgatgaggctagcaccttaatcactgtttagttttgtattcatttttaaaagcaattattgaagccattttcaatagattggccattttaatgttcagcaacctgaatggttatttttgttaattaaaattaaatttttaagagatattttcaaaaccctatttattttcttgttcacagtaatgcatgtcaataataaatgtttccccttactgataagcggccactttaggagtgtagcaaatatagattgagctatgttagtttgcaataatatatgttaactttagtaattaaagactggtttctatagtatgaatgtcttaattttgagttatatgatgtttatttgaatgactgttgaacattcaaatttgtattatttggagatgaagatttgactaacagtgagccttattaagaacactactacagttctgaaggggaaatataacatctatggttatatattttaaaaacttagattataggctgtaattataaaatatattggcttttgttttcaatgtgaaagatacattaaatggacacatatcttgcaaaattttgttgtatagaacagtttttaggcagcctttactaaagttatgcaaacacacagttccccatttactacattaatgcccttgacagggagtagctgcttggttttataggtattagggctcatgaaggccggggaacaactctaatccttttggggcaggagggagggtttttttagggttgcggggagggaactgcaagtgcctgaggaccagagtggcctctagccccgaattgaacacttttaaacctaaagagccttattattattagctcgagaaataccacatgccagtcttcccaggaaggtgacctgcctgaccatgaagcaacaaaagagcataggcagacttaaagttggatagacctgggttcaaatcatagttcagctttcaataactgtatgtatgattttggctaaaggatttgactttctctcaactgcagttttcttaatctttgaaatgcaaataatgtttatctcagaagactatttctaggattaactgagagattaaaggaacagcagcacttaggctcaaaatcgcccctacaaagcagtagttgtttcttaattgctaagtaatctgtttgcactctaggaaaagtaaatggagaggtaaaagaaaggcattggggacaaatgaaagagatgatgtagatttttcggatgggtgggtatattttattttccagtttattttcatatttctttactgtgttatttctggaaactttaatgttttaaacctcttttataaaattcaatgacgactactagaattcttttcaaaagttaacttatctccaaagtggctgaaaatattgtttaccattacatgattatgaaatgactgtgaagaatataaaattaaacttagtgacttaattagtcactgccttgctaactttgctgtaatttttttaaacgtcttgtttttaatatagcaaactatctcaatactggctggattaggttaaataaagaatttttatgttcaaaaaaaaaaaaaaa

SEQ ID NO: 56374 - DNA, 4307 bp, Homo Sapiens; identical to SEQ ID NO: 30716

SEQ ID NO: 56375 - DNA, 3269 bp, Homo Sapiens
ggccagtccgcccggcggctcgcgcacggctccgcggtcccttttgcctgtccagccggccgcctgtccctgctccctccctccgtgaggtgtccgggttcccttcgcccagctctcccacccctacccgaccccggcgcccgggctcccagagggaactgcacttcggcagagttgaatgaatgaagacagacgcggagaactcctaaggaggagattggacaggctggactccccattgcttttctaaaaatcttggaaactttgtccttcattgaattacgacactgtccacctttaatttcctcgaaaacgcctgtaactcggctgaagcttcagtacctttatggacaactacagcacaggctacgacgtcaagccaccttgcttgtaccaaatgcccctgtccggacagcagtcctccattaaggtagaagacattcagatgcacaactaccagcaacacagccacctgcccccccagtctgaggagatgatgccgcactccgggtcggtttactacaagccctcctcgcccccgacgcccaccaccccgggcttccaggtgcagcacagccccatgtgggacgacccgggatctctccacaacttccaccagaactacgtggccactacgcacatgatcgagcagaggaaaacgccagtctcccgcctctccctcttctcctttaagcaatcgccccctggcaccccggtgtctagttgccagatgcgcttcgacgggcccctgcacgtccccatgaacccggagcccgccggcagccaccacgtggtggacgggcagaccttcgctgtgcccaaccccattcgcaagcccgcgtccatgggcttcccgggcctgcagatcggccacgcgtctcagctgctcgacacgcaggtgccctcaccgccgtcgcggggctccccctccaacgaggggctgtgcgctgtgtgtggggacaacgcggcctgccaacactacggcgtgcgcacctgtgagggctgcaaaggcttctttaagcgcacagtgcaaaaaaatgcaaaatacgtgtgtttagcaaataaaaactgcccagtggacaagcgtcgccggaatcgctgtcagtactgccgatttcagaagtgcctggctgttgggatggtcaaagaagtggttcgcacagacagtttaaaaggccggagaggtcgtttgccctcgaaaccgaagagcccacaggagccctctcccccttcgcccccggtgagtctgatcagtgccctcgtcagggcccatgtcgactccaacccggctatgaccagcctggactattccaggttccaggcgaaccctgactatcaaatgagtggagatgacacccagcatatccagcaattctatgatctcctgactggctccatggagatcatccggggctgggcagagaagatccctggcttcgcagacctgcccaaagccgaccaagacctgctttttgaatcagctttcttagaactgtttgtccttcgattagcatacaggtccaacccagtggagggtaaactcatcttttgcaatggggtggtcttgcacaggttgcaatgcgttcgtggctttggggaatggattgattccattgttgaattctcctccaacttgcagaatatgaacatcgacatttctgccttctcctgcattgctgccctggctatggtcacagagagacacgggctcaaggaacccaagagagtggaagaactgcaaaacaagattgtaaattgtctcaaagaccacgtgactttcaacaatggggggttgaaccgccccaattatttgtccaaactgttggggaagctcccagaacttcgtaccctttgcacacaggggctacagcgcattttctacctgaaattggaagacttggtgccaccgccagcaataattgacaaacttttcctggacactttacctttctaagacctcctcccaagcacttcaaaggaactggaatgataatggaaactgtcaagagggggcaagtcacatgggcagagatagccgtgtgagcagtctcagctcaagctgccccccatttctgtaaccctcctagcccccttgatccctaaagaaaacaaacaaacaaacaaaaactgttgctatttcctaacctgcaggcagaacctgaaagggcattttggctccggggcatcctggatttagaacatggactacacacaatacagtggtataaactttttattctcagtttaaaaatcagtttgttgttcagaagaaagattgctataatgtataatgggaaatgtttggccatgcttggttgttgcagttcagacaaatgtaacacacacacacatacacacacacacacacacacagagacacatcttaaggggacccacaagtattgccctttaacaagacttcaaagttttctgctgtaaagaaagctgtaatatatagtaaaactaaatgttgcgtgggtggcatgagttgaagaaggcaaaggcttgtaaatttacccaatgcagtttggctttttaaattattttgtgcctatttatgaataaatattacaaattctaaaagataagtgtgtttgcaaaaaaaaagaaaataaatacataaaaaagggacaagcatgttgattctaggttgaaaatgttataggcacttgctacttcagtaatgtctatattatataaatagtatttcagacactatgtagtctgttagattttataaagattggtagttatctgagcttaaacattttctcaattgtaaaataggtgggcacaagtattacacatcagaaaatcctgacaaaagggacacatagtgtttgtaacaccgtccaacattccttgtttgtaagtgttgtatgtaccgttgatgttgataaaaagaaagtttatatcttgattattttgttgtctaaagctaaacaaaacttgcatgcagcagcttttgactgtttccagagtgcttataatatacataactccctggaaataactgagcactttgaattttttttatgtctaaaattgtcagttaatttattattttgtttgagtaagaattttaatattgccatattctgtagtatttttctttgtatatttctagtatggcacatgatatgagtcactgcctttttttctatggtgtatgacagttagagatgctgattttttttctgataaattctttctttgagaaagacaattttaatgtttacaacaataaaccatgtaaatgaaaaaaaaaa

SEQ ID NO: 56376 - DNA, 3883 bp, Homo Sapiens
ttggttgcgcggtactagcggtgcccgccgaagggggaggaggcgaggagcgagccgtgcggccagagcgggaaagagactcgtctttgcgtccgagttctggagccgccgcaccccgactcctggggccgcggcagcggctgcgaggggacgggcgtccgctgtctcctgggttcccctcgtagcgacccgcgggatcggaaaaaaaggagaagatggaggaggagggtggcagcagcggcggcgccgcggggaccagcgcggacggcggcgacggaggagagcagctcctcactgtcaagcacgagctgcggactgctaatttgacaggacatgctgagaaggtgggaatagaaaattttgagctcctgaaggtcctaggaactggagcttatggaaaagtatttctagttcgtaaaataagtggccatgatactggaaagctgtatgccatgaaagttttgaaaaaggcaacaatcgttcaaaaggccaaaaccacagagcatacaaggacagaacgacaagtcctggaacacattaggcagtcgccatttttggtaacattacattatgctttccagacagaaaccaaacttcatctcattttagattatataaatggtggtgaactttttactcatctttctcaaagagagcgtttcacagagcatgaggtgcagatttatgttggagagattgtgcttgccctcgaacatctccacaagttggggattatatatcgtgatattaagcttgagaatattctacttgattctaatggccatgtggtgctgacagattttggtctgagtaaggagtttgtggctgatgaaactgaaagagcatattccttttgtggaactattgaatacatggcaccagatattgtcagagggggagattcaggacatgacaaggcagttgactggtggagtttgggtgttctaatgtatgaattactaactggagcatctcctttcactgttgatggagaaaaaaattcccaagctgagatatctaggagaatattaaaaagtgagcctccatatccccaagaaatgagtgctttagcgaaagacctaattcagcgtcttttgatgaaagatcccaagaagagattgggatgtggtccacgtgatgcagatgaaatcaaagaacatctcttctttcagaaaataaattgggatgatttagccgccaaaaaagtgcctgcaccatttaagccagtcattcgagatgaattagatgtgagtaactttgcagaagagttcacagaaatggatcccacttattctcccgcagccctgccccagagttctgagaagctgtttcagggctattcctttgttgctccttccatcctattcaagcgtaatgcagctgtcatagaccctcttcagtttcacatgggagttgaacgtcctggagtgacaaatgttgccaggagtgcaatgatgaaggactctccattctatcaacactatgacctagatttgaaggacaaacccctgggagaaggtagtttttcaatttgtcgaaagtgtgtgcataaaaaaagtaaccaagcttttgcagtcaaaataatcagcaaaaggatggaagccaatactcaaaaggaaataacagctctgaaactctgtgaaggacaccccaatattgtgaagttgcatgaagtttttcatgatcagcttcacacgtttctagtgatggaacttctgaatggaggagaactgtttgagcgcattaagaaaaagaagcacttcagtgagacggaagccagctacatcatgaggaagcttgtttcagctgtaagccacatgcatgatgttggagtggtgcacagggatctgaaacctgagaatttattgttcaccgatgaaaatgacaatttggaaattaaaataattgattttggatttgcacggctaaagccaccggataatcagcccctgaagactccatgcttcacccttcattatgccgccccagagctcttgaatcagaacggctacgatgagtcctgtgacctgtggagcttgggcgtcattttgtacacaatgttgtcaggacaggttcccttccaatctcatgaccgaagtttgacgtgtaccagcgcggtggaaatcatgaagaaaattaaaaagggagatttctcctttgaaggagaagcctggaagaatgtatcccaagaggctaaagatttgatccaaggacttctcacagtagatccaaacaaaaggcttaaaatgtctggcttgaggtacaatgaatggctacaagatggaagtcagctgtcctccaatcctctgatgactccggatattctaggatcttccggagctgccgtgcatacctgtgtgaaagcaaccttccacgcctttaacaaatacaagagagaggggttttgccttcagaatgttgataaggcccctttggctaagagaagaaaaatgaaaaagactagcaccagtaccgagacgcgcagcagttccagtgagagttcccattcttcttcctctcattctcacggtaaaactacacccaccaagacactgcagcccagcaatcctgccgacagcaataacccggagaccctcttccagttctcggactcagtagcttaggcatggtaggagtgtatcagtgatccattgcacctttattccctcagcatatgcctgaggcgatcttttatgcttttaaaaatgtttcccgttggtctcattggaatctgcctcctaatgatttttttcaggaaaacctgtttggttatcctcattcaaaagcactggacagagaatgttactgtgaatagagcacatattactctttttagcaacctagcatgatgccaacaagactattcttgaaagagcaaaggttcctgtaaatttaattagggctagatttgagctgcttgtaagtcacaggttttccagatgtctgccaacaagaaatgactcatactgtgatgataccttttgctttgccttgtggacaatgtgggtttttgaaatttgcacccttcaaacaatgatttatcagagaaaggggtctgttttcaaaaaagattctgtaatgaattttatgtgtggcatatacttatttcttgagagaagattttaacttattgtttttattttatggttacatatgatgataacctgctattattaaactttttctaaaaagtgaaaaaaaaaaaaaaagatataagaactcaaggtcccatactctgtattcgggatccatctgagatgcatgctaagctatgtgtatgtttttaattttgcactgctctttcctggcaatttgttttaatggttattgcagaatattaaggtacatgtctctctgttttaagtaatattgcactttataaaaaagtatgaataaagcaaactattttataaagtgcactgtttaaagcatttgcactgtatttttgccatttattttcattttctactttaaatttgtcctcacattcctcttctactttgtatgcaacaagtagaatggggcatgttgtgtcatgtagtcagccacttatgcaccaatgtgaggaaaacctaaagggaaattaaactaaacactgtgcttcatatttgtacactgtgttgtactacagtgaggaatttcctcctgtagtcatatattatgtacataatattttagaatcatacctatgacttgtttggaaatttttctgttaaattttaaatccagaaagcatattttataaacttatgcagagcacttttattgctcaaaagttctgaattcatacagaaaacaagtactatgtgatgaaaacatttcattaaaagattgctgcatttaaaaatacaattaattcgttccctatgcaaaaaaaaaaaaa

SEQ ID NO: 56377 - DNA, 2753 bp, Homo Sapiens
gtcgggggcagcagcaagatgcgaagcgagccgtacagatcccgggctctccgaacgcaacttcgccctgcttgagcgaggctgcggtttccgaggccctctccagccaaggaaaagctacacaaaaagcctggatcactcatcgaaccacccctgaagccagtgaaggctctctcgcctcgccctctagcgttcgtctggagtagcgccaccccggcttcctggggacacagggttggcaccatggggcccaccagcgtcccgctggtcaaggcccaccgcagctcggtctctgactacgtcaactatgatatcatcgtccggcattacaactacacgggaaagctgaatatcagcgcggacaaggagaacagcattaaactgacctcggtggtgttcattctcatctgctgctttatcatcctggagaacatctttgtcttgctgaccatttggaaaaccaagaaattccaccgacccatgtactattttattggcaatctggccctctcagacctgttggcaggagtagcctacacagctaacctgctcttgtctggggccaccacctacaagctcactcccgcccagtggtttctgcgggaagggagtatgtttgtggccctgtcagcctccgtgttcagtctcctcgccatcgccattgagcgctatatcacaatgctgaaaatgaaactccacaacgggagcaataacttccgcctcttcctgctaatcagcgcctgctgggtcatctccctcatcctgggtggcctgcctatcatgggctggaactgcatcagtgcgctgtccagctgctccaccgtgctgccgctctaccacaagcactatatcctcttctgcaccacggtcttcactctgcttctgctctccatcgtcattctgtactgcagaatctactccttggtcaggactcggagccgccgcctgacgttccgcaagaacatttccaaggccagccgcagctctgagaagtcgctggcgctgctcaagaccgtaattatcgtcctgagcgtcttcatcgcctgctgggcaccgctcttcatcctgctcctgctggatgtgggctgcaaggtgaagacctgtgacatcctcttcagagcggagtacttcctggtgttagctgtgctcaactccggcaccaaccccatcatttacactctgaccaacaaggagatgcgtcgggccttcatccggatcatgtcctgctgcaagtgcccgagcggagactctgctggcaaattcaagcgacccatcatcgccggcatggaattcagccgcagcaaatcggacaattcctcccacccccagaaagacgaaggggacaacccagagaccattatgtcttctggaaacgtcaactcttcttcctagaactggaagctgtccacccaccggaagcgctctttacttggtcgctggccaccccagtgtttggaaaaaaatctctgggcttcgactgctgccagggaggagctgctgcaagccagagggaggaagggggagaatacgaacagcctggtggtgtcgggtgttggtgggtagagttagttcctgtgaacaatgcactgggaagggtggagatcaggtcccggcctggaatatatattctacccccctggagctttgattttgcactgagccaaaggtctagcattgtcaagctcctaaagggttcatttggcccctcctcaaagactaatgtccccatgtgaaagcgtctctttgtctggagctttgaggagatgttttccttcactttagtttcaaacccaagtgagtgtgtgcacttctgcttctttagggatgccctgtacatcccacaccccaccctcccttcccttcatacccctcctcaacgttcttttactttatactttaactacctgagagttatcagagctggggttgtggaatgatcgatcatctatagcaaataggctatgttgagtacgtaggctgtgggaagatgaagatggtttggaggtgtaaaacaatgtccttcgctgaggccaaagtttccatgtaagcgggatccgttttttggaatttggttgaagtcactttgatttctttaaaaaacatcttttcaatgaaatgtgttaccatttcatatccattgaagccgaaatctgcataaggaagcccactttatctaaatgatattagccaggatccttggtgtcctaggagaaacagacaagcaaaacaaagtgaaaaccgaatggattaacttttgcaaaccaagggagatttcttagcaaatgagtctaacaaatatgacatccgtctttcccacttttgttgatgtttatttcagaatcttgtgtgattcatttcaagcaacaacatgttgtattttgttgtgttaaaagtacttttcttgatttttgaatgtatttgtttcaggaagaagtcattttatggatttttctaacccgtgttaacttttctagaatccaccctcttgtgcccttaagcattactttaactggtagggaacgccagaacttttaagtccagctattcattagatagtaattgaagatatgtataaatattacaaagaataaaaatatattactgtctctttagtatggttttcagtgcaattaaaccgagagatgtcttgtttttttaaaaagaatagtatttaataggtttctgacttttgtggatcattttgcacatagctttatcaacttttaaacattaataaactgatttttttaaag

SEQ ID NO: 56378 - DNA, 2209 bp, Homo Sapiens
cgcggcgcatgttcggcgtgtcggtcttcaggcgcctgatgagttcatagttgggcggtggtgtcagcggtttcgctggcgttcgtgggcctcccccggacccacacacggaaacacgcaaccattcggggatccagacgcccgtttacacgcaccacccctgggcgggctgtgcggctcaggccctcccccgggaccggcccgtgtcccgccccgtgtcccgccccgtatttgtgcggcgccagctggccccgcagcctgcggcgcagagaggctgggcttgcaggcgcagtagctccagaggtcgcgctgggctgagagtgcgggccggcagaggctggcggggagcagccggggttatgctgggcaaggattacatgctggccatcattctggtcaactgcgatgatgacttgtggggggaccacagtctggaggtggaggctggcctgcctcctggctggaggaagatccacgatgctgcaggtacttactactggcatgtacccagcggtagcacccagtggcagcgcccaacctgggaactaggagatgcagaggacccaggcacgggaacggaggggatctggggactgcggccccccaaagggagatccttctccagcctggagagttcactggaccggagtaactctctgtcctggtatggtggggaatcctacatccagagcatggagccaggggctaagtgctttgcagtccgctctctgggctgggtagaggtacctgaagaggacctggcaccggggaagagcagtattgcagtcaataactgtatccagcagctggcccagacccgcagccggagccagcctccagatggtgcctggggtgagggccagaacatgctgatgatcctgaagaaggatgccatgagcctagtgaatcccctggaccacagtctgatccactgccagcctctggtgcacatccgtgtgtggggcgtggggagctccaagggccgccccatctctgcccctgctagggacttcgcttttgtggcaagtgacaaagatagctgtatgctcaagtgccatgtgtttcgctgtgatgtccctgccaaggccattgccagtgccctacatgggctttgtgcccagatcttgtcagagcgagtagaggtcagtggtgatgcctcttgctgctccccagaccccatctctcctgaagacctgccacggcaagtggagctgctggatgcggtaagccaagctgctcagaagtacgaggcactgtatatggggacactgccagtcaccaaggccatgggcatggatgtgctgaacgaggccattggtaccctcaccgccaggggggaccggaatgcctgggtccccaccatgctcagtgtgtctgactctctcatgactgcacatcccattcaggcagaggccagtacagaggaggagccattgtggcagtgccctgtgcgccttgtgacatttattggtgttggccgcgacccacacacctttggcctcatcgctgacctgggccgtcagagcttccagtgcgcagccttctggtgccagccccatgcagggggactctctgaagctgtgcaggctgcctgtatggttcagtaccagaagtgtcttgtggcctctgcagctcgaggcaaggcctggggtgcccaggcccgtgcccgcctgcggctcaagcggaccagctccatggattccccaggaggtcccctgcccctccccctgctcaaaggaggggttggcggtgcaggggcaacccctcgaaagcggggtgtcttctcttttcttgatgccttccggctgaaaccctctctgctccatatgccctaaacttatctgggaaggctggggaagtaggctctgggtccatgcctaactctgtaccgttttattcctcaaggcctatagcctgtcactccttgaagccttctctgcctgtccctccgatccttgtccaccgtctatttattgcccaatttattgtttatacggatgactgggaggcactgcaccacaacgtaggaccctggctcccctttccttgggtccttgtgttccttgcccctgtccaaccctggacagttggctctacctcagtaacactttatagcaaaatcagtgcaaataaaaatccctcagtgacctcaaaaaaaaaaaaaaaaaaaaaaaaaaaaaaaaaaaaaaaaaaaaaaaaaaaaaaaaaa

SEQ ID NO: 56379 - DNA, 2583 bp, Homo Sapiens; identical to SEQ ID NO: 30652

SEQ ID NO: 56380 - DNA, 2306 bp, Homo Sapiens; identical to SEQ ID NO: 29339

SEQ ID NO: 56381 - DNA, 15720 bp, Homo Sapiens
caacccacaccgcccctgccagccaccatggggctgccactagcccgcctggcggctgtgtgcctggccctgtctttggcagggggctcggagctccagacagagggcagaacccgataccacggccgcaacgtctgcagcacctggggcaacttccactacaagaccttcgacggggacgtcttccgcttccccggcctctgcgactacaacttcgcctccgactgccgaggctcctacaaggaatttgctgtgcacctgaagcggggtccgggccaggctgaggcccccgccggggtggagtccatcctgctgaccatcaaggatgacaccatctacctcacccgccacctggctgtgcttaacggggccgtggtcagcaccccgcactacagccccgggctgctcattgagaagagcgatgcctacaccaaagtctactcccgcgccggcctcaccctcatgtggaaccgggaggatgcactcatgctggagctggacactaagttccggaaccacacctgtggcctctgcggggactacaacggcctgcagagctattcagaattcctctctgacggcgtgctcttcagtcccctggagtttgggaacatgcagaagatcaaccagcccgatgtggtgtgtgaggatcccgaggaggaggtggcccccgcatcctgctccgagcaccgcgccgagtgtgagaggctgctgaccgccgaggccttcgcggactgtcaggacctggtgccgctggagccgtatctgcgcgcctgccagcaggaccgctgccggtgcccgggcggtgacacctgcgtctgcagcaccgtggccgagttctcccgccagtgctcccacgccggcggccggcccgggaactggaggaccgccacgctctgccccaagacctgccccgggaacctggtgtacctggagagcggctcgccctgcatggacacctgctcacacctggaggtgagcagcctgtgcgaggagcaccgcatggacggctgtttctgcccagaaggcaccgtatatgacgacatcggggacagtggctgcgttcctgtgagccagtgccactgcaggctgcacggacacctgtacacaccgggccaggagatcaccaatgactgcgagcagtgtgtctgtaacgctggccgctgggtgtgcaaagacctgccctgccccggcacctgtgccctggaaggcggctcccacatcaccaccttcgatgggaagacgtacaccttccacggggactgctactatgtcctggccaagggtgaccacaacgattcctacgctctcctgggcgagctggccccctgtggctccacagacaagcagacctgcctgaagacggtggtgctgctggctgacaagaagaagaatgcggtggtcttcaagtccgatggcagtgtactgctcaaccagctgcaggtgaacctgccccacgtgaccgcgagcttctctgtcttccgcccgtcttcctaccacatcatggtgagcatggccattggcgtccggctgcaggtgcagctggccccagtcatgcaactctttgtgacactggaccaggcctcccaggggcaggtgcagggcctctgcgggaacttcaacggcctggaaggtgacgacttcaagacggccagcgggctggtggaggccacgggggccggctttgccaacacctggaaggcacagtcaacctgccatgacaagctggactggttggacgatccctgctccctgaacatcgagagcgccaactacgccgagcactggtgctccctcctgaagaagacagagaccccctttggcaggtgccactcggctgtggaccctgctgagtattacaagaggtgcaaatatgacacgtgtaactgtcagaacaatgaggactgcctgtgcgccgccctgtcctcctacgcgcgcgcctgcaccgccaagggcgtcatgctgtggggctggcgggagcatgtctgcaacaaggatgtgggctcctgccccaactcgcaggtcttcctgtacaacctgaccacctgccagcagacctgccgctccctctccgaggccgacagccactgtctcgagggctttgcgcctgtggacggctgcggctgccctgaccacaccttcctggacgagaagggccgctgcgtacccctggccaagtgctcctgttaccaccgcggtctctacctggaggcgggggatgtggtcgtcaggcaggaagaacgatgtgtgtgccgggatgggcggctgcactgtaggcagatccggctgatcggccagagctgcacggccccaaagatccacatggactgcagcaacctgactgcactggccacctcgaagccccgagccctcagctgccagacgctggccgccggctattaccacacagagtgtgtcagtggctgtgtgtgccccgacgggctgatggatgacggccggggtggctgcgtggtggagaaggaatgcccttgcgtccataacaacgacctgtattcttccggcgccaagatcaaggtggactgcaatacctgcacctgcaagagaggacgctgggtgtgcacccaggctgtgtgccatggcacctgctccatttacgggagtggccactacatcacctttgatgggaagtactacgactttgacggacactgctcctacgtggctgttcaggactactgcggccagaactcctcactgggctcattcagcatcatcaccgagaacgtcccctgtggcactacgggcgtcacctgctccaaggccatcaagatcttcatggggaggacggagctgaagttggaagacaagcaccgtgtggtgatccagcgtgatgagggtcaccacgtggcctacaccacgcgggaggtgggccagtacctggtggtggagtccagcacgggcatcatcgtcatctgggacaagaggaccaccgtgttcatcaagctggctccctcctacaagggcaccgtgtgtggcctgtgtgggaactttgaccaccgctccaacaacgacttcaccacgcgggaccacatggtggtgagcagcgagctggacttcgggaacagctggaaggaggcccccacctgcccagatgtgagcaccaaccccgagccctgcagcctgaacccgcaccgccgctcctgggccgagaagcagtgcagcatcctcaaaagcagcgtgttcagcatctgccacagcaaggtggaccccaagcccttctacgaggcctgtgtgcacgactcgtgctcctgtgacacgggtggggactgtgagtgcttctgctctgccgtggcctcctacgcccaggagtgtaccaaagagggggcctgcgtgttctggaggacgccggacctgtgccccatattctgcgactactacaaccctccgcatgagtgtgagtggcactatgagccatgtgggaaccggagcttcgagacctgcaggaccatcaacggcatccactccaacatctccgtgtcctacctggagggctgctacccccggtgccccaaggacaggcccatctatgaggaggatctgaagaagtgtgtcactgcagacaagtgtggctgctatgtcgaggacacccactacccacctggagcatcggttcccaccgaggagacctgcaagtcctgcgtgtgtaccaactcctcccaagtcgtctgcaggccggaggaaggaaagattcttaaccagacccaggatggcgccttctgctactgggagatctgtggccccaacgggacggtggagaagcacttcaacatctgttccattacgacacgcccgtccaccctgaccaccttcaccaccatcaccctccccaccacccccacctccttcaccactaccaccaccaccaccaccccgacctccagcacagttttatcaacaactccgaagctgtgctgcctctggtctgactggatcaatgaggaccaccccagcagtggcagcgacgacggtgaccgagaaccatttgatggggtctgcggggcccctgaggacatcgagtgcaggtcggtcaaggatccccacctcagcttggagcagcatggccagaaggtgcagtgtgatgtctctgttgggttcatttgcaagaatgaagaccagtttggaaatggaccatttggactgtgttacgactacaagatacgtgtcaattgttgctggcccatggataagtgtatcaccactcccagccctccaactaccactcccagccctccaccaaccacgacgaccacccttccaccaaccaccacccccagccctccaaccaccaccacaaccacccctccaccaaccaccacccccagccctccaataaccaccacgaccacccctctaccaaccaccactcccagccctccaataagcaccacaaccacccctccaccaaccaccactcccagccctccaaccaccactcccagccctccaaccaccactcccagccctccaacaaccaccacaaccacccctccaccaaccaccactcccagccctccaatgactacgcccatcactccaccagccagcactaccacccttccaccaaccaccactcccagccctccaacaaccaccacaaccacccctccaccaaccaccactcccagtcctccaacgactacgcccatcactccaccaaccagcactactacccttccaccaaccaccactcccagccctccaccaaccaccacaaccacccctccaccaaccaccactcccagccctccaacaaccaccactcccagtcctccaacaatcaccacaaccacccctccaccaaccaccactcccagccctccaacaacgaccacaaccacccctccaccaaccaccactcccagccctccaacgactacacccatcactccaccaaccagcactaccacccttccaccaaccaccactcccagccctccaccaaccaccacaaccacccctccaccaaccaccactcccagccctccaacaaccaccactcccagccctccaataaccaccacaaccacccctccaccaaccaccactcccagctctccaataaccaccactcccagccctccaacaaccaccatgaccaccccttcaccaaccaccacccccagctctccaataaccaccacaaccaccccttcctcaactaccactcccagccctccaccaaccaccatgaccaccccttcaccaaccaccactcccagccctccaacaaccaccatgaccacccttccaccaaccaccacttccagccctctaacaactactcctctacctccatcaataactcctcctacattttcaccattctcaacgacaacccctactaccccatgcgtgcctctctgcaattggactggctggctggattctggaaaacccaactttcacaaaccaggtggagacacagaattgattggagacgtctgtggaccaggctgggcagctaacatctcttgcagagccaccatgtatcctgatgttcccattggacagcttggacaaacagtggtgtgtgatgtctctgtggggctgatatgcaaaaatgaagaccaaaagccaggtggggtcatccctatggccttctgcctcaactacgagatcaacgttcagtgctgtgagtgtgtcacccaacccaccaccatgacaaccaccaccacagagaacccaactccgccaaccacgacacccatcaccaccaccactacggtgaccccaaccccaacacccaccggcacacagaccccaaccacgacacccatcaccaccaccactacggtgaccccaaccccaacacccaccggcacacagaccccaaccacgacacccatcaccaccaccactacggtgaccccaaccccaacacccaccggcacacagaccccaaccacgacacccatcaccaccaccactacggtgaccccaaccccaacacccaccggcacacagaccccaaccacgacacccatcaccaccaccactacggtgaccccaaccccaacacccaccggcacacagaccccaaccacgacacccatcaccaccaccactacggtgaccccaaccccaacacccaccggcacacagaccccaaccacgacacccatcaccaccaccactacggtgaccccaaccccaacacccaccggcacacagaccccaaccacgacacccatcaccaccaccactacggtgaccccaaccccaacacccaccggcacacagaccccaaccacgacacccatcaccaccaccactacggtgaccccaaccccaacacccaccggcacacagaccccaaccacgacacccatcaccaccaccactacggtgaccccaaccccaacacccaccggcacacagaccccaaccacgacacccatcaccaccaccactacggtgaccccaaccccaacacccaccggcacacagaccccaaccacgacacccatcaccaccaccactacggtgaccccaaccccaacacccaccggcacacagaccccaaccacgacacccatcaccaccaccactacggtgaccccaaccccaacacccaccggcacacagaccccaaccacgacacccatcaccaccaccactacggtgaccccaaccccaacacccaccggcacacagaccccaaccacgacacccatcaccaccaccactacggtgaccccaaccccaacacccaccggcacacagaccccaaccacgacacccatcaccaccaccactacggtgaccccaaccccaacacccaccggcacacagaccccaaccacgacacccatcaccaccaccactacggtgaccccaaccccaacacccaccggcacacagaccccaaccacgacacccatcaccaccaccactacggtgaccccaaccccaacacccaccggcacacagaccccaaccacgacacccatcaccaccaccactacggtgaccccaaccccaacacccaccggcacacagaccccaaccacgacacccatcaccaccaccactacggtgaccccaaccccaacacccaccggcacacagaccccaaccacgacacccatcaccaccaccactacggtgaccccaaccccaacacccaccggcacacagaccccaaccacgacacccatcaccaccaccactacggtgaccccaaccccaacacccaccggcacacagaccccaaccacgacacccatcaccaccaccactacggtgaccccaaccccaacacccaccggcacacagaccccaaccacgacacccatcaccaccaccactacggtgaccccaaccccaacacccaccggcacacagaccccaaccacgacacccatcaccaccaccactacggtgaccccaaccccaacacccaccggcacacagaccccaaccacgacacccatcaccaccaccactacggtgaccccaaccccaacacccaccggcacacagaccccaaccacgacacccatcaccaccaccactacggtgaccccaaccccaacacccaccggcacacagaccccaaccacgacacccatcaccaccaccactacggtgaccccaaccccaacacccaccggcacacagaccccaaccacgacacccatcaccaccaccactacggtgaccccaaccccaacacccaccggcacacagaccccaaccacgacacccatcaccaccaccactacggtgaccccaaccccaacacccaccggcacacagaccccaaccacgacacccatcaccaccaccactacggtgaccccaaccccaacacccaccggcacacagaccccaaccacgacacccatcaccaccaccactacggtgaccccaaccccaacacccaccggcacacagaccccaaccacgacacccatcaccaccaccactacggtgaccccaaccccaacacccaccggcacacagaccccaaccacgacacccatcaccaccaccactacggtgaccccaaccccaacacccaccggcacacagaccccaaccacgacacccatcaccaccaccactacggtgaccccaaccccaacacccaccggcacacagaccccaaccacgacacccatcaccaccaccactacggtgaccccaaccccaacacccaccggcacacagaccccaaccacgacacccatcaccaccaccactacggtgaccccaaccccaacacccaccggcacacagaccccaaccacgacacccatcaccaccaccactacggtgaccccaaccccaacacccaccggcacacagaccccaaccacgacacccatcaccaccaccactacggtgaccccaaccccaacacccaccggcacacagaccccaaccacgacacccatcaccaccaccactacggtgaccccaaccccaacacccaccggcacacagaccccaaccacgacacccatcaccaccaccactacggtgaccccaaccccaacacccaccggcacacagaccccaaccacgacacccatcaccaccaccactacggtgaccccaaccccaacacccaccggcacacagaccccaaccacgacacccatcaccaccaccactacggtgaccccaaccccaacacccaccggcacacagaccccaaccacgacacccatcaccaccaccactacggtgaccccaaccccaacacccaccggcacacagaccccaaccacgacacccatcaccaccaccactacggtgaccccaaccccaacacccaccggcacacagaccccaaccacgacacccatcaccaccaccactacggtgaccccaaccccaacacccaccggcacacagaccccaaccacgacacccatcaccaccaccactacggtgaccccaaccccaacacccaccggcacacagaccccaaccacgacacccatcaccaccaccactacggtgaccccaaccccaacacccaccggcacacagaccccaaccacgacacccatcaccaccaccactacggtgaccccaaccccaacacccaccggcacacagaccccaaccacgacacccatcaccaccaccactacggtgaccccaaccccaacacccaccggcacacagaccccaaccacgacacccatcaccaccaccactacggtgaccccaaccccaacacccaccggcacacagaccccaaccacgacacccatcaccaccaccactacggtgaccccaaccccaacacccaccggcacacagaccccaaccacgacacccatcaccaccaccactacggtgaccccaaccccaacacccaccggcacacagaccccaaccacgacacccatcaccaccaccactacggtgaccccaaccccaacacccaccggcacacagaccccaaccacgacacccatcaccaccaccactacggtgaccccaaccccaacacccaccggcacacagaccccaaccacgacacccatcaccaccaccactacggtgaccccaaccccaacacccaccggcacacagaccccaaccacgacacccatcaccaccaccactacggtgaccccaaccccaacacccaccggcacacagaccccaaccacgacacccatcaccaccaccactacggtgaccccaaccccaacacccaccggcacacagaccccaaccacgacacccatcaccaccaccactacggtgaccccaaccccaacacccaccggcacacagaccccaaccacgacacccatcaccaccaccactacggtgaccccaaccccaacacccaccggcacacagaccccaaccacgacacccatcaccaccaccactacggtgaccccaaccccaacacccaccggcacacagaccccaaccacgacacccatcaccaccaccactacggtgaccccaaccccaacacccaccggcacacagaccccaaccacgacacccatcaccaccaccactacggtgaccccaaccccaacacccaccggcacacagaccccaaccacgacacccatcaccaccaccactacggtgaccccaaccccaacacccaccggcacacagaccccaaccacgacacccatcaccaccaccactacggtgaccccaaccccaacacccaccggcacacagaccccaaccacgacacccatcaccaccaccactacggtgaccccaaccccaacacccaccggcacacagaccccaaccacgacacccatcaccaccaccactacggtgaccccaaccccaacacccaccggcacacagaccccaaccacgacacccatcaccaccaccactacggtgaccccaaccccaacacccaccggcacacagaccccaaccacgacacccatcaccaccaccactacggtgaccccaaccccaacacccaccggcacacagaccccaaccacgacacccatcaccaccaccactacggtgaccccaaccccaacacccaccggcacacagaccccaaccacgacacccatcaccaccaccactacggtgaccccaaccccaacacccaccggcacacagaccccaaccacgacacccatcaccaccaccactacggtgaccccaaccccaacacccaccggcacacagaccccaaccacgacacccatcaccaccaccactacggtgaccccaaccccaacacccaccggcacacagaccccaaccacgacacccatcaccaccaccactacggtgaccccaaccccaacacccaccggcacacagaccccaaccacgacacccatcaccaccaccactacggtgaccccaaccccaacacccaccggcacacagaccccaaccacgacacccatcaccaccaccactacggtgaccccaaccccaacacccaccggcacacagaccccaaccacgacacccatcaccaccaccactacggtgaccccaaccccaacacccaccggcacacagaccccaaccacgacacccatcaccaccaccactacggtgaccccaaccccaacacccaccggcacacagaccccaaccacgacacccatcaccaccaccactacggtgaccccaaccccaacacccaccggcacacagaccccaaccacgacacccatcaccaccaccactacggtgaccccaaccccaacacccaccggcacacagaccccaaccacgacacccatcaccaccaccactacggtgaccccaaccccaacacccaccggcacacagaccccaaccacgacacccatcaccaccaccactacggtgaccccaaccccaacacccaccggcacacagaccccaaccacgacacccatcaccaccaccactacggtgaccccaaccccaacacccaccggcacacagaccccaaccacgacacccatcaccaccaccactacggtgaccccaaccccaacacccaccggcacacagaccccaaccacgacacccatcaccaccaccactacggtgaccccaaccccaacacccaccggcacacagaccccaaccacgacacccatcaccaccaccactacggtgaccccaaccccaacacccaccggcacacagaccccaaccacgacacccatcaccaccaccactacggtgaccccaaccccaacacccaccggcacacagaccccaaccacgacacccatcaccaccaccactacggtgaccccaaccccaacacccaccggcacacagaccccaaccacgacacccatcaccaccaccactacggtgaccccaaccccaacacccaccggcacacagaccccaaccacgacacccatcaccaccaccactacggtgaccccaaccccaacacccaccggcacacagaccccaaccacgacacccatcaccaccaccactacggtgaccccaaccccaacacccaccggcacacagaccccaaccacgacacccatcaccaccaccactacggtgaccccaaccccaacacccaccggcacacagaccccaaccacgacacccatcaccaccaccactacggtgaccccaaccccaacacccaccggcacacagaccccaaccacgacacccatcaccaccaccactacggtgaccccaaccccaacacccaccggcacacagaccccaaccacgacacccatcaccaccaccactacggtgaccccaaccccaacacccaccggcacacagaccccaaccacgacacccatcaccaccaccactacggtgaccccaaccccaacacccaccggcacacagaccccaaccacgacacccatcaccaccaccactacggtgaccccaaccccaacacccaccggcacacagaccccaaccacgacacccatcaccaccaccactacggtgaccccaaccccaacacccaccggcacacagaccccaaccacgacacccatcaccaccaccactacggtgaccccaaccccaacacccaccggcacacagaccccaaccacgacacccatcaccaccaccactacggtgaccccaaccccaacacccaccggcacacagaccgggccccccacccacacaagcacagcaccgattgctgagttgaccacatccaatcctccgcctgagtcctcaacccctcagacctctcggtccacctcttcccctctcacggagtcaaccacccttctgagtaccctaccacctgccattgagatgaccagcacggccccaccctccacacccacggcacccacgaccacgagcggaggccacacactgtctccaccgcccagcaccaccacgtcccctccaggcacccccactcgcggtaccacgaccgggtcatcttcagcccccacccccagcactgtgcagacgaccaccaccagtgcctggaccccaacgccgaccccactctccacacccagcatcatcaggaccacaggcctgaggccctacccttcctctgtgcttatctgctgtgtcctgaacgacacctactacgcaccaggtgaggaggtgtacaacggcacatacggagacacctgttatttcgtcaactgctcactgagctgtacgttggagttctataactggtcctgcccatccacgccctccccaacacccacgccctccaagtcgacgcccacgccttccaagccatcgtccacgccctccaagccgacgcccggcaccaagccccccgagtgcccagactttgatcctcccagacaggagaacgagacttggtggctgtgcgactgcttcatggccacgtgcaagtacaacaacacggtggagatcgtgaaggtggagtgtgagccgccgcccatgcccacctgctccaacggcctccaacccgtgcgcgtcgaggaccccgacggctgctgctggcactgggagtgcgactgctactgcacgggctggggcgacccgcactatgtcaccttcgacggactctactacagctaccagggcaactgcacctacgtgctggtggaggagatcagcccctccgtggacaacttcggagtttacatcgacaactaccactgcgatcccaacgacaaggtgtcctgtccccgcaccctcatcgtgcgccacgagacccaggaggtgctgatcaagaccgtgcatatgatgcccatgcaggtgcaggtgcaggtgaacaggcaggcggtggcactgccctacaagaagtacgggctggaggtgtaccagtctggcatcaactacgtggtggacatccccgagctgggtgtcctcgtctcctacaatggcctgtccttctccgtcaggctgccctaccaccggtttggcaacaacaccaagggccagtgtggcacctgcaccaacaccacctccgacgactgcattctgcccagcggggagatcgtctccaactgtgaggctgcggctgaccagtggctggtgaacgacccctccaagccacactgcccccacagcagctccacgaccaagcgcccggccgtcactgtgcccgggggcggtaaaacgaccccacacaaggactgcaccccatctcccctctgccagctcatcaaggacagcctgtttgcccagtgccacgcactggtgcccccgcagcactactacgatgcctgcgtgttcgacagctgcttcatgccgggctcgagcctggagtgcgccagtctgcaggcctacgcagccctctgtgcccagcagaacatctgcctcgactggcggaaccacacgcatggggcctgcttggtggagtgcccatctcacagggagtaccaggcctgtggccctgcagaagagcccacgtgcaaatccagctcctcccagcagaacaacacagtcctggtggaaggctgcttctgtcctgagggcaccatgaactacgctcctggctttgatgtctgcgtgaagacctgcggctgtgtgggacctgacaatgtgcccagagagtttggggagcacttcgagttcgactgcaagaactgtgtctgcctggagggtggaagtggcatcatctgccaacccaagaggtgcagccagaagcccgttacccactgcgtggaagacggcacctacctcgccacggaggtcaaccctgccgacacctgctgcaacattaccgtctgcaagtgcaacaccagcctgtgcaaagagaagccctccgtgtgcccgctgggattcgaagtgaagagcaagatggtgcctggaaggtgctgtcccttctactggtgtgagtccaagggggtgtgtgttcacgggaatgctgagtaccagcccggttctccagtttattcctccaagtgccaggactgcgtgtgcacggacaaggtggacaacaacaccctgctcaacgtcatcgcctgcacccacgtgccctgcaacacctcctgcagccctggcttcgaactcatggaggcccccggggagtgctgtaagaagtgtgaacagacgcactgtatcatcaaacggcccgacaaccagcacgtcatcctgaagcccggggacttcaagagcgacccgaagaacaactgcacattcttcagctgcgtgaagatccacaaccagctcatctcgtccgtctccaacatcacctgccccaactttgatgccagcatttgcatcccgggctccatcacattcatgcccaatggatgctgcaagacctgcacccctcgcaatgagaccagggtgccctgctccaccgtccccgtcaccacggaggtttcgtacgccggctgcaccaagaccgtcctcatgaatcattgctccgggtcctgcgggacatttgtcatgtactcggccaaggcccaggccctggaccacagctgctcctgctgcaaagaggagaaaaccagccagcgtgaggtggtcctgagctgccccaatggcggctcgctgacacacacctacacccacatcgagagctgccagtgccaggacaccgtctgcgggctccccaccggcacctcccgccgggcccggcgctcccctaggcatctggggagcgggtgagcggggtgggcacagcccccttcactgccctcgacagctttacctcccccggaccctctgagcctcctaagctcggcttcctctcttcagatatttattgtctgagtctttgttcagtccttgctttccaataataaactcagggggacatgc

SEQ ID NO: 56382 - DNA, 2959 bp, Homo Sapiens
cacttccgcgtccgccccgcggcgtccggcggccgcgccgagggtctggcgggccgcaggtcagtctgggaagctgccgacccgccccacccccccggtgcggaagagccgggcgcgggatgggccgcgggcccggaaggcggcggggcgccctgaggaagggcacgggccgcgctggtaacgcgcgcgccccgggctgcaggctcgggcttcgggccgatttggggtctccaggccgcggaagaccgtggcggggctttctggctccccagctcctcccggctcttcccgcttcggaagaggagtgtgagccccttgagcgatgtttttcaaagtggggttcgcgggcagatcccgacccctcctcagactttctgaggaactgtgtgctgtggccggagtgtcttcgttttcccaagcgtccctgatggttttgatgcagagggagaccaagacatcattgttttgaagtttctgaaagtgttgggcggcaaaaattcaggtgcctgggggagaaatggaaggccacaaggcagaagaagaggtgctagatgttctccgactgaacgtgggtggctgtatttacacagcccggcgggagtccttgtgccgcttcaaggactccatgttggcatctatgttcagtggtcgctttcctctaaaaacagatgagtcaggggcttgtgttattgaccgtgatggacgtctatttaaataccttttggattaccttcatggagaagttcagattcccacagatgagcaaacccgcatcgccctacaggaagaggctgattactttggcatcccttatccatacagcctgtctgaccatttggccaatgaaatggagacatattctttaaggtcaaatatagaacttaaaaaggctttaacagacttctgtgattcatatggcttagtctgcaataaaccaacagtttgggttctccactatcttaacacatctggtgcaagctgtgagagtagaattattggtgtatatgccacaaaaactgatggaacagacgctattgaaaagcagctgggaggaagaattcacagcaaaggcatttttaaaagagaggcgggaaataatgttcagtacatttggagctattattcagtagcagagttgaagaaaatgatggatgcctttgatgcttgggaaggaaaaggtgttagctactggcgggtgcctcatgagctgatagagtgttggactctagaagaacggcctttacttggaagcctgcgtcacatggctccaattcgaaagaggcgactgataacgttcaatgaagcggacgaaagtgtgaactataagactggtcctaagccagttagatttttgggcccttccacaagtacccaaattaaagtcaagaactcggcctcagtcacggtgtctccagccagtgccatccagacgtcggctggggcgacagcaaaccggtttcaaagtggtagccgcagaaaggcagctcagcgctctgcaccttccagagccacggccctggtgggcacgggggcacctgggcatcctcaggcttcccctggggctgcgagcgctgaaaatggaggcacgcacttacctccagctaaggtgctactctccgacaagaagcctacaccccagcgggtgataaagctgaagaggactccgctgtgcgccaccgcgccttgcctgccctcccccacggccacgaggcaggccaactccctcaagccgcttcccggcgaagctgcccgtgccttgggagtgcggactgagaacgggaagaacaagggaaattgatgaaagtggtggacttgaaatttcccgttcatctcccaaagctttcaacccattcgacgcaaagaagtgacactttcttaatgcagcagaggggaagcttaggtttatgttgaggattctgttcctggaattgtgtgagctaggaatggaggaggggagactttcaatggttaaggctccatttctcattttcccaacttttatatgattgtctatgggcagtttgaatttctggttttcaatttattttttaatgattaattcgtattaaggcaacaagacagtacaacaaataatctctagagaggtccactttgttgctgaagtaaacgttacttgttgcaacccgaggatgggcatgaggtttggccttaggtattcctgtctgggaaaatggagggggtgatattagtggttccctgtactatatcacagccaagagagattagagagagaaaatgtagatcaaggcgagctgcctacaaattactctgtctccaaaggcaacgtgaaaagaaatgatggggaggaaaaaaccccatagattgaattagcactttgactctcacttaattcaacgattttctttcctagattggcttttcttactcttttctgttagtagatttatttataaacaccacaagaagatctcttgggatcagaattatataatatctttgaagtaaattattaaaatatcctatttaatttgaatagtgaagttttgaaaatactttgaaaaagagaagtaaaagtttaactttttaactaaagttagtatttgtttttcagaaatgaccactgaagattcattctgattatacaatatgatttttatgcataaaatttccatgtaacttgaatttaatatttttaaacagaatattttgactaatcctctattttttcatgactattcagttgtgtgtgtttattcgtaaatgttatgttttgtaattggatcacatatttctactttcagtgagagtatgccttcactatgttaaaaaataagctcataaaacagggtactttttattcaaatgcttatcattgtactttcattgctttgaaagagtaaagtaagtatactcaaaacattacgttttacaaaatcaaataaaacttttccataaaaaaaaaaaaaaaaaaaaaaaa

SEQ ID NO: 56383 - DNA, 2821 bp, Homo Sapiens; identical to SEQ ID NO: 30897

SEQ ID NO: 56384 - DNA, 2530 bp, Homo Sapiens
aaaacaggagctgattcgagctggcagagctgggccatggaaccggtagagacctggacccccggaaaggtggcaacttggctgagaggtcttgacgactccctgcaggactatccctttgaggactggcagctgcctggcaagaacctgctccagctctgcccccaaagcctcgaggctctggctgtgcggtctctgggacaccaggagctcatcctgggcggggtggaacagctccaggccctgagctccaggctacagacagagaacctgcaaagcctgacagagggacttctgggggcaacccatgacttccagagcatagtccaaggctgcctgggggactgtgccaagacccctattgatgtcctctgtgcagctgtggagctgttgcatgaagctgacgccctcctcttctggctcagcaggtacctcttctcccacttaaatgatttctcagcatgccaggagatccgagacttgttggaggagctgagccaggtcttgcatgaggatggtccagcggctgagaaggagggcacagtcctgaggatctgcagccacgtggctgggatctgccacaacatcctggtctgctgccccaaggagctgctggaacagaaggccgtgctcgagcaggtgcagctggacagtccattgggcctagaaattcacaccaccagcaattgccagcactttgtgtcccaagtggacacccaggttcccactgactcccgactgcagatccagcctggagacgaggttgtccagatcaacgagcaggtggtggtgggatggccccgtaagaacatggtgagggaactgctgcgggagccagccggactcagcttagtgctgaagaagatcccgataccggagacccccccacagacgccccctcaggtcctggactccccgcaccagaggagcccatcactgtctctggccccactgtctcccagggccccatctgaagacgtctttgcctttgacctgtcttcaaaccccagtcccggacccagccctgcctggacagactctgcctcccttggccctgagcccctgcccatccccccggaacccccagccatactcccagcaggggtagcagggactccagggctccctgaatcccctgacaagagtcctgttggtcggaagaaatcaaaaggcctggcgacccggctgagccgccggcgggtgtcatgccgtgagctgggccggccggactgtgacggctggctcctgttgcgaaaggcaccgggcggcttcatgggcccgcgctggcgccgccgctggtttgtgctcaagggacacacgctctactggtaccgccagccccaggatgagaaggctgagggcctcatcaatgtctccaactatagtctggaaagtggacatgatcagaagaagaaatatgtgtttcagctcacccatgatgtgtacaaacccttcatcttcgctgctgataccctgacagatctgagcatgtgggtgcgtcatctcattacctgcatctccaagtaccagtctccaggccgggcccccccaccccgagaggaagactgctacagtgagaccgaagcagaggacccggacgatgaggctgggtcccactcagcctcgcccagccctgctcaagctgggagtcccctccatggagacacatcacctgcagccacccccacacagcgcagcccacggacctcctttggctctctgacagacagcagtgaagaggcactggaaggaatggtacgggggctgaggcagggtggcgtgtccctcctaggccagccacagcccctgacccaggaacagtggcggagctctttcatgcggcgcaaccgagaccctcagctcaatgagcgagtgcaccgtgtgcgggcgctacagagcacactcaaggcaaagctgcaggagctgcaggtcctagaagaagtgctgggtgaccctgagctgacaggagagaagttccgccagtggaaggagcagaaccgggagctgtactcagagggcctgggggcctggggagtggcacaggctgaaggcagctcccacatcttgacctctgactccacagaacagtcccccaactccctgccctctgaccctgaagagcactcccatctctgccccctgacctcagagagcagcctccgacctcctgacctctgaccctggccagcactctagctcctgacctttgacccgagggccacctcaaccccagcttctgacgtgtccaggacagagcatccctggattctgttcagggtgggaagtagtactgctagtcatggtctcaccccgagctgacccctctgcctgggctttgtgccaccctctcccttgccaaagaagaaactctccccccaaatcctccaacctctggggccacagccctgcccctccagttccttggcagttctcccccaaaccaggtctgtacaggtgttctttattttacatgagggctactttccaaccaaataaagtcaatttttctaagaaaaaaaaaaaaaaaaaa

SEQ ID NO: 56385 - DNA, 3589 bp, Homo Sapiens
atttccttctccctttccccgccagcttcgcatccatctcccccaccccgtaaccccctcctgcctccatccaccggggctatggccgcagaagaggtattgcagacggtggaccattataagactgagatagagaggctaaccaaggagctcacggagaccacccacgagaagatccaggctgccgagtacgggctggtggtgctggaggagaagctgaccctcaaacagcagtatgatgaactggaggctgagtacgacagcctcaaacaggagctggagcagctcaaagaggcatttgggcagtccttctccatccaccggaaggttgctgaagatggagagactcgggaggaaacgcttctgcaggagtcagcatcgaaggaggcttactatctggggaagatcttggagatgcagaacgagctgaaacagagccgggctgtggtcactaatgtacaggcagaaaacgagaggctcaccgcagtcgtgcaggatctgaaggagaacaatgagatggtggagctacagagaatacggatgaaggatgaaatccgagaatataagttccgggaggcacggctccttcaggactatactgaattggaagaagaaaatatcacattgcagaaactagtgtccacgttgaagcagaaccaggttgaatacgaaggcttaaagcatgagattaagcgatttgaggaggagacggtactgctgaacagccagctggaagatgccatccgattgaaagagattgctgagcaccaactggaagaagccctcgagactttaaaaaatgaaagagagcaaaagaacaacctgcggaaggagctctcccagtatatcagcctcaatgataaccatatcagcatctcagtagatggactcaaatttgccgaggatgggagtgaaccaaacaatgatgacaaaatgaacggtcatatccatgggcctcttgtgaaactgaatggagactatcggactcccaccttaaggaaaggagagtctctgaaccctgtctctgacttattcagtgagctgaacatttcagaaatacagaagttgaagcagcagcttatgcaggtagagcgggaaaaggccattcttttggccaacctacaggagtcacagacacagctggaacacaccaagggggcactgacggagcagcatgagcgggtgcaccggctcacagagcacgtcaatgccatgaggggcctgcaaagcagcaaggagctcaaggctgagctggacggggagaagggccgggactcaggggaggaggcccatgactatgaggtggacatcaatggtttagagatccttgaatgcaaatacagggtggcagtaactgaggtgattgatctgaaagctgaaattaaggccttaaaggagaaatataataaatctgtagaaaactacactgatgagaaggccaagtatgagagtaaaatccagatgtatgatgagcaggtgacaagccttgagaagaccaccaaggagagtggtgagaagatggcccacatggagaaggagttgcaaaagatgaccagcatagccaacgaaaatcacagtacccttaatacggcccaggatgagttagtgacattcagtgaggagttagctcagctttaccaccatgtgtgtctatgtaataatgaaactcccaacagggtcatgctggattactataggcagagcagagtcacccgcagtggcagcctgaaagggcccgatgatcccagaggacttttgtccccacgattagccaggcggggtgtgtcatccccggtagaaacaaggacctcatctgaaccagttgcaaaagaaagcacagaggccagcaaagaaccaagtccaactaagacccccacaatctctcctgttattactgccccaccgtcatctccagtattggatacaagtgacatccgcaaagagccaatgaatatctacaaccttaatgccataatccgggaccaaatcaagcatctgcagaaagctgtggaccggtccttgcaactgtctcgtcaaagagcagcggctcgggagctagcccccatgattgataaagacaaggaagccttaatggaagagatcctcaagctaaagtccctgctgagcaccaaacgggagcagatcgccacattgagggcggtgttgaaagccaacaagcagacagctgaggtggcgctagctaatctcaagaacaaatatgaaaatgaaaaagcaatggtgactgaaaccatgacgaagcttagaaatgaactgaaggctttgaaagaagatgctgcaaccttctcatccctgagagcaatgtttgcaacaagatgtgatgaatatgtcacccagttggatgagatgcagagacagttagcagctgcagaggatgagaagaagactctgaacactttgttacgaatggctatccagcaaaaactcgccctgacccagaggctggaggacttagagtttgaccatgagcagtcccgacgcagcaaaggcaaacttggaaagagcaagatcggcagccctaaagtaagtggggaggcatcagtcaccgtgcccaccatagacacttacctcctgcatagtcagggcccacagacacccaacattcgggtcagcagtggcactcagaggaaaagacaattttcaccttccctttgtgatcagagccgtcccaggacttcaggggcttcctacctacagaatttattaagagttccccctgatcccacctccacagaatcatttcttctgaagggccccccttccatgagtgaattcatccaagggcaccggctcagcaaggaaaaaaggttaaccgtggctccaccagattgtcagcagcctgctgcctccgtaccgccacagtgctcacaactagccgggaggcaagactgcccaactgtcagtcctgacacagctctccctgaggagcagccacattccagctcccagtgcgcccctctccactgtctctccaagcctcctcacccctagtcttcatctcctgtggacgaacatctggggtggaagttttgtagccacacacaggatactgcccaagatccagcgggtgttttcttctcggttgttagatgtacaattggattaatgtccatcgttttggaagacgagagaaagttgagaagaacacgaagcacagaccctgatgtgataaaacattttgtggtttctctgagtcacagataaacttctgccatcaaatggctacagttcatttaaatttaaaaaaaagaaaaaagaaacagaaaacgtgtctcagatggctggctttacctcgatagcataagagagacctaagacatgtaaaatacgtatattgcagtatcatctttcctcacactccaaattcagctagggaagttgattccaatatgtttgtcattgatatttattttgtactttatttgctacatgatttatgtctatacaaataatttctctgaggtgaatttaattcatttattttcaaataagcataatttgctcaattaagtatgagtttgaatttagtttgaaatctggaattggccagactgtggtcatttttcttgca

SEQ ID NO: 56386 - DNA, 7444 bp, Homo Sapiens; identical to SEQ ID NO: 30074

SEQ ID NO: 56387 - DNA, 5140 bp, Homo Sapiens
gcttctgctgggcagggccggctgttaatctcgcctggcggagcggacaccggggcgtggtgggggagatgggccttataggtggcgtccgctggtgagaaacaccttgcgcaggtaaaagggtggcggcgagagggagttcccacccgtggctttcttagagaaatgaagtcttaagtcttaaatagacaacaaggaggggccgatcggtgtcttttggacgcgtctggagcccctccctccgccaaaggaaaagccccttggatgagaggcaggcgcttcagagaagctaagaaaagcacctctccgcgcgccccacctcctccgcctcgcgctcctcctgagcagcgggcccagactgcgctccggccgcggccctcgccccgcggagccctcctaccccggcccgacgctcggcccgcgacctgccccgagccctctccatggaggcagcccgcccctccggctcctggaacggagccctctgccggctgctcctgctgaccctcgcgatcttaatatttgccagtgatgcctgcaaaaatgtgacattacatgttccctccaaactagatgccgagaaacttgttggtagagttaacctgaaagagtgctttacagctgcaaatctaattcattcaagtgatcctgacttccaaattttggaggatggttcagtctatacaacaaatactattctattgtcctcggagaagagaagttttaccatattactttccaacactgagaaccaagaaaagaagaaaatatttgtctttttggagcatcaaacaaaggtcctaaagaaaagacatactaaagaaaaagttctaaggcgcgccaagagaagatgggctccaattccttgttcgatgctagaaaactccttgggtccttttccacttttccttcaacaggttcaatctgacacggcccaaaactataccatatactattccataagaggtcctggagttgaccaagaacctcggaatttattttatgtggagagagacactggaaacttgtattgtactcgtcctgtagatcgtgagcagtatgaatcttttgagataattgcctttgcaacaactccagatgggtatactccagaacttccactgcccctaataatcaaaatagaggatgaaaatgataactacccaatttttacagaagaaacttatacttttacaatttttgaaaattgcagagtgggcactactgtgggacaagtgtgtgctactgacaaagatgagcctgacacgatgcacacacgcctgaagtactccatcattgggcaggtgccaccatcacccaccctattttctatgcatccaactacaggcgtgatcaccacaacatcatctcagctagacagagagttaattgacaagtaccagttgaaaataaaagtacaagacatggatggtcagtattttggtctacagacaacttcaacttgtatcattaacattgatgatgtaaatgaccacttgccaacatttactcgtacttcttatgtgacatcagtggaagaaaatacagttgatgtggaaatcttacgagttactgttgaggataaggacttagtgaatactgctaactggagagctaattataccattttaaagggcaatgaaaatggcaattttaaaattgtaacagatgccaaaaccaatgaaggagttctttgtgtagttaagcctttgaattatgaagaaaagcaacagatgatcttgcaaattggtgtagttaatgaagctccattttccagagaggctagtccaagatcagccatgagcacagcaacagttactgttaatgtagaagatcaggatgagggccctgagtgtaaccctccaatacagactgttcgcatgaaagaaaatgcagaagtgggaacaacaagcaatggatataaagcatatgacccagaaacaagaagtagcagtggcataaggtataagaaattaactgatccaacagggtgggtcaccattgatgaaaatacaggatcaatcaaagttttcagaagcctggatagagaggcagagaccatcaaaaatggcatatataatattacagtccttgcatcagaccaaggagggagaacatgtacggggacactgggcattatacttcaagacgtgaatgataacagcccattcatacctaaaaagacagtgatcatctgcaaacccaccatgtcatctgcggagattgttgcggttgatcctgatgagcctatccatggcccaccctttgactttagtctggagagttctacttcagaagtacagagaatgtggagactgaaagcaattaatgatacagcagcacgtctttcctatcagaatgatcctccatttggctcatatgtagtacctataacagtgagagatagacttggcatgtctagtgtcacttcattggatgttacactgtgtgactgcattaccgaaaatgactgcacacatcgtgtagatccaaggattggcggtggaggagtacaacttggaaagtgggccatccttgcaatattgttgggcatagcattgctcttttgcatcctgtttacgctggtctgtggggcttctgggacgtctaaacaaccaaaagtaattcctgatgatttagcccagcagaacctaattgtatcaaacacagaagctcctggagatgacaaagtgtattctgcgaatggcttcacaacccaaactgtgggcgcttctgctcagggagtttgtggcaccgtgggatcaggaatcaaaaacggaggtcaggagaccatcgaaatggtgaaaggaggacaccagacctcggaatcctgccggggggctggccaccatcacaccctggactcctgcaggggaggacacacggaggtggacaactgcagatacacttactcggagtggcacagttttactcagccccgtcttggtgaaaaagtgtatctgtgtaatcaagatgaaaatcacaagcatgcccaagactatgtcctgacatataactatgaaggaagaggatcggtggctgggtctgtaggttgttgcagtgaacgacaagaagaagatgggcttgaatttttggataatttggagcccaaatttaggacactagcagaagcatgcatgaagagatgagtgtgttctaataagtctctgaaagccagtggctttatgacttttaaaaaaaattacaaaccaagaattttttaaagcagaagatgctatttgtgggggtttttctctcattatttggatggaatctctttggtcaaatgcacatttacagagagacactataaacaagtacacaaatttttcaatttttacatatttttaaattacttatcttctatccaaggaggtctacagagaaattaaagtctgccttatttgttacatttgggtataatgacaacagccaatttatagtgcaataaaatgtaattaattcaagtccttattatagactatttgaagcacaacctaatggaaaattgtagagaccttgctttaacattatctccagttaattaagtgttcatgtggtgcttggaaactgttgttttcctgaacatctaaagtgtgtagactgcattcttgctattattttattcttgtaatgtgaccttttcactgtgcaaagggagatttctagccaggcattgactattacaatttcattttggtggagtttagttttaggttttattgtatataaaatcctgcactgaatctgtgtctcctctgttacctacttttgccagtgaaatttaagttttaaaatactttcagaatgtatttttactactgcaagtttttggtctttaaaatgtcaagtagcatctctctctttctctctgtctctttctgtttctctctccagttttttttttttttttaatttccatatgggctaaagaatccaaatattttaaaaatctgtctctcttttcttctctcataaagtgaattattccttttttttgttttatgtaagtgtatatattcttagtttttcttgaaatcattgtaatgttaactttgttgtttcaaatatcttggtgattgcttcattatctcttcaacaaaaaaaacctttaattttgccattgaaactgtagaactatgccatgcttttattagaagcagtgctctgtgttaacaacaagaatggtgtaattagaattgggatgtggatatttactgtatgacaacacatttacagttctgtaatgcaaggatgcagtttaaaaatgtgaagtagtgatggtttttgaaataagctttaaaatatagggatcttgaaggctccctggggtaactattttataacttagataaaatggctagtcatatctgtgtgtttgtaaagttatttttttaatattttaagattacaattttaacaaatgtagaaatgagccaaactatttaaattttaaaacagtaaaacaaaatgaaacttaatagctcacaaaattccagtccatgtttcatgacttattttagtcaatgaattttctatttatactaaacatatggacattttaaatgtgtttctaatatttttgattatctataatgtgcctgtcttcaattcacaagattgggttataacaattatttgccagattaacactagggaattatttgataaccagcttatcttatcagtagttttattgctgatcaggcaaaaatagttttccaaagttatttttaataaagtatatacaaaattcttatatattactagtcatgataaagtaaattaagcagtttttaaaacttagtgtgagtttgttcatcacaggtctgatatgagtttaagggatttcgcactccctgaatcagagaagtaagaccccttccttagattcctgttatacattttttaaaatgtagagtttgttttggagacattttcagtgcattgttattgccatatttatataatatgactattctaaaggctgtgaggccatggggtattggttaagttgcttgcttttgctttgtccattttcatcattttaaaatgggggataataacagaacttgtttcctagggccattgtaagtcacttgaataaaaaatagttttgaagcaaaaaaaaaaaaaaaaa

SEQ ID NO: 56388 - DNA, 2415 bp, Homo Sapiens
ccacagcagcacaacacacacaatatcttcagctcctagcaccacatctgcccttgttgaagaacctaccagctaccacagcagcccgggctcaactgcaacaacacacttccctgacagctccacaacctcaggccgtagtgaggaatcaacagcatcccacagcagccaagacgcaacgggaacaatagtcctacctgcccgctccacaacctcagttcttcttggagaatctacgacctcacccatcagttcaggctcaatggaaacgacagcgttacccggcagtaccacaacgccaggcctcagtgagaaatctaccactttccacatagctccagatcaccagaccaaacactctcacctgccagcatgacaagctccagcatcagtggagaacccaccagcttgtatagccaagcagagtcaacacacacaacagcgttccctgccagcaccaccacctcaggcctcagtcaggaatcaacaactttccacagtaagccaggctcaactgagacaacactgtcccctggcagcatcacaacttcatcttttgctcaagaatttaccacccctcatagccaaccaggctcagctctgtcaacagtgtcacctgccagcaccacagtgccaggccttagtgaggaatctaccaccttctacagcagcccaggctcaactgaaaccacagcgttttctcacagcaacacaatgtccattcatagtcaacaatctacacccttccctgacagcccaggcttcactcacacagtgttacctgccaccctcacaaccacagacattggtcaggaatcaacagccttccacagcagctcagacgcaactggaacaacacccttacctgcccgctccacagcctcagaccttgttggagaacctacaactttctacatcagcccatcccctacttacacaacactctttcctgcgagttccagcacatcaggcctcactgaggaatctaccaccttccacaccagtccaagcttcacttctacaattgtgtctactgaaagcctggaaaccttagcaccagggttgtgccaggaaggacaaatttggaatggaaaacaatgcgtctgtccccaaggctacgttggttaccagtgcttgtcccctctggaatccttccctgtagaaaccccggaaaaactcaacgccactttaggtatgacagtgaaagtgacttacagaaatttcacagaaaagatgaatgacgcatcctcccaggaataccagaacttcagtaccctcttcaagaatcggatggatgtcgttttgaagggcgacaatcttcctcagtatagaggggtgaacattcggagattgctcaacggtagcatcgtggtcaagaacgatgtcatcctggaggcagactacactttagagtatgaggaactgtttgaaaacctggcagagattgtaaaggccaagattatgaatgaaactagaacaactcttcttgatcctgattcctgcagaaaggccatactgtgctatagtgaagaggacactttcgtggattcatcggtgactccgggctttgacttccaggagcaatgcacccagaaggctgccgaaggatatacccagttctactatgtggatgtcttggatgggaagctggcctgtgtgaacaagtgcaccaaaggaacgaagtcgcaaatgaactgtaacctgggcacatgtcagctgcaacgcagtggcccccgctgcctgtgcccaaatacgaacacacactggtactggggagagacctgtgaattcaacatcgccaagagcctcgtgtatgggatcgtgggggctgtgatggcggtgctgctgctcgcattgatcatcctaatcatcttattcagcctatcccagagaaaacggcacagggaacagtatgatgtgcctcaagagtggcgaaaggaaggcacccctggcatcttccagaagacggccatctgggaagaccagaatctgagggagagcagattcggccttgagaacgcctacaacaacttccggcccaccctggagactgttgactctggcacagagctccacatccagaggccggagatggtagcatccactgtgtgagccaacgggggcctcccaccctcatctagctctgttcaggagagctgcaaacacagagcccaccacaagcctccggggcgggtcaagaggagaccgaagtcaggccctgaagccggtcctgctctgagctgacagacttggccagtcccctgcctgtgctcctgctggggaaggctgggggctgtaagcctctccatccgggagcttccagactcccagaagcctcggcacccctgtctcctcctgggtggctccccactctggaatttccctaccaataaaagcaaatctgaaagctcagaa

SEQ ID NO: 56389 - DNA, 2430 bp, Homo Sapiens; identical to SEQ ID NO: 29906

SEQ ID NO: 56390 - DNA, 1811 bp, Homo Sapiens
agcggcggtggcggcaggtggggaagcgcggctgggcctgctcgcgcggggcgtctgagccctccatttcccggttctaaccgcgcagcagggcccaaccgggaccttgagtgcggcgaggcgtggctgtttttcttcaaataaagaacatggtgaaactgattcacacattagctgatcatggtgacgatgtcaactgctgtgccttctccttttccctcttggctacttgctccttggacaaaacaattcgcctgtactcgttacgtgactttactgaactgccacattctccattgaagtttcatacctatgctgtccactgctgctgtttctccccttcaggacatattttggcatcgtgttcaacagatggtaccactgtcctatggaatactgaaaatggacagatgctggcagtgatggaacagcctagtggcagccctgtgagggtttgccagttttccccagactccacgtgtttggcatcaggggcagctgatggaactgtggttttgtggaatgcacagtcatacaaattatatagatgtggtagtgttaaagatggctccttggcggcatgtgcattttctcctaatggaagcttctttgtcactggctcctcatgtggtgatttaacagtgtgggatgataaaatgaggtgtctgcatagtgaaaaagcacatgatcttggaattacctgctgcgatttttcttcacagccagtttctgatggagaacaaggtcttcagttttttcgactggcatcatgtggtcaggattgccaagtcaaaatttggattgtttcttttacccatatcttaggttttgaattaaaatataaaagtacactgagtgggcactgtgctcctgttctggcttgtgctttttcccatgatgggcagatgctagtctcagggtcagtggataagtctgtcatagtatatgatactaatactgagaatatacttcacacattgactcagcacaccaggtatgtcacaacttgtgcttttgcacctaatacccttttacttgctactggttcaatggacaaaacagtgaacatctggcaatttgacctggaaacactttgccaagcaaggagcacagaacatcagctgaagcaatttaccgaagattggtcagaggaggatgtctcaacatggctttgtgcacaagatttaaaagatcttgttggtattttcaagatgaataacattgatggaaaagaactgttgaatcttacaaaagaaagtctggctgatgatttgaaaattgaatctctaggactgcgtagtaaagtgctgaggaaaattgaagagctcaggaccaaggttaaatccctttcttcaggaattcctgatgaatttatatgtccaataactagagaacttatgaaagatccggtcatcgcatcagatggctattcatatgaaaaggaagcaatggaaaattggatcagcaaaaagaaacgtacaagtcccatgacaaatcttgttcttccttcagcggtacttacaccaaataggactctgaaaatggccatcaatagatggctggagacacaccaaaagtaaaattgttgatattgtattatttatattttcagtgatctcatttgaatgatttataggtaaatactaatcagacattattaaaagcaaaacaggaaaaaggtaaacttcttaaatttagttacctataaaaattgtcaattttcattctttaaaaacacatggacttactataaaagcctttttgtactagtgaaaagaatcttcagctatatagaaataaagttatacttt

SEQ ID NO: 56391 - DNA, 6133 bp, Homo Sapiens; identical to SEQ ID NO: 29518

SEQ ID NO: 56392 - DNA, 4745 bp, Homo Sapiens
gagctgaggaggagctgaaaatgcagatttagcatcaagcacagacctacactcgctctttctctccggtacacacagctccccacattcgcacccctgcccgcgcgccgggccgcctgactgcacggcttcccctccagccagatgctggagaacacacactgattcgctgctttccaagaccctgttcagtctctttctctatacaaagatttttttaaaaactatatataagaattctttatttgcaccctccctccgagtcccctgctccgccagcctgcgcgcctcctagcaccacttttcactcccaaagaaggatgaagggtggttgtgtctcccagtggaaggcggccgccgggttcctcttctgtgtcatggtttttgcatctgctgagcgaccggtcttcacgaatcattttcttgtggagttgcataaagggggagaggacaaagctcgccaagttgcagcagaacacggctttggagtccgaaagcttccctttgctgaaggtctgtaccacttttatcacaatggccttgcaaaggccaagagaagacgcagcctacaccacaagcagcagctggagagagaccccagggtaaagatggctttgcagcaggaaggatttgaccgaaaaaagcgaggttacagagacatcaatgagatcgacatcaacatgaacgatcctctttttacaaagcagtggtatctgatcaatactgggcaagctgatggcactcctggccttgatttgaatgtggctgaagcctgggagctgggatacacagggaaaggtgttaccattggaattatggatgatgggattgactatctccacccggacctggcctccaactataatgccgaagcaagttacgacttcagcagcaacgacccctatccttaccctcggtacacagatgactggtttaacagccacgggacccgatgtgcaggagaagtttctgctgccgccaacaacaatatctgtggagttggagtagcatacaactccaaggttgcaggcatccggatgctggaccagccattcatgacagacatcatcgaggcctcctccatcagtcatatgccacagctgattgacatctacagcgccagctggggccccacagacaacggcaagacagtggatgggccccgggagctcacgctgcaggccatggccgatggcgtgaacaagggccgcggcggcaaaggcagcatctacgtgtgggcctccggggacggcggcagctatgacgactgcaactgcgacggctacgcctccagcatgtggaccatctccatcaactcagccatcaacgacggcaggactgccctgtacgacgagagctgctcttccaccttggcttccaccttcagcaacgggaggaaaaggaaccccgaggccggtgtggcaaccacagatttgtacggcaactgcactctgaggcattctgggacatctgcagctgcccccgaggcagctggtgtgtttgcactggctctggaggctaacctgggtctgacctggcgggacatgcagcatctgactgtgctcacctccaaacggaaccagcttcacgacgaggtccatcagtggcggcgcaatggggtcggcctggaatttaatcacctctttggctacggggtccttgatgcaggtgccatggtgaaaatggctaaagactggaaaaccgtgcctgagagattccactgtgtgggaggctccgtgcaggaccctgagaaaataccatccactggcaagttggtgctgacactcacaaccgacgcctgtgaggggaaggaaaattttgtccgctacctggagcatgtccaggctgtcatcacggtcaacgcaaccagaagaggagacctgaacatcaacatgacttcccctatgggcaccaagtccattttgctgagccggcgtccaagggatgacgactccaaggtgggctttgacaagtggcctttcatgaccactcacacgtggggggaagacgcccgaggcacctggaccctggagctgggatttgtcggcagcgccccgcagaagggggtgctgaaggagtggaccctgatgctgcatggcactcagagtgccccgtacatcgaccaggtggtgcgggattaccagtccaagttggccatgtccaagaaagaggagctggaggaagagctggacgaagccgtggagagaagcctgaaaagcatccttaacaagaactagcgctgcacatccgcctttcccaccgccctccctccccagctccgcctctgtcctcgctccacgtttcaggcaggcacctagcaattccatcacccgtacaggcaattccgtcttcttaatctgaagcttcactcactgtcaatgattattttcattacaatggaaacaatcttttttactctatgccccaaatatagcgttcccaacaacatccatgtcctatgtgtgactctaaattctttatttctgtcattcaaatgggtgatatcctgaaaaaaaaaaaaaaaaaaaaactgggacagctttcccctcatttttttttttgtttctgagaaaagaacgtattttaaaagccacatagagtgactccaagaacaattgtccatggtctcaaacaaggggctgttacataacaagaaaatcaaagctgaggacagggtgtgagcgccacatctctgaaagcacaggagacactgtgctataaatcctttggggagcgatgttttgaatttagtgagatttaccagggatgtagattaaggtgatgtgattcaaaagatgccattcatagagagccctagttactgcatggggaaagagatccaggaagcatgagtgctggatattttactaccaatgccaagataattcactctactcagccggcgtggcaaatataaaacttacagagcgtggctgtgctctcaccagctgctgctctgagttatgttaaaatccgctagagcagcccaaatttttctcagtttgtatagagttcatcccagccccaattttctggggctcctcacatagctacccaaaagagaaaaaaaattaagacaagcctggcaacacacctggtgaagagtagtttactagcttttcaaacaagaatgtcccttttcctaagtcactttgaggtgtctcaatctgatctgagtgagaggcgacaggagtatttttttttttttacagctttacacacacagatgtgggctttgatttccaagtaatataatggaagagaaatctcatactcccccacagtttgatgtcattaatgtgttgggaaaaaggcctctgtcccggaagagtcatgggaggtgaaaggggcacgtttgaagatgcgagcgctatcttcacatagttctccagttgtatggagcctcttctgccaagagagggccatgcaattcatcccagaggaacctgaggcctgaaggaggtgagagaagacctctgtgaggaaagcacacagtcaccttctcggcaactaagcagtccctgagaccatttaacatgcaacccgaaggttatggtcaatcccaaaagtcaccactccattcccaactagacattaccaaagtgacctacccagagattgcttctcatccccagtcccaatgcacatccattcccaagaaatgctttgtcttcagcctctccaggcaccatctcccttcctgtgggagcagagagcttagcctggagcacctttccttcaagccagcaacacagagcactaggttcaattccctgaaggtggccactttaagagagaaatctgaaaaccccatttgctttcttttctcccatattggcatggatttctgtcttctctaacaccttgtgaccttctctatatcatgctttaaagtgtaataatatgattttttaaaagaaatttattacttgttgcaaaggtctttttaaaccagtttagatttcaagaaaaaataaatggaaatcatcgaaaattcatttcacattaatggtctaaaaataaaccaaaggacattatgtgtgcatgtgtgtataagtgcacacagaaatatatatacatatgtagactatatacatgtgtgtatatatgtgtatatatacatacacttgtataaatgtatatacacatatacctataatgtgtgtatgtgtatttattgaagaaacagataccatactcatttctaaaagaatattcagagaatatcaagatgattctggctgaaaaaggccagtggaaattcaggtgaaaatgttcatcaattcccattgcatcacctctgtaatttttcagctctctgtataaacattaaatgtcttatatagcagcaaaaatataaaatagttgtccatattttcacaggtgtggtgtaatttataaaattagaaagcaacttatcagctacttaagagaaatggcaagttttgatatgagtatacaatatataaaaatatatatagtgctatatatataaatatttggtctctatttcattttttgcatcagtattaatactaaaatatgtctcgctagtgatgtttttatgatatccctgatcctaactgaagagacagttatttatagtcatttattttaaaaaatgaaaataagtgaataataattaggttaacattgttgctccctgtgacaaaattttataagcaaatttcaaaagacatgttgtaaattaggaggctcaacaataaaacattatgctccagaaa

SEQ ID NO: 56393 - DNA, 4343 bp, Homo Sapiens
ccgggtcccgggtcctttgcggcgctagggtgggcgaacccagagggacgctccgggacgatgtggggcagcgatcgcctggcgggtgctgggggaggcggggcggcagtgactgtggccttcaccaacgctcgcgactgcttcctccacctgccgcggcgtctcgtggcccagctgcatctgctgcagaatcaagctatagaagtggtctggagtcaccagcctgcattcttgagctgggtggaaggcaggcattttagtgatcaaggtgaaaatgtggctgaaattaacagacaagttggtcaaaaacttggactctcaaatgggggacaggtatttctcaagccatgttcccatgtggtatcttgtcaacaagttgaggtggaacccctctcagcagatgattgggagatactggagctgcatgctgtttcccttgaacaacatcttctagatcaaattcgaatagtttttccaaaagccatttttcctgtttgggttgatcaacaaacgtacatatttatccaaattgttgcactaataccagctgcctcttatggaaggctggaaactgacaccaaactccttattcagccaaagacacgccgagccaaagagaatacattttcaaaagctgatgctgaatataaaaaacttcatagttatggaagagaccagaaaggaatgatgaaagaacttcaaaccaagcaacttcagtcaaatactgtgggaatcactgaatctaatgaaaacgagtcagagattccagttgactcatcatcagtagcaagtttatggactatgataggaagcattttttcctttcaatctgagaagaaacaagagacatcttggggtttaactgaaatcaatgcattcaaaaatatgcagtcaaaggttgttcctctagacaatattttcagagtatgcaaatctcaacctcctagtatatataacgcgtcagcaacctctgtttttcataaacactgtgccattcatgtatttccatgggaccaggaatattttgatgtagagcccagctttactgtgacatatggaaagctagttaagctactttctccaaagcaacagcaaagtaaaacaaaacaaaatgtgttatcacctgaaaaagagaagcagatgtcagagccactagatcaaaaaaaaattaggtcagatcataatgaagaagatgagaaggcctgtgtgctacaagtagtctggaatggacttgaagaattgaacaatgccatcaaatataccaaaaatgtagaagttctccatcttgggaaagtctggattccagatgacctgaggaagagactaaatatagaaatgcatgccgtagtcaggataactccagtggaagttacccctaaaattccaagatctctaaagttacaacctagagagaatttacctaaagacataagtgaagaagacataaaaactgtattttattcatggctacagcagtctactaccaccatgcttcctttggtaatatcagaggaagaatttattaagctggaaactaaagatggactgaaggaattttctctgagtatagttcattcttgggaaaaagaaaaagataaaaatatttttctgttgagtcccaatttgctgcagaagactacaatacaagtccttctagatcctatggtaaaagaagaaaacagtgaggaaattgactttattcttccttttttaaagctgagctctttgggaggagtgaattccttaggcgtatcctccttggagcacatcactcacagcctcctgggacgccctttgtctcggcagctgatgtctcttgttgcaggacttaggaatggagctcttttactcacaggaggaaagggaagtggaaaatcaactttagccaaagcaatctgtaaagaagcatttgacaaactggatgcccatgtggagagagttgactgtaaagctttacgaggaaaaaggcttgaaaacatacaaaaaaccctagaggtggctttctcagaggcagtgtggatgcagccatctgttgtcctgctggatgaccttgacctcattgctggactgcctgctgtcccggaacatgagcacagtcctgatgcggtgcagagccagcggcttgctcatgctttgaatgatatgataaaagagtttatctccatgggaagtttggttgcactgattgccacaagtcagtctcagcaatctctacatcctttacttgtttctgctcaaggagttcacatatttcagtgcgtccaacacattcagcctcctaatcaggaacaaagatgtgaaattctgtgtaatgtaataaaaaataaattggactgtgatataaacaagttcaccgatcttgacctgcagcatgtagctaaagaaactggagggtttgtggctagagattttacagtacttgtggatcgagccatacattctcgactctctcgtcagagtatatccaccagagaaaaattagttttaacaacattggacttccaaaaggctctccgcggatttcttcctgcgtctttgcgaagtgtcaacctgcataaacctagagacctgggttgggacaagattggtgggttacatgaagttaggcagatactcatggatactatccagttacctgccaagtatccagaattatttgcaaacttgcccatacgacaaagaacaggaatactgttgtatggtccgcctggaacaggaaaaaccttactagctggggtaattgcacgagagagtagaatgaattttataagtgtcaaggggccagagttactcagcaaatacattggagcaagtgaacaagctgttcgggatatttttattagagcacaggctgcaaagccctgcattcttttctttgatgaatttgaatccattgctcctcggcggggtcatgataatacaggagttacagaccgagtagttaaccagttgctgactcagttggatggagtagaaggcttacagggtgtttatgtattggctgctactagtcgccctgacttgattgaccctgccctgcttaggcctggtcgactagataaatgtgtatactgtcctcctcctgatcaggtgtcacgtcttgaaattttaaatgtcctcagtgactctctacctctggcagatgatgttgaccttcagcatgtagcatcagtaactgactcctttactggagctgatctgaaagctttactttacaatgcccaattggaggccttacatggaatgctgctctcgagtggactccaggatggaagttccagctctgatagtgacctaagtctgtcttcaatggtctttcttaaccatagcagtggctctgacgattcagctggagatggagaatgtggcttagatcagtcccttgtttctttagagatgtccgagatccttccagatgaatcaaaattcaatatgtaccggctctactttggaagctcttatgaatcagaacttggaaatggaacctcttctgatttgagctcacaatgtctctctgcaccaagctccatgactcaggatttgcctggagttcctgggaaagaccagttgttttcacagcctccagtgttaaggacagcttcacaagagggttgccaagaacttacacaagaacaaagagatcaactgagggcagatatcagtattatcaaaggcagataccggagccaaagtggagaggacgaatccatgaaccaaccaggaccaatcaaaaccagactggctattagtcagtcacatttaatgactgcacttggtcacacaagaccatccattagtgaagatgactggaagaattttgctgagctatatgaaagctttcaaaatccaaagaggagaaaaaatcaaagtggaacaatgtttcgacctggacagaaagtaactttagcataaaatatacttctttttgatttggttctgttaagttttttgatggcttttccatatgttgtaacaggaaaaaaatggtgtctatgaatttcttcttaatttaacaaatttggttaatttataaaatcacagattggtaaatgctataattatgtaatgatcaggattgagattaatactgtagtataaattgggacattataacagattccatattttatttcctaaaatctaaattcagtctttaatgaaataatattagccaaatggtggaactaatttatttcttttgaggaaaagataataaagaatgtaattaaatttaaatttcttggaattcccagttgtatattcatcacctttgtagcatttgacaaattttatgcttagcagcttcttcactgttttgaaataaaatatcctattacctactg

SEQ ID NO: 56394 - DNA, 4753 bp, Homo Sapiens
atgctgaagcggaggcggccgctgctcgaggatcaaacagagcatactgaatcagcaggactggctggtggtgcagcagacatcatgagtaagcaccgagaagtctgttccttatcacgtgtgtaaggggaaaaaggtttaaacaagtctcttaagtggtgtttcctcaccgatggagaattacttccaagcagaagcttacaacctggacaaggtgttagatgaatttgaacaaaacgaagatgaaacagtttcttctactttattggatacaaagtggaataagattctagatcccccttctcaccggctgtcatttaaccctactttggccagtgtgaatgaatctgcagtttctaatgagtcacaaccacaactgaaagtcttctccctggctcattcagctcccctgaccacagaggaagaggatcactgtgctaatggacaggactgtaatctaaatccagagattgccacaatgtggattgatgaaaatgctgttgcagaagaccagttaattaagagaaactatagttgggatgatcaatgcagtgctgttgaagtgggagagaagaaatgtggaaacctggcttgtctgccagatgagaagaatgttcttgttgtagccgtcatgcataactgtgataaaaggacattacaaaacgatttacaggattgtaataattataatagtcaatcccttatggatgcttttagctgttcactggataatgaaaacagacaaactgatcaatttagttttagtataaatgagtccactgaaaaagatatgaattcagagaaacaaatggatccattgaatagaccgaaaacagaggggagatctgttaaccatctgtgtcctacttcatctgatagtctagccagtgtctgttccccttcacaattaaaggatgacggaagtataggtagagacccctccatgtctgcgattacaagtttaacggttgattcagtaatctcatcccagggaacagatggatgtcctgctgttaaaaagcaagagaactatataccagatgaggacctcactggcaaaatcagctctcctaggacagatctagggagtccaaattccttttcccacatgagtgaggggattttgatgaaaaaagagccagcagaggagagcaccactgaagaatccctccggtctggtttacctttgcttctcaaaccagacatgcctaatgggtctggaaggaataatgactgtgaacggtgttcagattgccttgtgcctaatgaagttagggctgatgaaaatgaaggttatgaacatgaagaaactcttggcactacagaattccttaatatgacagagcatttctctgaatctcaggacatgactaattggaagttgactaaactaaatgagatgaatgatagccaagtaaacgaagaaaaggaaaagtttctacagattagtcagcctgaggacactaatggtgatagtggaggacagtgtgttggattggcagatgcaggtctagatttaaaaggaacttgcattagtgaaagtgaagaatgtgatttctccactgttatagacacaccagcagcaaattatctatctaatggttgtgattcctatggaatgcaagacccaggtgtttcttttgttccaaagactttaccctccaaagaagattcagtaacagaagaaaaagaaatagaggaaagcaagtcagaatgctactcaaatatttatgaacagagaggaaatgaggccacagaagggagtggactacttttaaacagcactggtgacctaatgaagaaaaattatttacataatttctgtagtcaagttccatcagtgcttgggcaatcttcccccaaggtagtagcaagcctgccatctatcagtgttccttttggtggtgcaagacccaagcaaccttctaatcttaaacttcaaattccaaagccattatcagaccatttacaaaatgactttcctgcaaacagtggaaataatactaaaaataaaaatgatattcttgggaaagcaaaattaggggaaaactcagcaaccaatgtatgcagtccatctttgggaaacatctctaatgtcgatacaaatggggaacatttagaaagttatgaggctgagatctccactagaccatgccttgcattagctccagatagcccagataatgatctcagagctggtcagtttggaatttctgccagaaagccattcaccactctgggtgaggtggctccagtatgggtaccggattctcaggctccaaattgcatgaaatgtgaagccaggtttacattcaccaaaaggaggcatcactgcagagcatgtgggaaggttttctgtgcttcctgctgtagcctgaaatgtaaactgttatacatggacagaaaggaagctagagtgtgtgtaatctgccattcagtgctaatgaatgtggctcagcccagagagcagaggcgagtttggtttgctgatgggatcttgcccaatggagaagttgctgatgcagccaaattaacaatgaatggaacttcctctgcaggaaccctggctgtgtcacacgacccagtcaagccagtaactaccagtcctctaccagcagagacggatatttgtctattctctgggagtataactcaggttggaagtcctgttggaagtgcaatgaatcttattcctgaagatggccttcctcccattctcatctccactggtgtaaaaggagactatgctgtggaagagaaaccatcacagatttcagtaatgcagcagttggaggatggtggccctgacccacttgtatttgttttaaatgcaaatttgttgtcaatggttaaaattgtaaattatgtgaacaggaagtgctggtgtttcacaaccaagggaatgcatgcagtgggtcagtctgagatagtcattcttctacagtgtttaccggatgaaaagtgtttgccaaaggatatctttaatcactttgtgcagctttatcgggatgctctggcagggaatgtggtgagcaacttgggacattccttcttcagtcaaagtttccttggcagtaaagaacatggtggattcttatatgtgacatctacctaccagtcactgcaagacctagtactcccaaccccaccttacttgtttgggattcttatccagaaatgggaaactccttgggctaaagtatttcctatccgtctgatgttgagacttggagctgaatatcgactttatccatgcccactattcagtgtcagatttcggaagccattgtttggagagacggggcataccatcatgaatcttcttgcagacttcagaaattaccagtataccttgccagtagttcaaggtttggtggttgatatggaagttcggaaaactagcatcaaaattcccagcaacagatacaatgagatgatgaaagccatgaacaagtccaatgagcatgtcctggcaggaggtgcctgcttcaatgaaaaggcagactctcatcttgtgtgtgtacagaatgatgatggaaactatcagacccaggctatcagtattcacaatcagcccagaaaagtgactggtgccagtttctttgtgttcagtggcgctctgaaatcctcttctggataccttgccaagtccagtattgtggaagatggtgttatggtccagattactgcagagaacatggattccttgaggcaggcactgcgagagatgaaggacttcaccatcacctgtgggaaggcggacgcggaggaaccccaggagcacatccacatccagtgggtggatgatgacaagaacgttagcaagggtgtcgtaagtcctatagatgggaagtccatggagactataacaaatgtgaagatattccatggatcagaatataaagcaaatggaaaagtaatcagatggacagaggtgtttttcctagaaaacgatgaccagcacaattgcctcagtgatcctgcagatcacagtagattgactgagcatgttgccaaagctttttgccttgctctctgtcctcacctgaaacttctgaaggaagatggaatgaccaaactgggactacgtgtgacacttgactcagatcaggttggctatcaagcagggagcaatggccagccccttccctcgcagtacatgaatgatctggacagcgccttggtgccggtgatccatggaggggcctgccagcttagtgagggccccgttgtcatggaactcatcttttatattctggaaaacatcgtataaacagagaagacttcatttttttctgttcagacttgttgcaacagcagtcatacccaaatcatttgcactttaaaactggaagattaagcttttgttaacactattaatggggtggggaatagggtgggagtgggggtttgggagacgggtgggaaagggtggttggggggaccgatgttccataattctaagtcttctatgcattgtccaccaagaagatctgggcagcttctgttcctgcacaacagttatgctatccttgcagctaatccccttctgttactgtttagacaagaattccgctcctctctcaagatttacttatggtcatgtgctcagaaatgctcaaatgggtacaaccatcaccaagggtgggatgggagggcagaggggaaataaaatataaagcatcagttcttgcactctttgtacagaattggtataaaaaggataattccacactgaaaaaaaaaaaaaaaa

SEQ ID NO: 56395 - DNA, 3186 bp, Homo Sapiens; identical to SEQ ID NO: 29190

SEQ ID NO: 56396 - DNA, 2718 bp, Homo Sapiens
gggtaaagctcctcggcctcggcgtgctgcgcctccgcggctgccctgcgccagaattcggttccctcaaaattataaaggcaggaaagctcaagacaaagaaatccaacaaggctagtgatttcagtgatatggagaattggccaacaccaagtgaattagtgaacactggatttcagagcgtcctcagccaaggaaataaaaagccacaaaatagaaaagaaaaagaagagaaggttgaaaagagaagtaacagtgacagcaaagaaaaccgggaaacaaaattaaatggtcctggtgaaaacgtcagtgaggatgaggctcagtcaagtaatcaacgtaagagagctaataagcacaagtgggtaccactccacttagatgttgtaagatcagagagtcaagaaagacctggatcccggaacagctcaagatgtcaacctgaagcaaataaaccaacacataacaataggagaaatgatacacgaagttggaagcgagatagagaaaaaagggatgatcaagatgacgtttccagtgtgagaagtgagggtggtaatatccgaggttcctttagaggtcgaggaagaggccgaggacggggaagaggacgaggcagaggaaatcctcgattgaactttgattattcatatggttatcaagaacatggtgaaaggactgatcaaccatttcaaacagaacttaataccagtatgatgtattactatgatgatggtacaggtgtacaggtgtatcctgtggaagaagcattgcttaaagagtatattaagcgtcaaattgaatattacttcagtgtagaaaatttggaacgagacttctttcttcggggaaagatggatgaacaaggtttcttgcctatttccctgattgctggttttcagcgtgttcaggctctcactacaaaccttaatctcatcttagaggcactgaaggatagcacagaagtagaaattgtggatgagaaaatgagaaaaaagatagaaccagaaaaatggccaattccaggccctcctccacgcagtgtgccaccaacagacttctctcaactgattgattgtccagagtttgtaccaggccaagccttttgctcacatacaggtaacatcttttcttctagagcaaacgatgtaacagtgggttatttggtccaatttacttacttatttatttattttcagtttatttagatttgataggaaaattaaagctaactgaaagacttttgagtcccattttgtattcatattgcctcactcacagagttacaaattaaataaggatttaagaattatgaggaaagctgtcttatgtttcttgttcttaaattatatgtgtactttgtcatgtatggagtttctatcttttatttttactaaataactatagatatgtatcgttttcccctgtaaaattggaatagtatgattggattattctaaaaaggtcttatactcaagagtggggtagtcttcctttaattttgttaccaatacgctttaatcttgtcttggaaagataaaatgacctgcattctaaattagaattggggttctgtttaatttggttgtgtttagaatttccaaaagatttaatgttaataattttttcctggatcatttttaagacattccctcttgggaaaaaatgtgtgcttaaacttttttcagtcagggtgatgatcttctgaagctcttggatgtcatttgatcggaatatgcagtggaataggtgactcactgaaatgcctttataaatactggaacaaatcctgctgcaaaaatgaaagcgatcagactgtcttctgttcaagaatgtctattcccacctcttggtggaggaagttgggccaacactgcagtggagataaccacctttgcgataatgagagacagaccagaggactgctactctttttataggagctgcctatttctgtgtaattggcctgggctgcatgggctgcttttattcatggtgggaaagttaattattattattctggaaataccgcaagattatgttttctgtttccagggttatgtacttgtgtccagatgaataaagcagaaaaagaggggattgagtagcatttcccagattcttaagtactttgctattcgatttgcctttcagtgtagtgtacattgtaaaactcagatattgtcatgatgtttcacttggacataagacttattaatgtggtcacttaaggggtaaggaatttaagaactggatgaggttatttcttcctttactcttcaaaatgtatttttgatacatcagtatgagaggacgtcccatcaacaaagcatcgatgatggacagtctcacactatttttatcatatgtttctttgtcagccttctgcttctaatcccagtaagcaacttggacaggcattttaaaagctgaagaaaagtgacattattttagctagtggtttttaatttattttttgttaagatataatgggtgattatataagttagatttatttatgatatcaacttgggtccaagatgatagttttagctagcttatgaacattgggttcacaaggcattgggtaagttagataaaatagcatatactttctctgcagggtaggtaagataggtcagtcaagttggtaatgcctgtccattaaccatttatgcatactaataaaattataagaataaaatcaaaaaaaaaaaa

SEQ ID NO: 56397 - DNA, 9074 bp, Homo Sapiens
ggcggcctagaagatggcggacggcgacagcggcagcgagcgcggcggcggcggtgggccgtgcgggttccagcccgcgtcccgcggcggcggcgagcaagagacgcaggagctggcctcgaagcggctggacatccagaacaagcgcttctacttagatgtgaagcagaacgccaagggccgcttcctcaagatcgccgaggtgggcgcgggcggttccaagagccgcctcacgctgtccatggcggtggccgccgagttccgcgactcgctgggcgacttcatagaacactacgcgcagctgggccctagcagccccgagcagctggcggctggcgccgaggagggcggcgggccgcggcgcgcgctcaagagcgaattcttggtgcgtgagaaccgcaagtactacctggacctcaaggagaaccagcgcggccgcttcctgcgcatccgccaaacggtcaaccgcggcggtggcggcttcggcgcgggccccgggccgggcggcttgcagagcggccagaccatcgcgctgcctgcgcagggcctcatcgagttccgcgacgcgctggcgaagctcatagacgactacggaggcgaggacgacgagctggcaggcggcccgggaggcggcgccgggggcccagggggcggcctgtatggagagctcccggagggcacctccatcaccgtggactccaagcgcttcttcttcgatgtgggctgcaacaaatacggggtgtttctgcgagtgagcgaggtgaagccgtcctaccgcaatgccatcaccgtacccttcaaagcctggggcaagttcggaggcgccttttgccggtatgcggatgagatgaaagaaatccaggaacgacagagggataagctttatgagcgacgtggtgggggcagcggcggcggcgaagagtcagagggtgaggaggtggatgaggattgaaacgggcagcttcccctacaggcctccacccaaccaccatccccttggctagagaattccctttcctgctcatccccagtgagctagtggagagggagcaagggaggccgcagagggaaaaaacaaaacgtaacacagttaagagaaataatcgtaagagaacagtgacggacaacttgagaaaagcagtcaagttccaaggaactgacagcaacctgcaaagaggaaaacagcatctcctcacctgcgtaaaattgtctcagcttctgttgtttctcaactgaggttcgtaaacccatcaggataatccctggagggaatagatccttgcacatccagggcaagaaacatgtccaagttacccagaccattgataacagttgcatttaggttgcacctgggtaatctggcataaaagatctctctaggcctcactgttgcggtgtctatcccttcacctccattgaaatcagcattttggatctaggtcttcatggaatccttgagaagagaggcctttacaattacccagttctgagggttcaggttcacgaaaagaaatgcaacttgggataatcatgaacaggttaaagataagatttcaagaagccatctaagaatacagaaccaaattggatccatttttttaaaaaaatggttttgcatggaacctggaccaaggcaaatgtcttttcttcgcagaattgttttccaggatgccagtggattcagatagcaatgcttggagtagaatccgttactaaaatagtttcaaagttgacaaaaaattttcaaagataaaagcagttttacattgggggttgctgaggtaggcacaagaaaaagtcaggcataaagcacaaggcagactgtttgagtggattggttgctgctcactaaagttgttcccctgatctctaaatatggaggtcattaccaagaaatgctttggtatgaatgagagccagatctccactgtgtgagccagtgaattatggctaattcggctgttacagccactggttggctggattttaaaccataaaacttgaagattacctacaaaagtaacagtgtggctataagcctgagctttaatggatatacatcctcacagaaaagttggaaataaccaaaactgaagtcttaatttaccttcagtttaatctgtggatttgttcaaatactaaagatcctcaggtccagaattccagcatcatttattcttttaaaatttttaagaacttgatccattgtatcagtacctcacaatcagagttggcaaatgatggatgagtgattcaagcagtgcacccggtggaagctgaaatccatctgtgaatggaactgaagtgaacgtgaatatgctgactatatcctggaagcatttttataccatcttgaaatttcaacaaactggcttttgccagttaatccagctgtctttcaagaataaaagttggggttttcaaggatcgcctcttctatattttaaatggattttcagtagaaatgatttttactaatcaagttaatcccaccccatcaaaaggtattcctagaaatgtcatagacctaggtaactttgaattgaatgggagctaacgttctttccaaagttttcaggtattctttgtgtgacaccttctcaaccaggaggcaagtaaccccgcctccacaatcttagtattttttttaaactgcatgcctgccccttatttgagctgcctttttaatttattgcatatcctttttattatcttattttggtattattcaatctatacaatctttttgtatttattgggaaatgagtaatatacaaaaaggttttcatgtatttgtggctgagagggcgggaaataattgtgtacataaaattaggcttttttaaaaaaatagattatgatgcagaatattgttgatcttagattaaaaagtggaagagccacaaacattggtgcccttttcagactatttctctactctcatcatccacagtagaatttttaaacagatttttttaaagcttttcttttaaatttttctccgttgcaaagaatgtttcctaaattgtatgggagcaatagtatttttgatgttttaatgacatccgtatacttgtactgtattttgtactacaaggcagctgtttttcaataatgtcctgctgtatttacctacgtgttttgagtgtctatttctttgctgcggagaacaaattcctaaatagttttagtaaaggagctgagaagctagcattaggtttgcagaaactatttaagtttcaactctgaggcagcaatgaaaatttaagttgcagctattagttgattgctgtaactttttcattttcaaaccatgtacaattcttgtatagaccaacttgttttcttgcttcagtggtggttctgttgctcagctgcagtgagccagttcaattttgcaaaggtgcagtacctctcctttttaaggggttggtttattcttttttctttttgtttggctgaattgcagtaactagccttgcctttctattctgtagaaatgacagggtcttcacaatccttcaccagtggctactaagctataattagctgaatagaaagaatgtggaagtggtctgaggcatatagagtatatgccaagaacactaccatatatggcatcagctttggttaccagagaaattttcttagtcattagaccatgtaacagtaatatatcatatgtaaatctttagatatcaatttgaaaatcctccaaaaaaaggagcaaagaatgcataagctatgtgttggcaaaagtaatttatattaaaattttgacctgcctatgtaagattaagtggtaatgtcatagtggtgggtttttaagtcttaaccaatctctaaggtttgtttctcctgcaagggatggttcatggcctctcttcccactgcaggaagattgcagaaggctgtggattaattgtagcatttcactgatcttcactccagtcactagggacaatagaaacctgcaaaacacagattcattcgtaaatattattaatagcttattaaaggaaatggtctttgttaattccagtcagataatggcattgtacagacatgggaaacaaccaatttttttgtttttcagttgttgctatgaatgattttgagcctttttttttaagcttggcaaacatcccagctaatcaaaatagtcatattcctgagaagtaggaaactaaaacttcttttcatataattgttagaaggtttgtttcccaaactaccatagttacaaaggtgaaaagccaaattttaggaacagaatcaaaagaataaaaatctgtgaagagatcctactactcttccttctatgttttggttttggtttctattgtccctatcatttcagcaagtggaacagcagcaagtttttcagtgcatatgctgcacaagaacaaaatataaatctgtatggcaccaaaaatcaaagtgaaaaccaaaccaaaaacccaaacaccctatgtaactatcggaggcatatacgtggtataaatgactgtagctgtgatacacacatggctacttgtcacatcactttccataattatttactgcaaaatgattgagaggcttttggtgcaggcagccgttaacctcctgcttcctttgttacctctggattactttgcagtaaattgcaggtcttttaagagatttaagcttcagttttctcaaaacaaaacaattatcctgtcttatctgaagatgcagggttgtgggcaaaagaggctggttataataatgccctcatattgagtggtctgtaaacggctgcacacttcaggcactgtagttgctgaagatgctttgttaaatgtgaccttgactggctttacaggggtgtagaatgtaatctacacaaggtgactttgcatctatcttgctcttgaggtggatgaaattgagaagctggagtgtgtaagccatgcacataagtattcttcactgtaaattttgttttcatttttaacccaattatggtactttatccaatgcacaactgatctctcagtagatattcatttgaaaatagtgtggccttgatcagtgagaaagggaaggagaaaagtgacttttttgcttatgtagaaatgactcatttgctgagagtttgtctttctgcagcactcttggtatatagtgatcggtctcctttttgattggggaaagttaatgtttttgaccctggagttaattcagttgagttatcttatatttttaggaagtatcagaattgctctgatgaataacaaagttgactgttttgatgtccaatctcaggttttagaatatagtggtgtaaagtcccactatttttaattcttaaaacaactttaatttcgtacaccctaaaagtcacatgcataaggcctgttcagagagcagagcctccatctttttgctccttttctactttgtacttcacttgaaaaaatatcaagtgactttacattgtatatttccattgtaaccctgacatttctcaaagataaagcactttttgatcatgaaatacatgaaatctttgtgtgatgtggatcatagtttctcaggctcccttagataattgcttatgaatattgttctaactctgtgtaagaagagtagaaatctttgctaatgttagaaggtttgtattattgatccagaatgcattttgctagtttccaatggatgggagagtaaataatgctgcattcacaatttaataagttactttcccttgagccttaaggtaactttttctttcctgtcaactacagcactgaagttatagtaagtgaatgagattatcagttttcagggttggttttagagtactgtaaatcaattagctgtcttcctaaagagttacaactcccattcagtatactggataatgggtgtgtgggtggggctggggagggcgggagatagtttgtagaaaagaaaaaagaaaaaaaaaaaaacacatttaccttaagaaaatacagacaaaaaagaataaagtatgtgtcatatgctccatttgagattccaaatgcggccgggcgtggtggctcacgcctgtaatcccagcactctgggaggctgaggtgggcgggtcagttcaggtcagcctggacaacatggtgaaaccccgtctctactaaaaatactaaaattagccgggcatggtggtgcatgcctgtagtcccagctacttgggaggctgaggcaggagaatggcatgaacccaggaagcggaggttgcagtgagccaagatcgcgccattgcactccagcctgggtaacagaacaagactccgtctcaaaaaataaataaataaattccaaatgtaaggtggaaatggcagattataacttcatttcccccatttttaacttagaaaaaacaaagtccttaattttcaagtattagccccccagaagtttcagcagatagctggactcttgaataatgatttcttttgatatgtctgactttgctatttaaagtctcctttcccagccctcagtcttaaaactcagttttattactgacggatttaacagactcttacttgaaaattgtccaattatcagtactgaaaattagatttggaaaatgaaaaaataataaaatcgcatcaagaaaacttattaccttagagattcccaattgatatctgtacccctgatccaagtaaggcctttatgaatgtattttatatttcctaaagaaatagggaatatgccatcagtgtaatcacctctattcacagtcatttaatttgaaaatctaactcatgtctcttgaattagacattccaattgggataggtagagtcatgttaaaacaatagaatagcaactgccatattggtagtttcactgctcaatatgatttctaataagagcagagctttattggaagctaaaactcatttttctccatagatgattctaacagtttaataaaaaagtataattatactttaagtgtcaacagattttgagtctagaagcaaatttcattttccttgtgttatatctaatatccattgacatgggtaagaaaactaattatgtctttttagtatgatgaaatgtgggcccagagtattggaaagaaagcaatagccctattcagtgtccactaggatggatattgcagaaggcatgagtttgtccttttttcccccttaccttaaataacacttcaatagctaactttttccaaaatatccatttaggccatctcttatttcttaaagccaaatatttcgtccccagtcttaactctgagttgcaagatcaggctggttggaagaatctttatatttagaaataggatggtgagtggtttgtttattctcttgtaaaattcctttttcagagacataactgcagggagagtcccaagagaactgaagaactggattatatcattaaacacatttgtgttgtaggaatttgggagtttcattttgaactgataagatattagacataaacccttgttccagcccacatgtgtcatccctgtgtacaaaagctctctggattctttttttttttttgagacggagtttcgctcttatcgtccaggctggagtgagtgtagtggcttgatctcagctcactgcaacctttgcctcccgggctcaagcgattctcctgcctcagcctcccaagtagctgggattacaagcatgtgccaccatgcccagctaattttttgtatttttagtagagacggggtttcaccatgttggccaggctggtctcgaactcctgacctcaagtgatctgcccgcctcagcttcccaaaatgctggaattacaggcatgagccatcacgcctagcctactctctgaatttctaaaagtcagtaggttgaccaaaaagtctagaaactggctttaagtcagtatgggacgtacttataaagagtccatggttttgcacgtttcggtagacaagtaaatctgagttatttttcaatgacttaccaatatttgaatagtaactaagatcgtcagtgtatctggacttctttttttgaagttctaaaacaattatagtagggatttattattttgggcctccatccagatgtttttccaagatcatttttaaaattcatttgtcttctgtttccagataacatactttccgttctataggaatcttcactgccaatcatagtatctaccagtggctttcttagactattcactccaaagctgggactgatgtcctgccagtagagaatctacagaaataatttgaatgaattaaaaccaaatcttgatagcaggagacagcttcctgatctagatgtacaattagagtttaggttggaaattactttaaaatgtgttttttggggatgtcttcaatctctgtgtaaatacccacatgcttatgcattgtaaaccaagtgtgtattcctgtgtatgaatttgtagaactgatttctgcttcaagagaagctgcacctttaattttataaggtcccctccacctgtaaccctataaatgtctgtaaataaaacactaaaatttgtagtgataggatcaatttgggaatatctgctgagagaccaaaaagttcatttttttaagtaccttggttaaagagtaaagattattcctcttattttttaaagaagaatgcactttaacaaacatagagctgcatgggcaattcaaacaaatctgtgaagtgcagtacccattcagaaatcacacttcctgaaaaccgttcaaaagcagagtccagacgggctgttgatctcactgcctgtaggttgaagctcagattctgatcaattttgagaggagcagggctgcttcaaaagagcaatgtgaatacagtcagaagcttcagactggtctgtaaaaatggcgggtcccgtatttaccactaactagcaaaactgacagaaaaactcacagagaaaaaatgtaagaatccttcctgctggtgtgcactccttacaatagacttttgcaaatggagttttacagtctatatttaaaaaaaattgtatgtttgtaacaaataaagtatgcagaaaagtgaatgacaaaaaaa

SEQ ID NO: 56398 - DNA, 5871 bp, Homo Sapiens
atggataccttgagagctgttccccttttttcaatatctggcctcttctcctttccctacagggtctcccatgggattgctgggatcttgctgggtgagatggcagtgtgtgcaaaaaagcgccccccagaagaagaaaggagggcgcgggctaatgaccgagaatacaatgagaaattccagtatgcgagtaactgcatcaagacctccaagtacaatattctcaccttcctgcctgtcaacctctttgagcagttccaggaagttgccaacacttacttcctgttcctcctcattctgcagttgatcccccagatctcttccctgtcctggttcaccaccattgtgcctttggttcttgtcctcaccatcacagctgttaaagatgccactgatgactatttccgccacaagagcgataaccaggtgaataaccgccagtctcaggtgctgatcaatggaatcctccagcaggagcagtggatgaatgtctgtgttggtgatattatcaagctagaaaataaccagtttgtggcggcggatctcctcctcctttccagcagtgagccccatgggctgtgttacatagagacagcagaacttgatggcgagaccaacatgaaagtacgtcaggcgattccagtcacctcagaattgggagacatcagtaagcttgccaagtttgacggtgaagtgatctgtgaacctcccaacaacaaactggacaaattcagcggaaccctctactggaaggaaaataagttccctctgagcaaccagaacatgctgctgcggggctgtgtgctgcgaaacaccgagtggtgcttcgggctggtcatctttgcaggtcccgacactaagctgatgcaaaacagcggcagaacaaagttcaaaagaacgagtatcgatcgcctaatgaataccctggtgctctggatttttggattcctggtttgcatgggggtgatcctggccattggcaatgccatctgggagcacgaggtggggatgcgtttccaggtctacctgccgtgggatgaggcagtggacagtgccttcttctctggcttcctctccttctggtcctacatcatcatcctcaacaccgttgtgcccatttcactctatgtcagtgtggaggtcatccgtctgggccacagctacttcatcaactgggataagaagatgttctgcatgaagaagcggacgcctgcagaagcccgcaccaccaccctaaacgaggagctgggccaggtggagtacatcttctccgacaagacgggcaccctcacccagaacatcatggttttcaacaagtgctccatcaatggccacagctatggtgatgtgtttgacgtcctgggacacaaagctgaattgggagagaggcctgaacctgttgacttctccttcaatcctctggctgacaagaagttcttattttgggaccccagcctgctggaggctgtcaagatcggggacccccacacgcatgagttcttccgcctcctttccctgtgtcatactgtcatgtcagaagaaaagaacgaaggagagctgtactacaaagctcagtccccagatgagggggccctggtcaccgcagccaggaactttggttttgttttccgctctcgcacccccaaaacaatcaccgtccatgagatgggcacagccatcacctaccagctgctggccatcctggacttcaacaacatccgcaagcggatgtcggtcatagtgcggaatccagaggggaagatccgactctactgcaaaggggctgacactatcctactggacagactgcaccactccactcaagagctgctcaacaccaccatggaccaccttaatgagtacgcaggggaagggctgaggaccctggtgctggcctacaaggatctggatgaagagtactacgaggagtgggctgagcgacgcctccaggccagcctggcccaggacagccgggaggacaggctggctagcatctatgaggaggttgagaacaacatgatgctgctgggtgcaacggccattgaggacaaacttcagcaaggggttccagagaccattgccctcctgacactggccaacatcaagatttgggtgctaaccggagacaagcaagagacggctgtgaacatcggctattcctgcaagatgctgacggatgacatgactgaggttttcatagtcactggccatactgtcctggaggtgcgggaggagctcaggaaagcccgggagaagatgatggactcatcccgctccgtaggcaacggcttcacctatcaggacaagctttcttcttccaagctaacttctgtcctggaggccgttgctggggagtacgccctggtcataaatggtcacagcctggcccacgcactggaggcagacatggagctggagtttctggagacagcgtgtgcctgcaaagctgtcatctgctgccgggtgacccccttgcagaaggcacaggtggtagaactggtcaagaagtacaagaaggctgtgacgcttgccattggagacggagccaatgatgtcagcatgatcaaaacggctcacattggtgtggggatcagtgggcaggaagggatccaggctgtcttggcctccgattactccttctcccagttcaagttcctgcagcgcctcctgctggtgcatgggcgctggtcctacctgcgaatgtgcaagtttctttgctatttcttctacaaaaactttgctttcaccatggtccacttctggtttggcttcttctgtggcttctcagcccagaccgtctatgaccagtatttcatcaccctgtataacatcgtgtacacctccctgccagtcctggctatgggggtctttgatcaggatgtccccgagcagcggagcatggagtaccctaagctgtatgagccgggccagctgaaccttctcttcaacaagcgggagttcttcatctgcatcgcccagggcatctacacctccgtgctcatgttcttcattccctatggggtgtttgctgatgccacccgggatgatggcactcagctggctgactaccagtcctttgcagtcactgtggccacatccttggtcattgtggttagcgtgcagattgggctcgacacaggctactggacggccatcaaccacttcttcatctggggaagccttgctgtttactttgccatcctctttgccatgcacagcaatgggctcttcgacatgtttcccaaccagttccggtttgtggggaatgcccagaacaccttggcccagcccacggtgtggctgaccattgtgctcaccacagtcgtctgcatcatgcccgtggttgccttccgattcctcaggctcaacctgaagccggatctctccgacacggtccgctacacacagctcgtgaggaagaagcagaaggcccagcaccgctgcatgcggcgggttggccgcactggctcccggcgctccggctatgccttctcccatcaggagggcttcggggagctcatcatgtctggcaagaacatgcggctgagctctctcgcgctctccagcttcaccacccgctccagctccagctggattgagagcctgcgcaggaagaagagtgacagtgccagtagccccagtggcggtgccgacaagcccctcaagggctgaaggccgaggatggatgccctgtgccagtgaccagagcacccagggctggccagtcactgagggaacagcgtctcggaactgctggtcctcattccttgcttcccgtccccccggtagactctgtcctgctggtcccaccacacatggctgggacatctgttcccagctgtaggcccttccaccagctggggagctagagggagcaggcccaagggcagagcagaggctgaggcacggggagccagccccactcggggaccagaagtggaaccaaaaacaagaaaaaactgtgagagattgtgtctgcccctgccctgcctgggacccacagggagactataatctccttatttttttactcctactccccagaggggccctagtgcctctgttcctgaattacataagaatgtaccatgccgggaagccagagacctgcaggggcctcggcccctcacatcgtgtatgtctctccttgatttgtgttgtgtccagtttggttttgtctttttttatttggcaagtggaggaggcttttatgtgacttttatgttgtggttggtgtcttaactctcctgggaaaaggaggctggcacacactgggatgccgcagcctggccggctgtggggtggtttgggaggatccatgtcggctctgcctgcagtgaccagtgctctgtggggcagaggagctgaccagggagggaggtacccatgagcagagggtagtgggagagtgtaaaggagggtttggtcctgtctgcttcctcaccttgagagtaaagtgctgccctctgcccccaacacacacacatatcaattcctggattccttagtcctgctggccttgggctggagcctaggaaagtggcccccaaatccttagtgagctaaagctgggtctgaaatttggtcagtggggaggggtagttttcttttcttttttctttttctttttttctttttttttttgagatggagtctcactcttgtcacctaggcaagagtgcaatggcacaatctcagctcactgcaacctccacctcctgggttcaagcgattctcctgcctcagcctcctgagtagctgggattacaggcacacaccaccacgcttggttaatttttgtatttttagtagagatgtttcaccatgttggccaggctagtcttgaattcctgacctcctgacctgcccacctcaacctcccaaagtgctgagattacaggcgtgagccaccacacccagctcagggaggcgtagttttctttaattttaaatttaaacccaagtttattggcagactcccttttgacctccctttgcctccccatctggtgctttcttgcatctacaccccagggccctgtggtggggctgcagggggaagctgtgcacctgagatgaggctggaacgggaattggcctctctgctcccttcttcagtaagcaaggagccccgcccctcaggcccagcctctggcaagaggtggtggaatccttgtgccgggtagtagaggaggataagggcaaaaccaggcccaggccagtgcctggcttggtctggatgggacactgtcagagtttggccacagcctgtcctttacttcatccacacctatgaagctattccctaaataaggcatttcccaagttagtcgctacctaatcagccttgagaagaatcctttcctcttctttgatagtgggtcgggggattcttcaggaatggtttggagctgggagtgggtagggggattttaaatgttccatatgggagccccaaaggaactggatgggctgcagtgaggtgggggcgggtgggcagggaatgggagaggggaagtcttggcagggaaatcccttttggccacacagtttacaaacccagtatcatgtctgtctgtgtgtctctcaaggtgagagtctgatttttataccaaagaggaaatgatttttttcatattttgtttgtctatattatataaatatatatatacagttatatatatatatattattttttggttctctctcgttttttagggagggaagaaagtaccaagttgcattgagctgtaattaaggaacattataatttatgacacatttctatacttgcaaaaattatatcattttatggatataagagaaaaatgcctttttataaaatttcaatttctgaaaaaaaaaaaaaaa

SEQ ID NO: 56399 - DNA, 7445 bp, Homo Sapiens
tctgcggcgctcggagcctcccttgcgatcccacggccgggactgcccggagtgcatgggcgcgggccagggacgctgagcggtcgcgccatggagggcgccgagccccgcgcgcggcccgagcgcctggccgaggccgagacgcgggcggcggacggcgggcgcctggtggaggtgcagctgagcggcggcgccccgtggggcttcaccctgaagggcggccgcgagcacggcgagccgctggtcatcaccaagattgaagagggcagtaaagccgcggcggtcgacaagttactggctggagatgagatcgtcggcatcaatgacattggtctctcagggtttagacaggaagcgatttgcctggtgaaggggtcccataagaccctgaagctggtcgtcaaaaggaggagcgagctgggctggaggcctcactcctggcatgccaccaagttctctgacagccaccccgagctagcggcctccccattcacctccaccagcggctgtccttcctggtccggccgacaccacgcgagttcttcctcccacgacctgtccagttcctgggagcagacgaacctacagcgcaccttagatcacttcagctccttggggagcgttgacagcctggaccacccctccagtcgcctctcggtggccaagtccaacagcagcatcgaccacctgggcagccacagcaagcgcgactcggcctacggctccttctccaccagctctagcactcctgaccacaccttgtccaaagccgacacgtcctccgcagagaacatcctctacactgtgggcctctgggaggctcccaggcagggtggccggcaggcccaggccgcaggcgaccctcagggctcggaggagaagctcagttgtttcccgcccagggtccccggtgacagcggcaaaggccccaggccagagtacaatgccgagcccaagctggctgcccctgggaggtccaattttgggccagtctggtatgttcccgataagaagaaagcaccatcatccccacctcctccccctccccctctccgcagtgacagctttgctgccaccaagagccacgagaaggcccagggccctgtgttctcagaggcggctgcggcacagcactttacggccctggcccaggctcagcctcgtggtgaccggagaccagagctcaccgatcggccttggaggtcagcacacccggggagcctcgggaagggatcgggaggcccgggctgcccacaggaggcccacgcagacggcagctggccgccctccaaggatggagcttccagtaggctgcaggcctctctgtccagctcagatgtgcgcttccctcagtctcctcatagcggccgacaccctcccctatacagcgaccacagccccctctgtgctgacagccttgggcaggagccaggggctgccagcttccagaacgacagccctcctcaggtgagggggctcagcagctgtgaccagaagctggggagcggctggcagggtccccggccctgtgtgcagggagacctgcaagcagcacagctctgggcgggatgctggccttctgacacagcccttggagccctcgagagtcttcccccacccacggtgggccagagcccacgccatcacctacctcagcctgagggtcctccggatgcccgcgagacaggacggtgttacccgctggacaaaggggccgagggctgctccgcgggagcccaggagcctcccagggccagccgtgcagaaaaagccagccagaggctggcagccagcatcacgtgggcagatggggagagcagcaggatctgcccgcaggagacgcccctgttgcactccctgacccaggaggggaagcgccggcctgagagcagtccagaggacagcgccaccagaccgccaccgttcgacgcccacgtgggcaagcccacccgaagaagcgaccgctttgccaccaccctgcggaatgagatccagatgcatagagccaagctgcagaagagccggagcacagtggctctgactgcagcaggggaggcggaggatggcaccggccgctggagggccgggttgggaggtggcacccaggaaggacccctcgctggcacctataaagaccacctgaaagaggcccaagcccgggtcctgagggccacgtccttcaagcgccgcgacttggaccccaacccaggagacctatacccggagtcactggaacaccggatgggggatccagacactgtcccccacttctgggaggcaggcctggcccagccaccctcatctacaagtggcgggccccacccgccccgcatcggaggccggagacggttcacagctgagcagaaattgaagtcctactcggaacctgagaagatgaacgaggtgggcctcacgaggggctacagtcctcaccagcaccccaggacatctgaggatactgtgggcacgtttgctgacaggtggaagttttttgaggaaacgagcaaacctgttccccagaggcctgcccagaagcaagctcttcacggaatcccgagagacaagccagagaggccgcggacagcgggccgcacatgtgagggcacggagccctggtcgcgcaccacctcccttggggacagcctcaacgctcacagcgcagcggagaaggcagggacttcagacctgccgcggaggctcggcacctttgcagagtatcaggcctcttggaaggaacagaggaaacctctggaggccaggagctctgggcgctgccactcagcggatgacatcctggatgtgagcctggacccacaggagaggccgcagcacgttcatgggaggtcccggtcttcaccgtccacagaccactacaagcaggaagcttctgtcgaactgcgaaggcaggcaggggaccccggcgagcccagagaagagcttccctccgcagtccgggccgaggagggacagtccacgccgagacaagcagatgcccagtgtcgggaaggcagcccaggatcacagcagcacccaccgagtcagaaggcaccgaacccacccacattctctgaactatctcactgccggggagccccagagctgccccgggagggccggggccgagcgggaaccctacctcgagattatagatactcggaggagagcaccccagcagacttgggaccccgagcccagagccctggctcacccctgcatgctcgaggacaagactcgtggccagtgagctcagccctgctctccaagaggccagccccacagaggccaccgccacccaagcgcgagcccaggagatacagggccacagacggcgcacctgctgacgcccccgtgggcgtcctcggcaggcccttcccaacgccatcccctgcgtccctggatgtgtatgtggcccgcctgtccctctcccacagcccctctgtgttcagcagtgcccagccccaggacaccccgaaggccactgtctgtgagcgtggaagccagcatgtgagcggggacgcatcacgtcctctgccagaagcactgctccctcccaagcagcagcacctgcgcctgcagacggccaccatggagacctcgcgctccccctcgccccagttcgccccccagaaactgacggacaaacctcccctgctcatccaggatgaggattcaaccagaattgagcgggtgatggacaacaacaccacggtgaagatggtgcccatcaagatcgtgcactcggagagccagccagagaaggagagccgccagagcctggcatgccccgccgagccacctgccctgccccacgggctggagaaagaccagatcaagacgctgagcacatctgagcagttctactcgcgcttctgtctgtacacgcggcagggtgctgagcccgaggccccacatagggcccagccggctgagccccagcccctgggcacccaggtgccccccgagaaagaccgctgcacctcccctccagggctcagctacatgaaggccaaagagaagactgtggaagacctgaagtcggaggagctggccagggagatcgtggggaaggataagtccctggccgacatcctggatcccagtgtgaagatcaaaaccactatggacttgatggaaggcatcttccccaaagacgagcacctcctggaagaagcccagcaacggaggaagctgctccccaaaatcccctctcctagaagcacagaggagaggaaagaggagcccagcgtgcctgcggccgtgtccctggccaccaattctacctactacagcacgtcggcccccaaggcggagctgctgatcaagatgaaggacctgcaggagcagcaggagcacgaagaggattcgggaagcgacttggaccacgacctgtcggtgaagaagcaggagctcatcgagagcatcagccgcaagctgcaggtgctccgggaggcccgcgagagcctgctggaggacgtgcaggccaacaccgtgctgggggccgaggtggaggccatcgtgaaaggcgtctgcaagcccagcgagtttgacaagttccggatgttcattggagacctggacaaagtggtgaacctcctgctgtcgctgtcaggccgcctggcccgggtggagaatgccctcaataatttggacgacggcgcttctcccggtgatcggcaatcactgcttgagaagcagagagtcctgatccagcagcacgaggacgccaaggagctcaaggagaacctggaccgccgcgagcgcatcgtctttgacattttggccaactatctgagcgaggagagcctcgcggactatgagcacttcgtgaagatgaagtcggccctcatcatcgagcagcgggagctggaagataaaatccaccttggtgaagagcagctgaagtgcttattggacagccttcagcccgaaaggggcaaataagagaccagtccccggtggaggaggggcacggggcctccgagctccagctccgttcccaaggatactcgtgaagaccccatctgtgttcatggcctggaaagagacttctcccatagcaaagaggctgttataaaagcaataacttttgtgtttgtgtgggatgatttatttaattttttagtttcccctttgattgctgagagccattttcctttacacataactacacctgacaccaggctctgctggatgtgagtttccactgcatgggctgtgggctgggcctgtggtgcctgccgagtggtcactgtcagtgggaaacccgttgttcctcccgtcttcagatgctgagccaactgcttggacagcagccagcgcgtcatgacgtgcatgagagggggaccctggtgctcatcttctcttgtcattcatccaggcatgggctgccaggttttgtccctgctcgttcaacagtgtgagcatttgtctctgttatctaatgatgttctctgacccagcagaaatcatcatcatgatgatgataatttattaactttttggaagggtgaatagtttcctaatggttaaaaaccaactgtgaaaggaaccacctgtgtggttgggttcactcattctcagattaaattgccacttaaagaaataacgtgcatgctttaaaaaacacagtcacgcaccaagcaggcaaatagctttagtccttctcacctcacatcacagttgttctgcaaagtaaaattttttggttaagagcgtgtccagtagtaatgtgcttgttagctgtttctcaagaccaacagaagattttttcagttactttccccccatgtattttgtatgcatatgattgtccgtgataattggctacttttccattgtttcctccttaaatcgtttagcatggcatgagggccacattccatggacgggaagaccccttcctcttcagaggtcccgtggactacacagctcctgagcttgatctttttctgccatgaagtttaaagattctatgcccatttccttgattgaaatggcaggattctaaagagagcctggtttgttaaaagaaaacactgtcatgctgtcagttcccaattgacaagtcacagactgggagaaaatatttgcaaatcgtgtatctgacaaaaggtttgtgtccaggatgtacaaagaactctcaaaccggatagtaagaaaacaaacagcccaagtgaaaagcaggcaaaagacttgaatagacacttcaccaaagagcatacacgcgtggcaaacaagcacacgaaaagacgttcagccgccgatggcttggttataatttataacttacttatttttatctaataattgtagattcagtgtatttcttcaaaaaatgtttaattaaatgcatgttaatggtgagtgaatcccttgggtgacttcgtgtttaggtcgtattagggcatttgttggatcaacggatcattttaaccctgacttccccttattcccataaaagaagttttccagtggaatggagatttcattttgtcagcagcagtgaccacagccttaccaaagcagacgcgtgcgcgtgcacagatgcacacacacagatgtcttaaaagactagaatccacacttcctgagccagaggggccgtgttgacggtaatgcattctctatagagccaagtccaaactggcaagctcaatgatgcaggcaataaaccgcctttttggcagcctaccaatgccaaaaggataaatgtctttccaaaagtgtgtattcctgttaaattaagctcttgctaacttgaaaaatccctgttctgccagcgaagcttcctcctcctctccagctggtagtcacttgcgtgaatgctggtcagtctgaaaaggtgaagctggctgtgcacttacccccatctttctccctcggggagacgacccaaggaatttcagagtattttgtttggcagagcttttacctgttattctttgccctcaaatacagtattgtggtcattttgatgatatgtgtgtaaaatgtgaataatccaattggtgtctgtactcagccttttgatgtctttttaggactttctcttctacacagcaatacgtcgtgctcgagtatccttgtagcaaagcacatagagccagctgtcctgtcagttcccctgtttgcctctgaaacgtctggttagtggggacccaaagattctagtgagtcaacatccataactctgtatctagttgtattattcatagaaaatcaatctggtgctaatggttggccctggtgttgttgggtggcagctgctccttcgccctcttgtagtgtggctgtggagggctctgcctatggggggtggcctgtggcttgtatccttcagtccaccacagcaaatgtgtgtagatttcatgctcgacacttaccactcacctatcaacagatcatcctgcttgactgtaacaaaataaatagtgtctcttcaagtg

SEQ ID NO: 56400 - DNA, 5801 bp, Homo Sapiens; identical to SEQ ID NO: 29554

SEQ ID NO: 56401 - DNA, 5925 bp, Homo Sapiens
gcgctgcccgcctcgtccccacccccccaacccccgcgcccgccctcggacagtccctgctcgcccgcgcgctgcagccccatctcctagcggcagcccaggcgcggagggagcgagtccgccccgaggtaggtccaggacgggcgcacagcagcagccgaggctggccgggagagggaggaagaggatggcagggccacgccccagcccatgggccaggctgctcctggcagccttgatcagcgtcagcctctctgggaccttggcaaaccgctgcaagaaggccccagtgaagagctgcacggagtgtgtccgtgtggataaggactgcgcctactgcacagacgagatgttcagggaccggcgctgcaacacccaggcggagctgctggccgcgggctgccagcgggagagcatcgtggtcatggagagcagcttccaaatcacagaggagacccagattgacaccaccctgcggcgcagccagatgtccccccaaggcctgcgggtccgtctgcggcccggtgaggagcggcattttgagctggaggtgtttgagccactggagagccccgtggacctgtacatcctcatggacttctccaactccatgtccgatgatctggacaacctcaagaagatggggcagaacctggctcgggtcctgagccagctcaccagcgactacactattggatttggcaagtttgtggacaaagtcagcgtcccgcagacggacatgaggcctgagaagctgaaggagccctggcccaacagtgacccccccttctccttcaagaacgtcatcagcctgacagaagatgtggatgagttccggaataaactgcagggagagcggatctcaggcaacctggatgctcctgagggcggcttcgatgccatcctgcagacagctgtgtgcacgagggacattggctggcgcccggacagcacccacctgctggtcttctccaccgagtcagccttccactatgaggctgatggcgccaacgtgctggctggcatcatgagccgcaacgatgaacggtgccacctggacaccacgggcacctacacccagtacaggacacaggactacccgtcggtgcccaccctggtgcgcctgctcgccaagcacaacatcatccccatctttgctgtcaccaactactcctatagctactacgagaagcttcacacctatttccctgtctcctcactgggggtgctgcaggaggactcgtccaacatcgtggagctgctggaggaggccttcaatcggatccgctccaacctggacatccgggccctagacagcccccgaggccttcggacagaggtcacctccaagatgttccagaagacgaggactgggtcctttcacatccggcggggggaagtgggtatataccaggtgcagctgcgggcccttgagcacgtggatgggacgcacgtgtgccagctgccggaggaccagaagggcaacatccatctgaaaccttccttctccgacggcctcaagatggacgcgggcatcatctgtgatgtgtgcacctgcgagctgcaaaaagaggtgcggtcagctcgctgcagcttcaacggagacttcgtgtgcggacagtgtgtgtgcagcgagggctggagtggccagacctgcaactgctccaccggctctctgagtgacattcagccctgcctgcgggagggcgaggacaagccgtgctccggccgtggggagtgccagtgcgggcactgtgtgtgctacggcgaaggccgctacgagggtcagttctgcgagtatgacaacttccagtgtccccgcacttccgggttcctctgcaatgaccgaggacgctgctccatgggccagtgtgtgtgtgagcctggttggacaggcccaagctgtgactgtcccctcagcaatgccacctgcatcgacagcaatgggggcatctgtaatggacgtggccactgtgagtgtggccgctgccactgccaccagcagtcgctctacacggacaccatctgcgagatcaactactcggcgatccacccgggcctctgcgaggacctacgctcctgcgtgcagtgccaggcgtggggcaccggcgagaagaaggggcgcacgtgtgaggaatgcaacttcaaggtcaagatggtggacgagcttaagagagccgaggaggtggtggtgcgctgctccttccgggacgaggatgacgactgcacctacagctacaccatggaaggtgacggcgcccctgggcccaacagcactgtcctggtgcacaagaagaaggactgccctccgggctccttctggtggctcatccccctgctcctcctcctcctgccgctcctggccctgctactgctgctatgctggaagtactgtgcctgctgcaaggcctgcctggcacttctcccgtgctgcaaccgaggtcacatggtgggctttaaggaagaccactacatgctgcgggagaacctgatggcctctgaccacttggacacgcccatgctgcgcagcgggaacctcaagggccgtgacgtggtccgctggaaggtcaccaacaacatgcagcggcctggctttgccactcatgccgccagcatcaaccccacagagctggtgccctacgggctgtccttgcgcctggcccgcctttgcaccgagaacctgctgaagcctgacactcgggagtgcgcccagctgcgccaggaggtggaggagaacctgaacgaggtctacaggcagatctccggtgtacacaagctccagcagaccaagttccggcagcagcccaatgccgggaaaaagcaagaccacaccattgtggacacagtgctgatggcgccccgctcggccaagccggccctgctgaagcttacagagaagcaggtggaacagagggccttccacgacctcaaggtggcccccggctactacaccctcactgcagaccaggacgcccggggcatggtggagttccaggagggcgtggagctggtggacgtacgggtgcccctctttatccggcctgaggatgacgacgagaagcagctgctggtggaggccatcgacgtgcccgcaggcactgccaccctcggccgccgcctggtaaacatcaccatcatcaaggagcaagccagagacgtggtgtcctttgagcagcctgagttctcggtcagccgcggggaccaggtggcccgcatccctgtcatccggcgtgtcctggacggcgggaagtcccaggtctcctaccgcacacaggatggcaccgcgcagggcaaccgggactacatccccgtggagggtgagctgctgttccagcctggggaggcctggaaagagctgcaggtgaagctcctggagctgcaagaagttgactccctcctgcggggccgccaggtccgccgtttccacgtccagctcagcaaccctaagtttggggcccacctgggccagccccactccaccaccatcatcatcagggacccagatgaactggaccggagcttcacgagtcagatgttgtcatcacagccaccccctcacggcgacctgggcgccccgcagaaccccaatgctaaggccgctgggtccaggaagatccatttcaactggctgcccccttctggcaagccaatggggtacagggtaaagtactggattcagggtgactccgaatccgaagcccacctgctcgacagcaaggtgccctcagtggagctcaccaacctgtacccgtattgcgactatgagatgaaggtgtgcgcctacggggctcagggcgagggaccctacagctccctggtgtcctgccgcacccaccaggaagtgcccagcgagccagggcgtctggccttcaatgtcgtctcctccacggtgacccagctgagctgggctgagccggctgagaccaacggtgagatcacagcctacgaggtctgctatggcctggtcaacgatgacaaccgacctattgggcccatgaagaaagtgctggttgacaaccctaagaaccggatgctgcttattgagaaccttcgggagtcccagccctaccgctacacggtgaaggcgcgcaacggggccggctgggggcctgagcgggaggccatcatcaacctggccacccagcccaagaggcccatgtccatccccatcatccctgacatccctatcgtggacgcccagagcggggaggactacgacagcttccttatgtacagcgatgacgttctacgctctccatcgggcagccagaggcccagcgtctccgatgacactggctgcggctggaagttcgagcccctgctgggggaggagctggacctgcggcgcgtcacgtggcggctgcccccggagctcatcccgcgcctgtcggccagcagcgggcgctcctccgacgccgaggcgccccacgggcccccggacgacggcggcgcgggcgggaagggcggcagcctgccccgcagtgcgacacccgggccccccggagagcacctggtgaatggccggatggactttgccttcccgggcagcaccaactccctgcacaggatgaccacgaccagtgctgctgcctatggcacccacctgagcccacacgtgccccaccgcgtgctaagcacatcctccaccctcacacgggactacaactcactgacccgctcagaacactcacactcgaccacactgcccagggactactccaccctcacctccgtctcctcccacgactctcgcctgactgctggtgtgcccgacacgcccacccgcctggtgttctctgccctggggcccacatctctcagagtgagctggcaggagccgcggtgcgagcggccgctgcagggctacagtgtggagtaccagctgctgaacggcggtgagctgcatcggctcaacatccccaaccctgcccagacctcggtggtggtggaagacctcctgcccaaccactcctacgtgttccgcgtgcgggcccagagccaggaaggctggggccgagagcgtgagggtgtcatcaccattgaatcccaggtgcacccgcagagcccactgtgtcccctgccaggctccgccttcactttgagcactcccagtgccccaggcccgctggtgttcactgccctgagcccagactcgctgcagctgagctgggagcggccacggaggcccaatggggatatcgtcggctacctggtgacctgtgagatggcccaaggaggagggccagccaccgcattccgggtggatggagacagccccgagagccggctgaccgtgccgggcctcagcgagaacgtgccctacaagttcaaggtgcaggccaggaccactgagggcttcgggccagagcgcgagggcatcatcaccatagagtcccaggatggaggacccttcccgcagctgggcagccgtgccgggctcttccagcacccgctgcaaagcgagtacagcagcatcaccaccacccacaccagcgccaccgagcccttcctagtggatgggctgaccctgggggcccagcacctggaggcaggcggctccctcacccggcatgtgacccaggagtttgtgagccggacactgaccaccagcggaacccttagcacccacatggaccaacagttcttccaaacttgaccgcaccctgccccacccccgccacgtcccactaggcgtcctcccgactcctctcccggagcctcctcagctactccatccttgcacccctgggggcccagcccacccgcatgcacagagcaggggctaggtgtctcctgggaggcatgaagggggcaaggtccgtcctctgtgggcccaaacctatttgtaaccaaagagctgggagcagcacaaggacccagcctttgttctgcacttaataaatggttttgctactgctaaaaaaa

SEQ ID NO: 56402 - DNA, 5714 bp, Homo Sapiens
gtccagcggagttagcggcggagaatgtgagccgaggcgcgagccatgctgtcagcgacggcgggcggctcagggctcctccacgactcctctcctcagcagccgggcgcccgcgtcgctgccaccgccggaagacagacgtcccccaaaacccctcgcctggctcggacccacggagccggcagcccagcactccgatgggagcttgcctgattgtcaacccatcggcctggaccccagagcccacccagttgagcgtgtgcagagggccccgagtgcggggcgacgctcaggccgttgcagagaccaccctggagatgctgatgaagacaggcctttcctgctgagcccagcctatcttcgcagcctgctcaggcgctgtccacgccccgaggcctgggctcaggccgaagttgctccacagcacccccagctgacagccagcgactggcagagcccccaggcacgggggccctctctcttccagagatctccagtgtgacagcccaggcggcagagccgagggtcctggtcccggcttctcgcaccctcatgtcagccccggccccgcccggcggcctgcggaggacaaggtcaggatgcgtgtgaagccccagggcctggtggtgacttccagtgccgtgtgcagctctcctgactacctccgggaacccaagtactaccccggcggcccccccaccccccggcccctgcttcccacccggccccctgccagcccacctgacaaggccttctccacccacgccttctccgagaacccacgcccacccccacgccgggaccccagcacccggcgcccaccagtccttgccaagggggacgacccgctgcccccacgggcagcccgtcctgtctcacaggcccgctgccccacaccggtcggagacggcagcagctcccgacgctgctgggacaacgggcgggtgaacctgcgaccagtggtgcagctgattgacatcatgaaggacctgacacgcctctcccaggacctgcagcacagtggtgtacacctggactgtggtgggctccgactgagccgcccgcctgcaccgccacccggcgacctacagtacagcttcttctcctcacccagtttggccaacagcatccgtagccctgaggagcgggccaccccacacgccaagtcggagcggcccagccatcccctctacgagcctgagcctgagcctagggacagtccccagcctggccaaggccatagtcccggagccacggctgcggccacgggtctgcccccagagcctgagccagacagcactgattactcagaacttgctgacgccgacatccttagtgagctggcctccctcacttgcccagaggcccagctgctagaggcccaggccctcgagccaccatcgcccgagccggagcctcagctcctggacccccagccccgcttcctggacccgcaggcactagagccgctcggggaagctctggagctgccacccctgcaacctcttgctgatcctctggggctgccgggcctggctctccaggccctggacaccctgcctgactccttggagtcgcagctgcttgacccccaggcactcgaccccctgcccaagctgcttgacgtcccaggtcgccgtctggagccccagcagcccctggggcactgcccactggccgagcccttgcgcctggacttgtgctcaccgcacggcccccccgggcctgagggtcaccccaagtacgccttgcggcgcactgataggccaaagatcctgtgtcgccggcggaaagccggacggggacgcaaggcagacgccggacccgagggccgcctactgcccctgcctatgcccacggggctggtggctgccctggccgaacccccaccaccaccgcctcctccaccccctgccctgccaggcccaggcccggtctcagtcccagagttgaagccggaatcttcccagaccccagtggtctctacccgcaaaggcaagtgccggggcgtgcggcgcatggtggtgaagatggccaagatccccgtatcgctggggcggcggaacaagaccacatacaaagtgtcttccttgagcagcagcctgagcgtggagggcaaggagctgggcctgcgcgtgtcggctgagcccaccccgctgctgaagatgaagaacaatgggcggaacgtggtagtggtcttcccacccggtgagatgcccattattctcaaacgtaagcgcggccgccctcctaagaacctgctgctgggtcccggcaagcccaaggagccagctgtggtggcggccgaggcagccactgtggcagcggccaccatggccatgccagaggtaaaaaaacgacggcggcggaagcagaagctggcatctccccagccatcctatgcagcagacgccaacgacagcaaggccgagtactcagacgtcctggccaagctggccttcctgaaccgccagagccagtgcgctggacggtgctcaccgccccgctgctggacacccagtgagccggagtcggtgcaccaggcccccgacacccagagcatctcccacttcctgcatcgtgtgcagggcttccggcggcgtgggggcaaagcaggcggttttggtggccggggtgggggccatgcggccaagtcagcccgatgctccttcagtgacttctttgagggcatcggcaagaaaaagaaggtggtggccgtggcagccgctggggtcgggggcccgggccttactgagttggggcacccacgcaaacggggccggggggaggtagacgctgtgactgggaagccaaagcgcaagagacggtcccggaagaatgggactctgttcccagagcaggtgcccagtggcccaggctttggggaggcaggtgctgagtgggccggggataagggtggtggctgggcccctcaccatgggcacccaggcggacaagctggccgaaactgtgggtttcaggggaccgaggcccgggcctttgcctccactgggctggagagtggagcctcaggccgtggcagctactacagcacgggtgcaccctcaggccagaccgagctcagccaggagcgccaaaacctcttcaccggctactttcgctcgctgctcgattcggatgactcctccgatctcttggactttgccctctcagcctctcgcccagagtcccggaaggcatcgggcacctatgcagggccacccaccagtgccctgcctgcccagcggggcctggccaccttccctagccggggagccaaggccagcccagtggcagtgggtagcagcggggctggggcggacccctcctttcagcctgtcctgtccgcgcgccagaccttcccaccaggacgagcagcaagctatgggctaactccagccgcttcagactgccgggcagccgagaccttccccaagctggtgcccccgccctcagccatggcccgctcacctaccacccacccgcctgccaacacctacctgccccagtacggcggctatggggccggacaaagcgtattcgccccaactaagccctttacaggccaggactgcgctaacagcaaggactgcagcttcgcctatggcagtggcaacagcctccctgcctcacccagcagcgcccacagcgccggctatgccccaccgcctaccgggggcccctgcctgccaccaagcaaggcctccttcttcagcagctctgagggggcccccttctctggttcagcccccacgcccctgcgctgtgacagccgggccagcacagtctcgcccggtggctacatggtacccaagggcaccacagcctctgccacctctgcagcctctgccgcctcctcctcctcctcctccttccagccctcgcccgagaactgtcggcagtttgcgggggcttctcagtggcctttccggcagggctatggaggcctggactgggcctcagaggcctttagtcagctctacaatcccagttttgactgccacgtcagcgagcccaacgtgatcctggacatctccaactacacaccgcagaaggtgaagcagcagacggctgtgtcggagaccttctctgagtcatcctccgacagcacccagttcaatcagccggttggtggcggggggtttcggcgtgccaacagcgaggcctcaagtagtgagggccagtcgagcctgtccagcctggagaaactgatgatggactggaacgaggcatcatctgcccccggctacaactggaaccagagtgtcctctttcagagtagctccaagccgggccgtggacggcggaagaaggtggacctgttcgaggcctcacatctgggcttcccgacatccgcctctgccgctgcctcaggctacccatccaaacggagcactgggccccggcagccgcgaggtggacggggcggtggggcctgctcagccaagaaggagcggggtggcgcagcggccaaagccaagttcatccccaagccacagccagtcaacccactgttccaggacagtcctgacctcggcctggactactatagcggggacagcagcatgtcaccactgccctcacagtcgagggccttcggcgtgggagagcgagacccctgtgacttcataggaccctactccatgaacccgtccacgccttccgatggcacctttggccaaggcttccactgcgactcgcccagcctgggtgctcccgagcttgatggcaagcatttcccaccgctggcccacccacccacggtgtttgacgccggcctgcagaaggcatactcgcccacctgctcgcctacactgggcttcaaggaagagctgcggccaccgcccacaaagctggctgcctgcgagcccctcaagcatggactccagggggccagcctgggccacgcagctgcagcccaggcccacctgagctgccgggacctgccgctgggccagccccactacgattcccccagctgcaagggcacagcctattggtaccctccaggctcagctgcccgcagcccgccctatgaaggcaaggtgggtacagggctgctggctgacttcctgggcaggacggaggccgcgtgcctcagtgcccctcacctggctagcccaccagccacgcccaaggccgacaaggagccactggaaatggcccggccccctggcccaccccgtggccctgctgcagccgctgctggctatggctgcccactccttagtgacttgaccctgtcccccgtgccgagggactcgctgctgcccctgcaggacaccgcctacaggtacccaggctttatgccccaggcgcatcctggcctgggtgggggccccaagagcggcttcctggggcccatggcggaacctcaccccgaggacacattcaccgtcacatccctgtagtgccaactgaagtgccgactggaccgcgaggttttgttcctgggaactttcagaaaaccaacgccaagatccctcccagcgtccacatcgtcctctggcaggagctcctgcccctctgcctcccaccctgccccctacaccccctgcagacccatctccctccaccccctcccacccatctcctccacgcagaagccgaaggtgagccctttctgcacaaaaccagcaattgtaaatactttttaaaaatgtacaaaacttaaaaacaaaacacagttttagaaaaagacaaaaaaaaaaaag

SEQ ID NO: 56403 - DNA, 4069 bp, Homo Sapiens
ggcgtctgggaagtgaggagcgtctctgcctggcagaggctgcaatctctgcactttggggggccaaggcaggcgctgagaaggacgcgcagtccatctctctcaggttagtgaaatgaggctctccgcggggccggcccggggacagtgcgctgctggtcccagcatgaatgcgggccccggctgtgaaccctgcaccaaagcgacccgctggggcgccgctacaacttcgccggctgcttcggacgcccggagctttccgagcaggcagaggcgcgtcctcgaccccaaggacgctcacgtgcagttcagggtcccaccgtcctcgccagcctgcgtcccagggcaggcgggacagcacagaggcagcgccacctcgcttgttttcaaacaaaagactattaccagttggatggacactaaaggaatcaagacagcggaatcagaaagtttggatagtaaagaaaacaacaatacaagaatagaatccatgatgagttctgtacaaaaagataacttttaccaacataatgtagaaaaattagtaaatgtttctcagctaagtcttgataagtcactcactgaaaaaagtacacagtatttgaaccagcatcagactgcagcaatgtgtaagtggcaaaatgaagggaaacacacggagcagcttttggaaagtgaacctcaaacagtaaccctggtaccagagcagtttagtaatgctaacattgatcggtcacctcaaaatgatgatcacagtgacacagatagtgaagagaatagagacaatcaacagtttctcacaactgtaaagcttgcaaatgcaaagcagactacggaagatgaacacgccagagaagccaaaagccaccagaagtgcagcaagtcttgccatcctggggaagactgtgcaagttgtcagcaagatgagatagacgtggtgccaaagagtccattgtcagatgttggctctgaggatgttggtactgggtcaaaaaatgacaacaaattgattagacaagaaagttgcctaggaaattctcctccatttgagaaggaaagtgaacccgaatcaccgatggatgtggataattctaaaaatagttgtcaagactcagaagcagatgaggagacaagtccaggttttgatgaacaagaagatggtagttcctcccaaacagcaaataaaccttcaaggttccaagcaagagacgctgacattgaatttaggaaacggtactctactaagggcggtgaagttagattacatttccaatttgaaggaggagagagtcgcactggaatgaatgatttaaatgctaaactacctggaaatatttctagcctgaatgtagaatgcagaaattctaagcaacatggaaaaaaggattctaaaatcacagatcatttgatgagactgcccaaagcagaggacagaagaaaagaacagtgggaaaccaaacatcaaagaacagaaaggaagatccctaaatacgttccacctcacctttctccagataagaagtggcttggaactcccattgaggagatgagaagaatgcctcggtgtgggatccggctgcctctcttgagaccatctgccaatcacacagtaactattcgggtagatcttttgcgagcaggagaagttcctaaaccttttccaacacattataaagatttgtgggataacaagcatgttaaaatgccttgttcagaacaaaatttgtacccagtggaagatgagaatggtgagcgaactgcggggagccggtgggagctcattcagactgcacttctcaacaaatttacacgaccccaaaacttgaaggatgctattctgaaatacaatgtggcatattctaagaaatgggactttacagctttgatcgatttctgggataaggtacttgaagaagcagaagctcaacatttatatcagtccatcttgcctgatatggtgaaaattgcactctgtctgccaaatatttgcacccagccaataccactcctgaaacagaagatgaatcattccatcacaatgtcgcaggaacagattgccagtcttttagctaatgctttcttctgcacatttccacgacgaaatgctaagatgaaatcggagtattctagttacccagacattaacttcaatcgattgtttgagggacgttcatcaaggaaaccggagaaacttaaaacgctcttctgctactttagaagagtcacagagaaaaaacctactgggttggtgacatttacaagacagagtcttgaagattttccagaatgggaaagatgtgaaaaacccttgacacgattgcatgtcacttacgaaggtaccatagaagaaaatggccaaggcatgctacaggtggattttgcaaatcgttttgttggaggtggtgtaaccagtgcaggacttgtgcaagaagaaatccgctttttaatcaatcctgagttgattatttcacggctcttcactgaggtgctggatcacaatgaatgtctaattatcacaggtactgagcagtacagtgaatacacaggctatgctgagacatatcgttggtcccggagccacgaagatgggagtgaaagggacgactgcgagcggcgctgcactgagatcgttgccatcgatgctcttcacttcagacgctacctcgatcagtttgtgcctgagaaaatgagacgcgagctgaacaaggcttactgtggatttctccgtcctggagtttcttcagagaatctttctgcagtggccacaggaaactggggctgtggtgcctttgggggtgatgccaggttaaaagccttaatacagatattggcagctgctgcagctgagcgagatgtggtttatttcacctttggggactcagaattgatgagagacatttacagcatgcacattttccttactgaaaggaaactcactgttggagatgtgtataagctgttgctacgatactacaatgaagaatgcagaaactgttccacccctggaccagacatcaagctttatccattcatataccatgctgtcgagtcctgtgcagagaccgctgaccattcagggcaaaggacagggacctgaggagccgagcgaatagcatctcctcccacctcccaccagagacgtcctgtttgagctgtcaggtgtaatatatgaattgacttaagttaatataaatgtgtacataatccacatttgtagtcaaggacgcaatctcttccacacatgtgcagttgtcagttggtacatctaaactccctccatcctgactcacgtggacttagatatgttttgtttctattttcttctatttcagtttttcattctttgatgtttatttcttttgtccatcagatctcttgtgaaatcccatggaaggttgtgctcagctgtcgggtctctttcttcctgcccatatattataccagttgcttctgcagcccgcagatgcccagcgatgcccaggaaacaagttgaaatcccaggaatctctttaactgattttgctaaaaatctccctgtgagccttccactcaactcttaatatgcttgcattgtttaagtttttaaattctgaaaattaataattagggtttttttcatatgtgttgcataatgcaaacctcctaggttaaaatagtttctttatttaagatagaataatttccagaaattgtacttttgaggtatcatttttatctgtaatggtttgtctgtcttttttcctctgatcagtatttttttataccagttttggagactgcctgagatgaaaggaaatgtggaataaaaggaggttttcctgatgtggtgtaaagaaaacagattccaagagaattgaagattttttttgtttccttggtacttttttctttttaaattaggactaatgtttcttttgtggtgcttgaggcatattcatataaccaaagtttgagaactgggaacttcatgctgatttgtacatattgaagtttctctggtattcaaaggttatatagtgaatgaattttcattaataaatcactttgtcagaaaaaaaaaaaaaaaaaa

SEQ ID NO: 56404 - DNA, 2762 bp, Homo Sapiens
gtgacagaagtagtaggaagtgagctgttcagaggcaggagggtctattctttgccaaaggggggaccagaattccccatgcgagctgtttgaggactgggatgccgagaacgcgagcgatccgagcagggtttgtctgggcaccgtcggggtaggatccggaacgcattcggaaggctttttgcaagcatttacttggaaggagaacttgggatctttctgggaaccccccgccccggctggattggccgagcaagcctggaaaatgcaattgaaacacagagcaccagctctgaggaactcgtcccaagccccccatctccacttcctccccctcgagtgtacaaaccctgcttcgtctgccaggacaaatcatcagggtaccactatggggtcagcgcctgtgagggatgtaagggctttttccgcagaagtattcagaagaatatgatttacacttgtcaccgagataagaactgtgttattaataaagtcaccaggaatcgatgccaatactgtcgactccagaagtgctttgaagtgggaatgtccaaagaatctgtcaggaatgacaggaacaagaaaaagaaggagacttcgaagcaagaatgcacagagagctatgaaatgacagctgagttggacgatctcacagagaagatccgaaaagctcaccaggaaactttcccttcactctgccagctgggtaaatacaccacgaattccagtgctgaccatcgagtccgactggacctgggcctctgggacaaattcagtgaactggccaccaagtgcattattaagatcgtggagtttgctaaacgtctgcctggtttcactggcttgaccatcgcagaccaaattaccctgctgaaggccgcctgcctggacatcctgattcttagaatttgcaccaggtataccccagaacaagacaccatgactttctcagacggccttaccctaaatcgaactcagatgcacaatgctggatttggtcctctgactgaccttgtgttcacctttgccaaccagctcctgcctttggaaatggatgacacagaaacaggccttctcagtgccatctgcttaatctgtggagaccgccaggaccttgaggaaccgacaaaagtagataagctacaagaaccattgctggaagcactaaaaatttatatcagaaaaagacgacccagcaagcctcacatgtttccaaagatcttaatgaaaatcacagatctccgtagcatcagtgctaaaggtgcagagcgtgtaattaccttgaaaatggaaattcctggatcaatgccacctctcattcaagaaatgctggagaattctgaaggacatgaacccttgaccccaagttcaagtgggaacacagcagagcacagtcctagcatctcacccagctcagtggaaaacagtggggtcagtcagtcaccactcgtgcaataagacattttctagctacttcaaacattccccagtaccttcagttccaggatttaaaatgcaagaaaaaacatttttactgctgcttagtttttggactgaaaagatattaaaactcaagaaggaccaagaagttttcatatgtatcaatatatatactcctcactgtgtaacttacctagaaatacaaacttttccaattttaaaaaatcagccatttcatgcaaccagaaactagttaaaagcttctattttcctctttgaacactcaagatgcatggcaaagacccagtcaaaatgatttacccctggttaagtttctgaagactttgtacatacagaagtatggctctgttctttctatactgtatgtttggtgctttccttttgtcttgcatactcaaaataaccatgacaccaaggttatgaaatagactactgtacacgtctacctaggttcaaaaagataactgtcttgctttcatggaatagtcaagacatcaaggtaaggaaacaggactattgacaggactattgtacagtatgacaagataaggctgaagatattctactttagttagtatggaagcttgtctttgctctttctgatgctctcaaactgcatcttttatttcatgttgcccagtaaaagtatacaaattccctgcactagcagaagagaattctgtatcagtgtaactgccagttcagttaatcaaatgtcatttgttcaattgttaatgtcactttaaattaaaagtggtttattacttgtttaatgacataactacacagttagttaaaaaaaatttttttacagtaatgatagcctccaaggcagaaacacttttcagtgttaagtttttgtttacttgttcacaagccattagggaaatttcatgggataattagcaggctggtctaccactggaccatgtaactctagtgtccttcctgattcatgcctgatattgggatttttttccagcccttcttgatgccaagggctaattatattacatcccaaagaaacaggcatagaatctgcctcctttgaccttgttcaatcactatgaagcagagtgaaagctgtggtagagtggttaacagatacaagtgtcagtttcttagttctcatttaagcactactggaatttttttttttgatatattagcaagtctgtgatgtactttcactggctctgtttgtacattgagattgtttgtttaacaatgctttctatgttcatatactgtttacctttttccatggactctcctggcaaagaataaaatatatttatttt

SEQ ID NO: 56405 - DNA, 3935 bp, Homo Sapiens; identical to SEQ ID NO: 22628

SEQ ID NO: 56406 - DNA, 3990 bp, Homo Sapiens
cgccgcgtaagcggggccggctcagtgcggtgcggcaggcgcggctgtgcggcagcggaagtcctttgttgcagcacagtccctggcagagccagagcctctccgcgcagcccagcccgagcgccgagcgccgcgcgccgccgccactgcagctcgcggccccttcgccttcgcccgcctttcccgcggctgatttgccttaaactccctaaaatctccgcagctctggttcctgttgcggccggtctctaattaacagaagatggcaaagcccagccacagcagctatgtccttcagcagctaaacaaccaaagagaatggggttttctctgtgactgctgtattgcaattgatgacatttactttcaagcacacaaggcagttctagctgcctgtagctcctattttagaatgtttttcatgaaccatcagcatagtactgcacaactgaatctcagcaacatgaaaattagtgcagaatgttttgatctcattttgcagtttatgtatttaggaaaaattatgacagctccctccagttttgagcagtttaaagtggcaatgaactacctacagctatacaatgttcctgactgtttagaagacatccaggatgcagattgttctagttcaaaatgttcctcttctgcttccagcaaacagaacagcaaaatgatatttggggtaagaatgtatgaagatactgtggctcgaaatggcaatgaagccaacaggtggtgtgcagagccaagttcaacggtaaatacaccacataatagagaggctgatgaagagtctttacaattaggtaattttcctgagccactatttgatgtatgtaaaaaaagttccgtgtccaaattatctaatccaaaagaacgtgtgtcaagacgctttgggcggagttttacctgtgatagctgtggatttggctttagctgtgaaaaattattagatgagcatgtgctaacctgtactaacagacatttataccaaaacacaagatcttaccatagaatagtagatattagagatggaaaagacagtaacatcaaagctgaatttggtgaaaaagattcttccaaaacattttctgcacagacggacaaatacagaggagacacaagccaggctgctgatgattcagcttcaaccactggaagcagaaaaagtagcacagtggagtctgaaatagcaagcgaagagaaaagcagagctgctgagaggaaaaggattattattaagatggagccagaagatattcctacagatgaactgaaagactttaacattattaaagttactgataaagactgtaatgaatccactgacaatgatgaattagaagatgaacctgaagagccattttatagatactatgttgaagaagatgtcagcataaaaaaaagtggtaggaaaactctaaaacctcgaatgtcagtaagtgctgatgaaagaggtggtttagagaatatgaggccccctaacaacagcagtccagtacaagaggatgctgaaaatgcatcttgtgagctgtgtggacttacaataaccgaggaggacctgtcatctcattacttagccaaacacattgaaaatatctgtgcatgtggtaaatgtggacaaatacttgtaaagggtaggcagcttcaggaacatgctcaacgatgtggcgagccccaagatctgaccatgaatgggttaggaaatactgaggagaaaatggacttggaagagaatcctgatgagcagtccgaaataagagatatgtttgttgaaatgctggatgattttagggacaatcattaccagataaacagtatccaaaaaaagcagttatttaaacattctgcctgcccttttcgatgtcctaattgtggccagcgttttgaaactgaaaatctagtggttgaacatatgtctagctgcttagatcaagatatgtttaagagtgccatcatggaagaaaatgaaagagatcacagacgaaagcatttttgtaatctgtgtggaaaaggattttatcagcggtgtcacttaagagaacactatactgttcatactaaggaaaaacagtttgtttgtcaaacatgtggaaagcagtttttaagagagcgtcagttgcgactgcacaatgatatgcacaaaggcatggccagtggtgaaatagggccttctaaacctgtggagaagtgagagatctgaatttggagaggacatggggaagaatcaatcttcaacagataatctttaagtacagacccaggaatatcagatctgaagtggcaccatcttttctgtcttcctgacaaacttccatcaacccaaaaagttccagttgcaaagatccaagaaaactcagtaaagatcactttggaatcactttgttgtaacaaaattgattcatggtgactctaatatttgtgtaaatctgctgaagaaaagtaactagaaaattcatacaacatcagtggttacagctatactaaaataaaactttatatgctaattatcttcaagggtctttctaaaataaaaggggttgttaggctactgcaaatataaagagacataatcacaaatctatttatatagatataaataattctaaacttaaaatcactagaattatagcttaaatattatgaaatgtacttagtcaacttaaaaacttacaccaaaaatctgtagtttagagtgtaagaagtaatgggtacagagaaaaaaaatttaagaccaatattttaacaggataatttggttattactcactatagtaaaacacttgcccttcttccttttccactgtatatgccagtcacaatcttgatcatttatatgaatgaaactcccttttaaacctgttaacttgaaggagaacagaaatggtattacttcaatagtggtagatttccacaaatcagacacattattttcttctgaacttggcaatataacctaataaggcagaataagtttctgttaaaatacttattctcaatatttatgtataaaccatgcttctcagctttcaaatttcaagataaaatttaagtattcagtaaaatgatggttaacatgttttaaaaaatctttaatggagaagttaaatatttggtgagattttagtctggctataaatgctttgtttgatatatatatgtgcacatatatatattacttaaccatatgaattttatttccttattctgaatatacttgtagttttacttctttctgtttatgtacccaattccttatgattattttgtttcttctgcaatatcaagatgttatttattttgagaaatgcttatttttatgactatttattccaatgttttaacaagaagcacagagatttatagtattcttaatagtatgtgcagaagttacatcatttaaaaaacccttgctgtaaagtaggataacttgaatattcattctaataattagactaagtgaaaatctgagaaagagttaattgcaatgtgatagtgggtagaaaggagagaaaaacccactgaagggttcaaatacatgtgaattctactgctttaagagaaataaaacaaataagcctagggaaatattagagtctaaaaaaccctagagttactctcttttgggaacataaggaggtatacagaactgcagacctctaaacataagtaggaaaaagaaaaataaaagaatattaccaataattaaaggtgccagatcaaaatagtaataaatcaacaaataatttttgattgactggtggaattagatttactaaataaaaatggcttaaattttgactgtactaactataaatgtaatgaattataataattataaatggtataaatgcattctacaatgtgattattttctgtattttagtatatagtataaaatggaattattgggttaaagtacttttattacatttcttaatccattgtttttacctaataaaatttcctcctctatattccaaagtt

SEQ ID NO: 56407 - DNA, 6672 bp, Homo Sapiens; identical to SEQ ID NO: 31866

SEQ ID NO: 56408 - DNA, 4982 bp, Homo Sapiens
aggtgacagctggagggaggagcgggggtggagccgggggaagggtggggaggggatgggctggagctccgggcagtgtgcgaggcgcacgcacaggagcctgcactctgcgtcccgcaccccagcagccgcgccatgagccggagtctcttgctctggttcttgctgttcctgctcctgctcccgccgctccccgtcctgctcgcggacccaggggcgcccacgccagtgaatccctgttgttactatccatgccagcaccagggcatctgtgtccgcttcggccttgaccgctaccagtgtgactgcacccgcacgggctattccggccccaactgcaccatccctggcctgtggacctggctccggaattcactgcggcccagcccctctttcacccacttcctgctcactcacgggcgctggttctgggagtttgtcaatgccaccttcatccgagagatgctcatgcgcctggtactcacagtgcgctccaaccttatccccagtccccccacctacaactcagcacatgactacatcagctgggagtctttctccaacgtgagctattacactcgtattctgccctctgtgcctaaagattgccccacacccatgggaaccaaagggaagaagcagttgccagatgcccagctcctggcccgccgcttcctgctcaggaggaagttcatacctgacccccaaggcaccaacctcatgtttgccttctttgcacaacacttcacccaccagttcttcaaaacttctggcaagatgggtcctggcttcaccaaggccttgggccatggggtagacctcggccacatttatggagacaatctggagcgtcagtatcaactgcggctctttaaggatgggaaactcaagtaccaggtgctggatggagaaatgtacccgccctcggtagaagaggcgcctgtgttgatgcactacccccgaggcatcccgccccagagccagatggctgtgggccaggaggtgtttgggctgcttcctgggctcatgctgtatgccacgctctggctacgtgagcacaaccgtgtgtgtgacctgctgaaggctgagcaccccacctggggcgatgagcagcttttccagacgacccgcctcatcctcataggggagaccatcaagattgtcatcgaggagtacgtgcagcagctgagtggctatttcctgcagctgaaatttgacccagagctgctgttcggtgtccagttccaataccgcaaccgcattgccatggagttcaaccatctctaccactggcaccccctcatgcctgactccttcaagatcggtgggggcaggaacatggaccaccacatcctgcatgtggctgtggatgtcatcagggagtctcgggagatgcggctgcagcccttcaatgagtaccgcaagaggtttggcatgaaaccctacacctccttccaggagctcgtaggagagaaggagatggcagcagagttggaggaattgtatggagacattgatgcgttggagttctaccctggactgcttcttgaaaagtgccatccaaactctatctttggggagagtatgatagagattggggctcccttttccctcaagggtctcctagggaatcccatctgttctccggagtactggaagccgagcacatttggcggcgaggtgggctttaacattgtcaagacggccacactgaagaagctggtctgcctcaacaccaagacctgtccctacgtttccttccgtgtgccggatgccagtcaggatgatgggcctgctgtggagcgaccatccacagagctctgaggggcaggaaagcagcattctggaggggagagctttgtgcttgtcattccagagtgctgaggccagggctgatggtcttaaatgctcattttctggtttggcatggtgagtgttggggttgacatttagaactttaagtctcacccattatctggaatattgtgattctgtttattcttccagaatgctgaactccttgttagcccttcagattgttaggagtggttctcatttggtctgccagaatactgggttcttagttgacaacctagaatgtcagatttctggttgatttgtaacacagtcattctaggatgtggagctactgatgaaatctgctagaaagttagggggttcttattttgcattccagaatcttgactttctgattggtgattcaaagtgttgtgttcctggctgatgatccagaacagtggctcgtatcccaaatctgtcagcatctggctgtctagaatgtggatttgattcattttcctgttcagtgagatatcatagagacggagatcctaaggtccaacaagaatgcattccctgaatctgtgcctgcactgagagggcaaggaagtggggtgttcttcttgggacccccactaagaccctggtctgaggatgtagagagaacaggtgggctgtattcacgccattggttggaagctaccagagctctatccccatccaggtcttgactcatggcagctgtttctcatgaagctaataaaattcgctttctaaagttacctgttatatatctcttttggtcccatcctctaaagcagaggcaacactggaacatggctagcctttcttgtagccatggctgggcgtgctagaggttgcagcatgagactttctgctgggatccttgggcccatcactgtatagacatgctaccactggtacttcctttctccctgcgggccaggcactgcccttttcaggaagctctcttaaaatacccattgccccagacctggaagatataacattcagttcccaccatctgattaaaacaacttcctcccttacagagcatacaacagagggggcacccggggaggagagcacatactgtgttccaatttcacgcttttaattctcatttgttctcacaccaacagtgtgaagtgcgtggtataatctccatttcaaaaccaaggaagcagcctcagagtggtcgagtgacacacctcacgcaggctgagtccagagcttgtgctcctcttgattcctggtttgactcagttccaggcctgatcttgcctgtctggctcagggtcaaagacagaatggtggagtgtagcctccacctgatattcaggctactcattcagtcccaaatatgtattttcctaagtgtttactatgtgccagttcctgtaacaggtgtggggacacagcagtgagtaatcaatacagacaaggttctgcccttatggagctcacactccagtggcagacaaacagaccataaataaggaaacgatgaaataagatatatacaaggtgagtgtgacttcccttctaaccccctctgctctgtcctcccctattgcgctctcaagaccagagacccaacagcagtgatctcagggcagacagccctccactccagctctgagacccttttctcaggacctctgtaggcagcagagagagaggacagaggggtaagatgaggggttgagggaaggttcttcatgatccacactttgggcttagtatttctcaggaagagctatggcccagaaacaacaggggaaactagagttcggtctgacagtccttggggttaagtctcctgtcttatggtccagaaactcctgtttctccttagttggctggaaactgctcccatcattccttctggcctctgctgaatgcagggaatgcaatccttccctgctcttgcagttgctctgacgtagaaagatccttcgggtgctggaagtctccatgaagagcttgtgtcctgtcctttcttgcagattctatttcccctcttctgctaatacctcttactttgcttgagaatcctctcctttcttattaatttcagtcttggtggttctatcaggggtgcattctggccaaggggtgggcctgtgaatcaatcctgggcaatcagacaccctctccttaaaaactggcccgtggagactgagatcactgactctgactcatccccacagctggctctgacaagatggtccatttgttcctgcttccgagatccccagggcagcctggatccctgcccttctcaagactttagcttttccttccatccggtggcctattccaggaattcctcttttgcttaaatcagttggagtttgtgtctgttgcttgtaatcaagcctttatggctgctgggctgagtgacacaagcactttaatggcctggagggacttttaatcagtgaagatgcaatcagacaagtgttttggaaagagcaccctcgagaagggtggatgacagggcagagcaggaaggacaggaagctggcagaacggaggaggctgcagccgtggtccaaccaggagctgatggcagctggggctaggggaagggctttgagggtggaaggatgggatgggttccagaggtattcctctcttaaatgcaagtgcctagattaggtagactttgcttagtattgacaactgcacatgaaagttttgcaaagggaaacaggctaaatgcaccaagaaagcttcttcagagtgaagaatcttaatgcttgtaatttaaacatttgttcctggagttttgatttggtggatgtgatggttggttttatttgtcagtttggttgggctatagcacacagttatttaatcaaacagtaatctaggtgtggctgtgaaggtattttgtagatgtgattaacatctacaatcagttgactttaagtgaaagagattacttaaataatttgggtgagctgcacctgattagttgaaaggcctcaagaacaaacactgcagtttcctggaaaagaagaaactttgcctcaagactatagccatcgactcctgcctgagtttccagcctgctagtctgccctatggatttgaagtttgccaaccccaacaattgtgtgaattaatttctaaaaataaagctatatacagcc

SEQ ID NO: 56409 - DNA, 5454 bp, Homo Sapiens; identical to SEQ ID NO: 30189

SEQ ID NO: 56410 - DNA, 2031 bp, Homo Sapiens
gcccctgagctctgtcatggcgacgtccagtgctccagccggtgtgaggacacgatatgctggggtttttgtccgcacgccaaacgggtttggaggaccctcttcgccttcggagagcagagtcaacacggagagttttgggactggaattaaataaagacagagatgttgaaagaatccacggcggtggaattaacacccttgacattgaacctgttgaagggagatacatgttatcaggtggttcagatggtgtgattgtactttatgaccttgagaactccagcagacaatcttattacacatgtaaagcagtgtgttccattggcagagatcatcctgatgttcacagatacagtgtggagactgtacagtggtatcctcatgacactggcatgttcacatcaagctcatttgataaaactctgaaagtatgggatacaaatacattacaaactgcagatgtatttaattttgaggaaacagtttatagtcatcatatgtctccagtctccaccaagcactgtttggtagcagttggtactagaggacccaaagtacaactttgtgacttgaagtctggatcctgttctcacattctacagggtcacagacaagaaatattagcagtttcctggtctccacgttatgactatatcttggcaacagcaagtgctgacagtagagtaaaattatgggatgtgagaagagcatcaggatgtttgattactcttgatcaacataatgggaaaaagtcacaagctgttgaatcagcaaacactgctcataatgggaaagttaatggcttatgttttacaagtgatggacttcacctcctcactgttggtacagataatcgaatgaggctctggaatagttccaatggagaaaacacacttgtgaactatggaaaagtttgtaataacagtaaaaaaggattgaaattcactgtctcctgtggctgcagttcagaatttgtttttgtaccatatggtagcaccattgctgtttatacagtttactcaggagaacagataactatgcttaagggacattataaaactgttgactgctgtgtatttcagtcaaatttccaggaactttatagtggtagcagagactgcaacattctggcttgggttccatccttatatgaaccagttcctgatgatgatgagactacaacaaaatcacaattaaatccggcctttgaagatgcctggagcagcagtgatgaagaaggatgaatatcatctttagtacctttttgtctctgctgaaactttttaaatgagactgtgtttttttcaactgtatggtctattcctgacagctaaattagccctaaatgtgggtaatatttttcctcatgttttaaaatgaggttaatatttgcataaaatcctaaaacagacttctgtatagtttatttagtcaaaatgtgttccttgatcccagatgttgtggcctgggaaagccctcattgctacagtacaagtaacacaagtcgttgtacctcagttgtgaccttcagcagattttatgaactataagatgcagtctcagaggatcagcaagtggaggccatcagtattgactttctcttacttgctgtactatcagcctgctcgtttccacctttaagaatgattttgccaagaatgattatatcaaaaatagtagttgaaatggtaacatcaaaattattttattctttcttcttcatgtattcacatttttcagtggtttcatttaattaaccatgctttatgttaaacattttggggctcaatgtctcctactatccaaaatgtgcatcacaggaggcttttaactttgtgaaaatcccatgtttgctttattttattttaatgtcagaaggcagtttgcgctaatgcttgaactctttttctgtgaaactcattaaggtatgaccaaatcctgcctcattaattcaagcagaaaatatcctggcagggaatctggcttaaacatgaaatgctgtaataaaatttctatgttattgtctcc

SEQ ID NO: 56411 - DNA, 5384 bp, Homo Sapiens; identical to SEQ ID NO: 31327

SEQ ID NO: 56412 - DNA, 4612 bp, Homo Sapiens
agaatgcactgctgacacgtgtgcgcgcgcgcggctccactgccgggcgaccgcgggaaaattccaaaaaaactcaaaaagccaatacgaggcaaagccaaattttcaagccacagatcccgggcggtggcttcctttccgccactgcccaaactgctgaagcagctcccgcgaggaccacccgatttaatgtgtgccgaccatttccttcagtgctggacaggctgctgtgaagggacatcaccttttcgctttttccaagatggctcaagattcagtagatctttcttgtgattatcagttttggatgcagaagctttctgtatgggatcaggcttccactttggaaacccagcaagacacctgtcttcacgtggctcagttccaggagttcctaaggaagatgtatgaagccttgaaagagatggattctaatacagtcattgaaagattccccacaattggtcaactgttggcaaaagcttgttggaatccttttattttagcatatgatgaaagccaaaaaattctaatatggtgcttatgttgtctaattaacaaagaaccacagaattctggacaatcaaaacttaactcctggatacagggtgtattatctcatatactttcagcactcagatttgataaagaagttgctcttttcactcaaggtcttgggtatgcacctatagattactatcctggtttgcttaaaaatatggttttatcattagcgtctgaactcagagagaatcatcttaatggatttaacactcaaaggcgaatggctcccgagcgagtggcgtccctgtcacgagtttgtgtcccacttattaccctgacagatgttgaccccctggtggaggctctcctcatctgtcatggacgtgaacctcaggaaatcctccagccagagttctttgaggctgtaaacgaggccattttgctgaagaagatttctctccccatgtcagctgtagtctgcctctggcttcggcaccttcccagccttgaaaaagcaatgctgcatctttttgaaaagctaatctccagtgagagaaattgtctgagaaggatcgaatgctttataaaagattcatcgctgcctcaagcagcctgccaccctgccatattccgggttgttgatgagatgttcaggtgtgcactcctggaaaccgatggggccctggaaatcatagccactattcaggtgtttacgcagtgctttgtagaagctctggagaaagcaagcaagcagctgcggtttgcactcaagacctactttccttacacttctccatctcttgccatggtgctgctgcaagaccctcaagatatccctcggggacactggctccagacactgaagcatatttctgaactgctcagagaagcagttgaagaccagactcatgggtcctgcggaggtccctttgagagctggttcctgttcattcacttcggaggatgggctgagatggtggcagagcaattactgatgtcggcagccgaaccccccacggccctgctgtggctcttggccttctactacggcccccgtgatgggaggcagcagagagcacagactatggtccaggtgaaggccgtgctgggccacctcctggcaatgtccagaagcagcagcctctcagcccaggacctgcagacggtagcaggacagggcacagacacagacctcagagctcctgcacaacagctgatcaggcaccttctcctcaacttcctgctctgggctcctggaggccacacgatcgcctgggatgtcatcaccctgatggctcacactgctgagataactcacgagatcattggctttcttgaccagaccttgtacagatggaatcgtcttggcattgaaagccctagatcagaaaaactggcccgagagctccttaaagagctgcgaactcaagtctagaaggcacgcaggccgtgtgggtgcccggcgtgagggatcaggctcgccagggccacaggacaggtgatgacctgtggccacgcatttgtggagtaagtgccctcgctgggctgtgagaatgagctgtacacatcttgggacaatctgctagtatctattttacaaaatgcagagccaggtccctcagcccagactcagtcagacatgttcactaatgactcaagtgagccttcggtactcctggtgcccgcccggccagaccgtcagcttgataattactaaagcaaaggcctgggtgggagaacaggtttctagtttttacccaagtcaagctgcacatctattatttaaaaattcaaagtcttagaaccaagaatttggtcatgaaccattaaagaatttagagagaacttagctctttttagactctttttaggagtcagggatctgggataaagccacactgtcttgctgtatggagaaattcttcaaggggagtcagggtccctcaggcttcccttgtgtctccctggacctgcctgacaggccacaggagcagacagcacacccaagcccgggcctccggcacactctttccactctgtatttgctaaatgatgctaactgctaccaaaaggcccttgggacatcagaggagccggcaggcgaaggtagaggatgtgttccagaaacattagaaggcaggattaattcagttagttagttctcttgttaaatggaaatgggaattggaaattcctgataaagaattggcctggctgggtgcagtggctcacacctgtgatcccagcactttgggaggccaaggcagggggattacttcagcccaggagttccagactgcctggctaacatggcaataccctatctctactaaaaatacaaaaattatcggggtgcaatggcatgcatctgtaatcccagctattcaagaggctgaggcatgaggatctcttgaacccgggaggtgggagttgtagtgagccgagatcatgacactgcactccagcctgggcaacagagcgagaccatctcttaaaaaaaggcattgttagtgtaatctcaaggttaacatttatttcatgtcagtacagggtgctttttcctttcagggacattctggaattgtattggttgtacattcttttgtgtctattctgtttgtcaagtgagtcaagacttgcttttgtccattttgatttgtgtgtattagtctgagtcttggctccgttttgaggtatgagcaaagttttgctggattagaagttaacctttagggaaattccttattttggtatgtggcaatgctaatagatccactgaagatctggaaaattccaggaacttttcacctgagcctttcttctgagaaatgctgcagtcagaagggtgtgctggtaaagtattttggtggcagctgccatcatggtcattgccttcatataacatgcttcgtgctcatggtcattgccttcatataacatgcttcgtgccatcatgatccttgccttcatataacaaacatgcttcgtcagaggtgttggggttgaaaaaggagctgcatgcttcactggagttgagggcctctctcctgttctgactttaagccagaacttgtggctgggccatggaagctgtgactcctctgtggacatggtggcagcagggaacccctagagagaggggccactgggaccaggcctcctgttgtggagggactcctgggacagtcctccaccctgtcctgtggtcctgtgtacagggttggcctcttcctcctcccctgccaggcctctgcccatgccccttccttccttctcctgggactggtgaagctaggcatctggaagacttcttcctagcctggaagccctgacctcggcccatctgcagaatctcccagttccttcacagctgccgagtcctctcacgggtgcggtggaggcggccttgccggtggtgctttctgggcagccaggggttcctgggtgggaggactgtccctctggggacgtggcactgaagtgcctgctggcttcatgtggccctttgccctttcccagcctgagagatgctcaaaggtggggagctgggggagccacccctcggccattccctccacctccaagacaggtggcggccgggcaggcactcttaagcccacctccccctcttgttgccttcgatttcggcaaagcctgggcaggtgccaccgggaaggaatggcatccgagatgctgggcggggacgcggcgtggccgagggggccttgacggcgttggcggggcctgggcacaggggcagccgcagggaggcagggatggcaaggcgtgaagccaccctggaaggaactggaccaaggtcttcagaggtgcgacagggtctggaatctgaccttactctagcaggagtttttgtagactctccctgatagtttagtttttgataaagcatgctggtaaaaccactaccctcagagagagccaaaaatacagaagaggcggagagcgcccctccaaccaggctgttattcccctggactccgtgacatctgtggaattttttagctctttaaaatctgtaatttgttgtctattttttcattctaaataaaacttcagtttgcacctaaaaaaaaaaaaaaaaaaaaaa

SEQ ID NO: 56413 - DNA, 3639 bp, Homo Sapiens
aagtcttctgaattgtttttctggacttccaaatctcaagtgataagaccagcagaagcagatataaagacctgaagatagtcttttctgtccaaagatggaaaacagtactactaccatttctcgggaggagcttgaagaactacaagaggcatttaataaaatagatattgacaatagtgggtatgtcagtgactatgaacttcaagacctgtttaaggaagcaagccttcctctgcctggctacaaggtgcgcgagattgtggagaaaattctatcagttgctgacagcaacaaagatggcaaaatcagttttgaagagtttgtgtcactaatgcaagaattaaaaagcaaagatatcagcaaaacattccgaaaaataattaacaagagggaagggattactgctattggaggaacttcaactatttccagtgagggcacacagcattcttattcagaggaagaaaaagtggcttttgttaactggataaacaaagccctggagaatgaccctgactgtaagcatcttatacccatgaatcccaatgatgatagtcttttcaagtcacttgcagatggcatccttctttgcaaaatgatcaacttatctgaaccagatacaattgatgaaagagccatcaataagaaaaagctcacgccattcactatttctgaaaatttaaacctagctctgaattctgcctcagccattggttgtacagtggtcaacattggtgcatcagatctcaaagaaggaaaacctcacttggtcttgggacttctctggcagatcatcaaagttggcctttttgctgatattgagatttccaggaatgaagctctgattgcattgttaaatgaaggtgaggaactagaggagctgatgaagctttctcccgaggaattactgctgcgatgggtgaactaccatctgaccaatgcaggatggcataccatcagcaacttcagccaagacattaaggactcgagagcctattttcatctgcttaatcagattgcccctaaaggtggggaagatggacctgccattgccattgacctttcaggaattaatgagacaaatgacctgaagcgtgctggactcatgcttcaagaagcagataaactgggctgcaaacagtttgttactcctgcagatgtggtttcaggcaatcctaaacttaatttagcttttgtagctaatttgtttaacacatacccgtgcctgcacaagccgaataataatgacatcgatatgaatttactggaaggagagagcaaggaagagagaacatttcggaactggatgaattccttgggagtcaacccatacattaatcatttgtacagtgaccttgcagatgctttagtgatctttcagctctatgagatgatccgagtgccagtcaactggagccatgtcaacaaacctccttatcctgcccttggagggaacatgaagaagattgaaaactgtaactatgcagtggaacttgggaagaacaaggccaaattctccttggttggcattgctgggcaggacctaaatgaaaggaattcaacacttaccctggcattggtatggcagctgatgagaaggtacacattgaatgtgttatcggatcttggagagggtgaaaaagtaaatgatgaaattataattaaatgggtcaatcagactcttaaaagtgcaaacaaaaagacttctatttccagcttcaaggataaatctataagcacaagtttacctgtcctagatttaatagatgccattgcgccaaatgcagttcgtcaagaaatgatcaggagagaaaacttatctgatgaggacaagctgaacaatgctaaatacgccatttcagttgctcgaaagatcggtgcccggatatatgcattacctgatgacctcgtagaagtgaaaccaaagatggttatgacggtgtttgcatgcttaatgggaaaaggactgaacagaataaaataatcatttcatatgattttctgccacattaaacatattgtatgcctcacagtttacaggattctgaaatgtagtgggtgtaaaaccagagattatttgtatgctcaaaatagttatatattcattaatgaattcaatatcctgttcatactagttagagctggtcagcctttttgggtaacacagttaatttaccaactgatacagataatagaatatattcataatcaagctgatacttcatgattaaattatttttgttgcttaaaagtcgtattagacaagactaaatcattcttttttatggttcaaaaaagatgaatacaaacgtttttgcaggttctgctgtgaaatgtggtttgatttttttggtgtgttaattttgatcataaatgcattcatactcataatccagtttaatccttttatttgcttcctccaactatttaaagtggtccaaaaacacttttctgtaagtttctatactgtctaaaaccttatggtgaccagaattgtttattaatatcaaacttttttatatatgagaactaattcttgaataaaccccaaagttcactctcttgtttaagtagcagcagctttttacttaaaatttaattttaactacattgatactttacacatcctagtttggtaacacagctttaactatgtcatgcaacatatatatgttggtaggatgttattagagagatatgtgtgcatatatatttttttgcacctgaatcacccagcttttcataagtggtatgtttaattggtcattcagccaaccatcagtattttccccccacgacatgtgtaacacttttcagtctgtggatatctgatacattaagatttctttttataagtattcattttgaatgtgcatatagtcatttgaccccttccaaatacttgtagccaaacattggctagaacatcccaagatatgctgacactgtcctgttagcttcatattatacttgctagtttaggtctctatagaagccctatataatttagaatatgcccactgaatatctttaatagaaagtaacataaagctagtattcaatgtagagtattttcatatgtttttcacagcccgttacaaattggcaatgtttggttaatgtttgtattacttggaaatcgctacagcttggactatttttttctaaatttttagcattagtccatttctgctgctaacaattgaatccagaaatctactttctccatcttccactgttagtgccagtgagcaatactgttgtgcaacaaaaatgtcactttatctcagtgtgaatgagtagtctaaattccctttctaccattgatttaaatatatatattggtaagagagactgcccatgtgtttagaatagaattttttaaatgaaatgatcaacaggtggaatttgaaatatattcttctacaaaagagatttctttcccttttatattttgatgattgttttcttaagattaagatatgttcttgctcttttataagattatttaaattatgtttccctctgattttttttcaccattgtatttactaagttattggatttacatgaaatctggcactttagggtgttctttttctcacagagtatatttaataaaaatgctgtgtatat

SEQ ID NO: 56414 - DNA, 6314 bp, Homo Sapiens
gtcggcgaggagggtccggccggagttgaaggattgaactttccggctcagtcgcggcggctgcctggtcctcagcagtgcagccccggcgcggagcagggagcctcggcccgcgcccggcgccctcgccctcgccctcgacccgcagccatggtgcccggggtgcccggcgcggtcctgaccctctgcctctggctggcggcctccagcggctgcctggcggccggccccggcgcggctgctgcgcggcggctggacgagtcgctgtctgccgggagcgtccagcgcgctccgtgcgcctccaggtgcctgagcctgcagatcactcgcatctccgccttcttccagcacttccagaacaatggttccctggtttggtgccagaatcacaagcaatgttctaagtgcctggagccctgcaaggaatcaggggacctgaggaaacaccagtgccaaagcttttgtgagcctctcttccccaagaagagctacgaatgcttgaccagctgtgagttcctcaaatacatcctgttggtgaagcagggggactgtccggctcctgagaaagccagtggatttgcggccgcctgtgttgaaagctgcgaagttgacaatgagtgctctggggtgaagaaatgttgttcgaatgggtgtggacacacctgtcaagtacccaagactctgtacaaaggtgtccccctgaagcccagaaaagagttacgatttacagaactgcagtctggacagctggaggttaagtggtcctcgaaattcaatatttctattgagcctgtgatctatgtggtacaaagaagatggaattatggaatccatcctagcgaagatgacgccactcactggcagacagtggcccagaccacagacgagcgagttcaactgactgacataagacccagccgatggtaccagtttcgagtggctgctgtgaatgtgcatggaactcgaggcttcactgcccccagcaaacacttccgttcttccaaagatccatctgccccaccagcaccggctaacctccggctggccaactccaccgtcaacagtgatgggagtgtgaccgtcactatagtttgggatctccccgaggagccggacatccctgtgcatcattacaaggtcttttggagctggatggtcagcagtaagtctcttgtcccaacaaagaagaagcggagaaagactacggatgggtttcaaaattctgtgatcctggagaaactccagccagactgtgactatgttgtggaattgcaagccataacgtactggggacagacacggctgaagagtgcaaaggtgtcccttcacttcacatcgacacatgcaaccaacaacaaagaacagcttgtgaaaactagaaaaggtggaattcaaacacaactcccttttcaaagacgacgacccactcgcccgctggaagtcggagctcccttctatcaggatggccaactgcaagttaaagtctactggaagaagacagaagatcccactgtcaaccgatatcatgtgcggtggtttcctgaagcgtgtgcccacaacagaacaaccggatcagaggcatcatctggcatgacccacgaaaattacataattcttcaagatctgtcattttcctgcaagtataaggtgactgtccaaccaatacggccaaaaagtcactccaaggcagaagctgttttcttcactactccaccatgctctgctcttaaggggaagagccacaagcctattggctgcctgggcgaagcaggtcatgttctttctaaggtgctagctaagcctgagaacctttctgcttcattcatcgtccaggatgtgaacatcaccggtcacttttcttggaagatggccaaggccaatctctatcagcccatgactgggtttcaagtgacttgggctgaggtcactacggaaagcagacagaacagcctacccaacagcattatttcacagtcccagattctgccttccgatcattatgtcctaacagtgcccaatctgagaccatctactctttaccgactggaagtgcaagtgctgaccccaggaggggaggggccggccaccatcaagacgttccggacgccggagctcccaccctcttcagcacacagatctcatcttaagcatcgtcatccacatcattacaagccttctccagaaagatactaaactgttcaaaaagattttgtgaaattgcacagatgtgtaagcttgttgaacttcggccacgagacatgcacacttccagaggcagtgggaactgctcagaggcccggactctcctatgtgactttagtgcaggaagaacttctgtcaatcatggacgcatctggagacaagtgagaaacagtagattggtgaagacagacaccagttccctacaagcatggagaaaatgaagaataggcctgtttaatgctaaattttgttttcatgtatggtgtcgctcatttctattgaattacaacagaactcagttttccctgaatttggagcaccaaactccgccccaaaaaggagagtaacaaatacacaattcacacataacactaagcgtaaatctaatcaataaaatatatttttgactaaattattgattcgatatgaaaaatcaactaagattacacagctttgtttttttgaatctttcctaagatcatttttatcctaggtgatttttaaatgaaaatgtgtaatctaaaatataccagcgaatttaaatctaaaaatgctcctactttaagtaccttgtgctgctctttatgcaaaggtaaatcaaagttccctctataaattatgatttacaaaagacacccaagccagaggaactcaatgaaataagctgctaatcagattttaccttggagaaatgaaaattatttcttggggatgccttttaatatttgatcctattatgtgagagattttcctgatatgttatcttatttatattttcccttattttcctcaatgcagataatagcttttggtgcacttttgtttcaccatctgaaaattcacaaaacttcttgcttcaaatgaaaaaatcccaactattgagcatgtttaaatctttgcagagatttgccttttcttaatcaaagaaaggtctttgtgtgctagaatattattggtaatgttttaaaaattcctttgattgatagagaaggacagttatttgcatttaattcacccatatgctttcaaatctagtatatcttactttttggaaatgttttatgctacaaattagtgccttgtagcatgaacttaagtcaaaacgtgttatcaatatagagtgttgcagtgtatattgtaacaacctaaaacgcagagaagtttaatttaatactgttttttttcttgaaggaatactcacatacatggtttgaaatgtgcatagatatgcatgtctatataattataaatgcatgtgtatatatatgcaaatatatgtacatatacatgtatatacacacagacacatgcatatacatgaatataccttgagcatgaatccctggagaaatcgttttcgtaggctcaccaatggtgagtaaagatacagctcttttaaaggtcataaggataatatattttccccatcaatgctgattctgagaaaagagcaatttatcaaaattaaacactgtaaaagaaaggtgtccatatgtctttacctacctaagtaaaacaggaagaaaatcagtaacattatccttaggttttgacaatggtacttgcttcttgttgttttattgtttcctgaattcatgcagatgcctggccattcctgggaagagtggataactcagaagtcactgtactccacagagcctcactgcagtgtctaaaggtagatgcaaattaaaatgcagggaaaataacttttctgatgttgatgcatgtctttgggaaacacatttataaacatggatacctgataatagatattgaaacccatttcctgtgtgttaaaatatttaaaaagtggatattccaggaatgttttgcagctttgtacaagtaacataaattggacacctcagaatgaaagttcatgttggttctgaatggttcactgcagctcctgtcacaagctgggatggatttatcacattgagttatgaaattacctggttctaagaatttttgagtggcaaaaatagaaaacaatcttcatttgaaaacatccctaagcttgaataaatggataccatagatagcttctcttttttattctggtgtcattaccagcatctgaatttcaagttcttaaaatttcaaaaattaaaatttttcattattagctatccatttatcttttacatgaacttgtcatgaacaaattcaaatgtttatgccagcaaatttttgtactgttgcatagttaaaaatgctgggagtctctgcatagatacaaaatattattaaattattacataaatttaattttataaaatttaatcatgcttcttttgtctggtaatagacattggacagatatttttagttcagatggtgattctgaagcttacatctcccttaaaaaaatctaaagcagctcttatgggcttctaattttaatataaataaataatttaaattttattggtgttattggaagaaaaatgctattaatgggctaataaaaaacatgtgtttctcttatggattttaataagctccagtattattcaaatgatcaaaaatatagttataattttttgaattttaaaaatgtgattgctctaataaagaataaaatctatgctttttaacaaacatagttttggtgcctaattctgtaatatgttttattgaaattagattcatttctctaatgtgagaaaaatatatccagtaatagtattgactgtttaaaaaattgagctcatcaaaaatattgtcatcaaatacaggtggttaatctgacatacattgcagttacatgcattatttttatttacaacatttgctccttaatgatgaatttatctgtgttaccctgtttttctacctggaactccatagaatgatgtttgcaaaccaacatgtgctcttttcagtcattcactgttttaatatgacatggtagagaagataaggtttatggcaggtaattttttgtaatgtgtattaaacgaagttcaaagattagaaatacatctgtgtcctgaaaaccttagatacatagccgactgtatacagaggttcatctcaacctcaacactattgacttttggggctggatagttctctgttgtgggggtttgtcttgtgcactgtaggtttttagtagcatccacactttctcctcaccagatgccagttgcaccctcccccaagttgagacaaccaaaaatgtctccagatattgccagctaccccttgagggatggtacctctggttgagaaccattgctagagaatgatctttactgaatttgccctttataagaaacccagtgaatttctagagcaagtcccaaaaactaagggacagctaagaagttattatggttgacttcaaaggcctaaactgtgttttttatgtccactaaacaacttgattaaaagacggaattttgactcgtgtctgtatcatacaagtacaaatactaattttgccctatgtatccgtaaatgtcatttgtgattttgacttatttatttaatgccctttcttatgccgtgggttttcaagtttactcatttctatggttgcaaataactctaaaacttattatataaactttcatattataggcagaacacaatggctaaatatctgttgcatgtactttaaagtttattataaaatataaacagatatataaagatgttgactcttacctgtgattttgcatggtcagactcggtgtcaggtacggagaggattctcatgactgtcttacctctactgaatattctagtgagttatatgatttacggagtgattaacagaggtctatataaagttacttttcccctttacttaattatattgtagtgtgcagataacaaaactgctaccttctcatccaagtggtctgtagaattcatgtcccttacagtggtcatttaaagtcaatatttatttatgtatgtaataaaaaaagttggatttttgtgtatgtctgtcacattatttagagagaagtaatcttgtaaaaatgttttgtaaaaaacaaaaaagtattgtaaatagtcttgatattctgtgactcattattttcatgttagagtttgtacatactggttcaataataaagtatccttaaaccaga

SEQ ID NO: 56415 - DNA, 2960 bp, Homo Sapiens
cggggccccaggccgcggggcggcgcgggacggcgggcgccggcgccgcagatcagccagtagacatgatgagcatcaaagcctttacgcttgtctctgctgtggagcgggagctgctgatgggcgacaaggagcgcgtcaacatagagtgcgtggagtgctgcggcagggacctctacgtgggcaccaacgactgcttcgtctaccacttcctgttggaggagaggccagtgcctgctgggccagccacgttcactgccaccaaacagctgcagagacacttgggcttcaagaagcccgtgaacgagctgcgcgcggcctcagcactcaacaggctgctggtgctgtgtgacaactccatcagcctggtcaacatgctgaacctcgagccagtgccttcgggggcccgcatcaagggggcagccacgtttgcactgaacgagaaccctgtgagtggggaccccttctgtgtagaagtttgcatcatctctgtcaaacgcagaaccatccagatgtttctggtgtacgaggaccgggtgcagatcgtcaaggaggtgtcgactgccgagcagcccctcgctgtggctgtggacggccacttcctgtgtctggctctgaccactcagtacatcatccacaattacagcacaggcgtctcccaggacctttttccctactgcagtgaggagaggccgccgatcgtcaagaggatagggagacaggagttcctgctggcgggccccggagggctgggcatgtttgccacagtcgcagggatatcccagcgtgcccccgtgcactggtcggagaatgtgattggggcggctgtgtcctttccatacgtcatagcgctcgatgacgaattcatcacagtccacagcatgttggatcagcaacagaagcagacgctgccctttaaggagggccatatcctacaggactttgaaggaagagtgatcgttgccacaagtaaaggagtttacatcttggttccattacctttggaaaaacaaatacaggatcttctagcaagccgcagagtagaagaggctttggttttagcaaaaggagcccggaggaacattccaaaggaaaaatttcaggtaatgtacagaaggattctgcagcaggcgggatttatacagtttgcacaacttcagttcctggaagctaaagagctcttcagaagcggccagcttgatgtccgggagctgatctctctctaccccttcctgttgcccacctcctcctccttcacccggtcccaccctcctcttcatgagtacgcagacctgaaccagctgacccagggggaccaggagaagatggccaagtgcaaacgcttcctcatgagctacctgaacgaggtccgcagcacagaggtagcaaatggctacaaggaggacatcgacacagccttgctcaaactgtatgcagaggctgaccacgacagcctgctggacctcctggtcactgagaacttctgtcttctgacggacagtgctgcctggctagagaagcacaaaaagtattttgcacttggactgctctatcattataataaccaagatgctgctgcagttcagttgtgggtgaacattgtgaatggcgatgtccaggactccacacgctcagacctgtatgaatacatcgtggattttcttacctactgcttagacgaggaactagtgtgggcctatgctgattgggtcctgcagaaaagtgaagaggtcggagttcaggttttcaccaagagacctttggatgaacagcagaagaacagttttaatccagacgacattatcaattgccttaaaaaataccctaaagcccttgtgaagtatctggaacatcttgtgatagacaagagactgcagaaagaagagtatcacacccacttagctgtgctgtacctggaagaggtgctgctgcagagggcctccgccagtggcaagggtgcagaggccaccgagacgcaggccaagctgcggcggctgctccagaaatctgatttataccgagtccactttcttctcgagaggctgcagggagctggcctgcccatggagagcgccatcctgcacgggaagctgggcgagcatgagaaggcgctgcatatcctggtgcacgagctgcaggactttgcagcggccgaggactactgcctgtggtgctccgagggccgagacccaccccaccgccagcaactctttcacacgctgctggccatctacctgcatgctggccccactgcccacgagctggccgtggctgccgtggacctgctgaaccgccacgccaccgaatttgatgcagcccaggtgctgcagatgctgcctgacacctggtcagtgcagctcctctgcccattcctgatgggggccatgagggacagcatccatgccaggaggaccatgcaggtggctctcggcctggccaggtccgaaaacttaatctacacctacgataagatgaagttgaaaggaagctcaatccaactctcagacaaaaagctttgtcagatatgccaaaatcccttttgtgagcctgtgtttgttagatacccaaatggtggtcttgtgcacacccactgtgccgccagcagacacacaaaccccagctcatccagtcctggcactcggacttgaaaagcttggcccaagggtgcgaggggaactccgagttctttctgagcctgctggacatgaagagcagatgaccaccatgctctgtgtcagccaggacgaagggagacatctgggtgccagggagccttccgtccatacgcaacaaggactcctcgctgctgaccaggctctatgaatgtacatggaatgaccaggctctatgaatgtacatggaaaacccctaaaaatccccaaaacagaaacatacaagagttcacctgtccaggtacatagtaatccaagacagaggtctactttgaaaaaaaaaaaaaa

SEQ ID NO: 56416 - DNA, 8081 bp, Homo Sapiens
gtctaaaactctcttttctcttggctcttcttattcgagtgatgaggaggaggagttgcataattcacggcccttccacagtaccttccacaataccagtgctaatctgactgagagtataacagaagagaactataatttcctgccacatagcccctccaagaaagattctgaatggaagagtggaacaaaagtcagtcgtacattcagctacatcaagaataaaatgtctagcagcaagaagagcaaagaaaaggaaaaagaaaaagataagattaaggagaaggagaaagattctaaagacaaggagaaagataagaagactgtcaacgggcacactttcagttccattcctgttgtgggtcccatcagctgtagccagtgtatgaagcccttcaccaacaaagatgcctatacttgtgcaaattgcagtgcttttgtccacaaaggctgccgagaaagtctagcctcctgtgcaaaggtcaaaatgaagcagcccaaagggagccttcaggcacatgacacatcatcactgcccacggtcattatgagaaacaagccctcacagcccaaggagcgtcctcggtccgcagtcctcctggtggatgaaaccgctaccaccccaatatttgccaatagacgatcccagcagagtgtctcgctctccaaaagtgtctccatacagaacattactggagttggcaatgatgagaacatgtcaaacacctggaaattcctgtctcattcaacagactcactaaataaaatcagcaaggtcaatgagtcaacagaatcacttactgatgagggagtaggtacagacatgaatgaaggacaactactgggagactttgagattgagtccaaacagctggaagcagagtcttggagtcggataatagacagcaagtttctaaaacagcaaaagaaagatgtggtcaaacggcaagaagtaatatatgagttgatgcagacagagtttcatcatgtccgcactctcaagatcatgagtggtgtgtacagccaggggatgatggcggatctgctttttgagcagcagatggtagaaaagctgttcccctgtttggatgagctgatcagtatccatagccaattcttccagaggattctggagcggaagaaggagtctctggtggataaaagtgaaaagaactttctcatcaagaggataggggatgtgcttgtaaatcagttttcaggtgagaatgcagaacgtttaaagaagacatatggcaagttttgtgggcaacataaccagtctgtaaactacttcaaagacctttatgccaaggataagcgttttcaagcctttgtaaagaagaagatgagcagttcagttgttagaaggcttggaattccagagtgcatattgcttgtaactcagcggattaccaagtacccagttttattccaaagaatattgcagtgtaccaaagacaatgaagtggagcaggaagatctagcacagtccttgagcctggtgaaggatgtgattggagctgtagacagcaaagtggcaagttatgaaaagaaagtgcgtctcaatgagatttatacaaagacagatagcaagtcaatcatgaggatgaagagtggtcagatgtttgccaaggaagatttgaaacggaagaagcttgtacgtgatgggagtgtgtttctgaagaatgcagcaggaaggttgaaagaggttcaagcagttcttctcactgacattttagttttccttcaagaaaaagaccagaagtacatctttgcatcattggaccagaagtcaacagtgatctctttaaagaagctgattgtgagagaagtggcacatgaggagaaaggtttattcctgatcagcatggggatgacagatccagagatggtagaagtccatgccagctccaaagaggaacgaaacagctggattcagatcattcaggacacaatcaacaccctgaacagagatgaagatgaaggaattcctagtgagaatgaggaagaaaagaaaatgttggacaccagagcccgagaattaaaagaacaacttcaccagaaggaccaaaaaatcctactcttgttggaagagaaggagatgattttccgggacatggctgagtgcagcacccctctcccagaggattgctccccaacacatagccctagagttctcttccgctccaacacagaagaggctctcaaaggaggacctttaatgaaaagtgcaataaatgaggtggagatccttcagggtttggtgagtggaaatctgggaggcacacttgggccgactgtcagcagccccattgagcaagatgtggtcggtcccgtttccctgccccggagagcagagacctttggaggatttgacagccatcagatgaatgcttcaaaaggaggcgagaaggaagagggagatgatggccaagatcttaggagaacggaatcagatagtggcctaaaaaagggtggaaatgctaacctggtatttatgcttaaaagaaacagtgagcaggttgtccagagcgttgttcatctctacgagctcctcagcgctctgcagggtgtggtgctgcagcaggacagctacattgaggaccagaaactggtgctgagcgagagggcgctcactcgcagcttgtcccgcccgagctccctcattgagcaggagaagcagcgcagcctggagaagcagcgccaggacctggccaacctgcagaagcagcaggcccagtacctcgaggagaagcgcaggcgcgagcgtgagtgggaagctcgtgagagggagctgcgggagcgggaggccctcctggcccagcgcgaggaggaggtgcagcaggggcagcaggacctggaaaaggagcgggaggagctccagcagaagaagggcacataccagtatgacctggagcgactgcgtgctgcccagaaacagcttgagagggaacaggagcagctgcgccgggaggcagagcggctcagccagcggcagacagaacgggacctgtgtcaggtttcccatccacataccaagctgatgaggatcccatcgttcttccccagtcctgaggagcccccctcgccatctgcaccttccatagccaaatcagggtcattggactcagaactttcagtgtccccaaaaaggaacagcatctctcggacacacaaagataaggggccttttcacatactgagttcaaccagccagacaaacaaaggaccagaagggcagagccaggcccctgcgtccacctctgcctctacccgcctgtttgggttaacaaagccaaaggaaaagaaggagaaaaaaaagaagaacaaaaccagccgctctcagcccggtgatggtcccgcgtcagaagtatcagcagagggtgaagagatcttctgctgaccctcttcctctctgctgaggcagctgcctcctgatcctggccagcccacctctcctgctgtccccgcgtgcacaagtctcttacactggacgcccactgctcctcagcgtccagtcctcctgggcggccccaggtcctggacaataagcaacagatgatattgagtgtcgggtggggaaggaggcccagactctgcttcggccatgatttgtgactgcccaggactctcaggttgggctggccctactcaggattacactgaaagtaatggcctcgtaagtacaggtgatggttttggacacgtcaggaattcctaaaggctgaaagagtgtatccaagtaaggtctgaacctccgaatgccttttatttgggggaacacaaaaccaaacagcagatgttttggacttgatctgtgtacgtacatggggacctgtctgcatatacacacggggaatgccagaagaaggcccagtctgcaccaggcgtctggtcaacttagcacaagggcagtgcctggacggacccggagcccccgcatatcagcagttcacccagtactcctcagagactggtttccctctaaacccatcccgggcacataccacccgtgttttgcatgtatttctcatttcattttagggatgacaaacatttgtgaaaccagtgagagaaggcttgatgtgtataaaagacgtgatgtgcaccacctcgatctcggtgtttcaggcactaaagcaacaaaacaacccatagtatctcattctgtcatcagatccagaagaaatatcctggttttccagcatgtttacccacatgttttggccatggataaagtgaagaggcctactcaccattatccctgcagcgtgacaccttttgattgtcactgaccactcagaaggggccacggcctcctggctgtgttcctgagcccccgtcgtgcctctcccagacagcagctgtctggcccttgctgggtgagggcacaccactgccaggggtcagcctcgcacccaggccaggcagaagctgtgctctgaagctaggacagctggctgagaagtgggttcaggcgaagggtgaagccatgtgtagcagttcctgccagtgcagatctggagaggagctggcccggaaggcgtggttgtgaaagcgcccttcttatgttaggaggccttggcaaaattggatttcttcaaaaatacatgtaaaggtctgttgttgaattgtactctgcccctggaagcagatacagatggctgcctgctgctcggctttgcttttgcttttcccaccgtgttttcatctttgttcacttgaggctttccccagctggtgtgtgcaggacagttcatggtaatgttgccctctgaggccccgtacaccagaagggaggccctggaaaattttgtgcttccaacgtggccttcaattcttgcttttttgcccctcggaagcatggggcttttgagcacacttaaaaaaagaaaaatctgtaacttggtgcttattgatgaattgcaagctggccttgcagatggagatatttatctttcagtttatttgaaagaggtctggtttaaaatttgtagcctacatttgttttatttattgtatttgtgtgtttgtgtttgtttttttttaagggtgagccaggtctagcccaacagtctaaactatccagtcaataccgagtgaagtggcagccagcactgttcactctgtgtcttttgaagtgccttgaaggcccagatgaaattttaaagggagggggtccatgtccttccctcccccaccccgcctcattctttaatcaaaggatgtcttctcccttgtttgagaatgaagaaactcgccacctctgacctacctttgcctttttctgtcatggagaatactcacccttcagaaacagaccaaaggccaaaacctgctgatttttctattgaaaatatgtccccttgcaaagaccctaaacaaaaagttaagtttctttctttcacctatttgtacaactccaagttacagctgaatctgtcgtgactttcctgagatctacccggggcttggctgtctgttctgggcactggctccgagttcccctcctgggatttgcaggagggcagtactgaacctgcattcttctccttgtaaatgtaggccgggtgcccctgttctccgggtttggaacaatacgaggttggtgctgatgggatttacttgcgtacgtgctcttcacaaaaacaccgtggatgctgaagttagagcacgtcgccacagagcttgacatcaatgttagagggtctcttactccccgcccagctgtgatgtttcatctgctttggttgttttggtggtcttttttaaaaatagagatttcacatctgcccagaccccactcaaaacgatttggtcaggttctggttggacaagtttaaaatcaaagtagtgcccggaattccctcaaaccacccaacttcatccaggaatacagtctgcagtgcagcaacagaaccgcttaccaagaactgtgcttacatacctttgtcatctctcttccccccttggaagttgtcctcagggggatttgttcctgtcctggggatttacctgggatggtggctgcctgtgcttttgctcatggccttgacagtgctctagttgctggatctaatggcctgtcttggtttctatcacatgagaaggggttgtttttttggggtgactcggactgaattccccatactgtttccacgccgggacaccatgttctccatcaagctaaagaaatcacgtgcctgaaactgtgcttaagttttgggggaaagatggagttcctatccagagcccccagatttccagaatcgagtgagcttcctggaaggagactgcgtcttctctcaattccagtcatctcagtcgttgtcgttaggtgacatgtgcactttaaatgctctcatcggttggcttcattttcaagacaatcaaatgtattgactgtgttttcttcttagaaaatggagagggttaaaaacatgcaaactgccactttcaacctttgccagtattccctctacccccgtgagagctatctggggggaagaatccttaccaaggtttttttggaaaggtacgaatcttaacttttttccccttctgtgtctcagggtaatactattcagagtcgcccctttgctcattttctcccgtatttgttaccttcctgaggcctcagtattagtcgtgagcacaaagttttgagacctttggcgttgtttcttgatgtgggaggggaggtgttagtgcatgcaagggttgaactagatagaccctgccttagtagagggtgggactataaccttagaggccagaacttgatccagaagttgctgtccacagaagtgctttctatttcatcatttttgtttctagggctctttttctgtagccaggtcttcccaaggattttagtatttgcattggagttgaggtttactctaatgatggtggcccagctgtgcccagaggacagccaggcaggccctgggagggagtttagaaagacagtcctggtgaatgggcttcaagtggtcacaaagagggtggctgtgaggtgaccccagacactgcagaacgatgtgcaccctctgcgttttggatgtccttggaatgtgggagcctagaaataaccctgtggatggaattggggcagcggctgctggagatctgtgtgccttgccttccttcagcaggaccgtctaggtgcgcagccacctatggatgcgtcccagccagccccgtcgctctcgtccatcctcagagacaaagaagagggcagggagtttgggcttggttttgaactttcctttcaatgtagcaaagcattcctagttaaccagagccttggaatctactgcctgctggccaggctttaaaatgaaaagtgttttaatgctgccataaaagggaggcgggggggaggaagggaaaataaaggcatctttccaagtactcatctaatttaattgtcaaaagattgataggccatgaattacttctccatctcactaagggttaaaggcgtgcaaccccccactggctgtgtcccctgccaccgaagtgagtgacctgccctacaaccaggtgggaccacctgtgctgcagtccggaggggcttctgcaggaagcactcaccccccacaccttccccggcctgagcttcccctacctttcgtcaccacctgagggcatgagcacaggccatggggcgtgcctggtgagtctgcctgtggttcaggcttagcctgtggtctcctgtgtgctgctgcccgcatgggatgcgcaggggaggcgtggggatccgcaggagggtggttgggatacaccggatacctctgctctcattgcttgtttgcaaatgctctatggacatttgtgtgctaaatcctattaaataaaaaagacgggttaaaacccagatgctgtatattcatttgtaattatgtataaagtgaagcagttttaaactgtaaagatttttttcagtgtgttttctcgaattttgccacaacatactggcttcgtattttatttatctttctttctagttaccagcttcagacccttgtaaagtctccctcagccctttcaaaaaataataaatttcctgtgaagtt

SEQ ID NO: 56417 - DNA, 2917 bp, Homo Sapiens
gcccaggtgactgactaatccgccgccttcaggagacagaattggccaaggcctgaaggccccggagtgcaccagcggcatgtacaaagagaccgtctactccgccttcaatctgctcatgcattacccacccccctcgggagcagggcagcacccccagccgcagcccccgctgcacaaggccaatcagcccccccacggtgtcccccaactctctctctacgaacatttcaacagcccacatcccacccctgcacctgcggacatcagccagaagcaagttcacaggcctctgcagacccctgacctctctggcttctactccctgacctcaggcagcatggggcagctcccccacactgtgagctggttcacccacccatccttgatgctaggttctggtgtacctggtcacccagcagccatcccccacccggccattgtgcccccctcagggaagcaggagctgcagcccttcgaccgcaacctgaagacacaagcagagtccaaggcagagaaggaggccaagaagccaaccatcaagaagcccctcaatgccttcatgctgtacatgaaggagatgagagccaaggtcattgcagagtgcacacttaaggagagcgctgccatcaaccagatcctgggccgcaggtggcacgcgctgtcgcgagaagagcaggccaagtactatgagctggcccgcaaggagaggcagctgcacatgcagctatacccaggctggtcagcgcgggacaactacgggaagaagaagaggcggtcgagggaaaagcaccaagaatccaccacagaccctggctcgcctaagaaatgccgtgctcgctttggcctcaaccagcagacggattggtgtggtccgtgcagataactctcttcactattcctaggaggaaaaagaaatgcattcggtacttacccggagaaggccgctgccccagccccgttccttccgatgacagtgctctaggctgccccgggtccccagctccccaggactcaccctcataccatctgctgccccgcttccccacagaactgcttactagccctgcggagccggcacctacatccccaggtctctccactgctctcagcctcccaaccccagggcccccacaggccccccgcagcaccctgcagagcacacaggtacagcaacaggaatctcagagacaggtggcctagcaggcacaggacacctggccgcctccaggagcctaccccctgaaagtgacagagacccagatctcatggaaactggccaggggtcctgttaacgtcatctcagggtccagaccctgaagatttcagaggctgcaggacttctgcctgaacctggggtcatcgattcaaactgctccaagtggtgggaatcagatctgtcttgatgtgtcatctaattaagggaatcccttgtacctatggctgcctgcatctattctttgtaccatctgtcttgccagccagaagcctctgcctccctagcttttctgctataggtcagagatgggctgaactgagcctagctaccttctctacccatctcccccatcccccactgccacaccctccccattcagacacttcatggaccaagaatgagctggtttgtcaaacaacatgtgagcatggtcacaagcacaaagctcaagatgacagctcttctaaggaaatggagaagctctgtttataaaaacaaaaacaaaaccagctgctactcataagttggaccagaggaagccccttactatgatctcaggagcttgcaagaagcaggaaggggaatggaataggttaagtttaggcctatcaacctaagcaacagaaataatctgacactaccttatcaggcaaattggggaggggagggtgtatctagctctagttcaaattatttggaagtgttccctgagaaacccaccagcctaagaagctctggccccaggcttgtcactagcagctgcagtcaacagttcaaagaagtcatggcccaaatccagtgtgcacccctccccattcacagagcctttttcacaattccatttccagttcatctatggcagtccagccagctcctgggcagcttgagagggcaaacccaaaacctcatgacagccagagcctgtctttcagcattcagtccgcctggccggctccagtttccccatggggctgcgggacagaggaccattacaactagatcaaggagcccagaaaacctccagtagtggacaacaggttttcaccatagcctacgttaacccatttttgagccaagcttcaaccctcagccttgaaaaacaagtctttaatttaatttttgttttttgcctaaatccaaagaaaaagggctgccgggccaggcgcggtggctcacgcctgtaatcccagcactttggcaggccgaggcaggtggatcacctgacgtcagtagtttgagaccagcctggccaacatggtgaaaccctgtatctactaaaaatacaaaaattagccggacgtggtggtgcgcgcatgtaatcccagctactcgggaggctgaggcggaagaatcacttgaacccgggaggcggaggttccagtgagccgagatggcgctattgcactccagtctgggtaacagggagactgcatctcaaaaaaaaaaaaaaaaaaaaaaaagggctgtccatgtattcacacacccctcaaaaaaagcctttagttcctactttagccactggtttctcagaatccaaagatcacatattctagtgtaacactgcaagaagtcttgagaaaaagattattgtagtgttcaaaatatttttgtattgttaatgcatcatcatagaaaaacttttaaacatgagaataaagatactttttactgggtttgtttttcaaagcctgaaaaaaa

SEQ ID NO: 56418 - DNA, 1243 bp, Homo Sapiens
gggcggtggcgggcgctggtgaaggagtctcgctgagctcgaggaggtggcgcgatggagggactggaagagaatggaggtgttgtccaagttggagaattgttaccttgcaagatttgtggaagaacattctttccagtagcattaaaaaaacatggacccatttgccagaagactgcaactaaaaaacggaagacttttgattcaagcagacagagagctgaaggaactgatattccaacagtaaaacctctcaaaccgaggccagaaccaccaaagaaaccatctaattggagaaggaaacatgaagaattcattgctaccataagagcagctaaaggccttgatcaggccctcaaagagggtggcaaacttcctcctcctcctccaccttcttatgatcctgattatattcaatgtccatattgtcagaggagattcaatgaaaatgcagctgatagacatataaatttctgtaaagaacaggcagcacgtattagtaatgaaggggaattttctacagataccaaaggaaaaccatcttctcggacacaggtgtataagccacccgcacttaaaaagtcaaattctcctggaactgcatcatcaggatcttcacgattaccgcagccaagtggcgctggcaaaactgttgtaggtgttccttcaggtaaagtgtcttcaagtagcagctctttgggaaacaaacttcagaccttgtctccctctcataaagggatagcagcccctcatgcaggagctaatgtcaaaccccgaaattccacaccacctagtttggcaagaaatcctgccccaggtgtgcttacaaacaaaagaaaaacatatactgagagctacatagccaggccagatggggactgtgcatcttcccttaatggtggaaatattaaaggcattgaaggacattcacctggaaacttaccaaaattctgccatgagtgtgggactaaataccctgtagaatgggccaaattttgctgtgaatgtggcattcgaagaatgattctatgaatagaatctcaaaaaaaaaaaaaagccaagttcagagtttatgattattgctgcttggacagctagagcacatcctctagttagtttgtgctaaaaatactcgaaataccatttccagttaattttgaagtgtaatcttttggctatataatgtgtgtatgtttatatgtgtacatatactgtatataataaatatttgataccccaaaaa

SEQ ID NO: 56419 - DNA, 2381 bp, Homo Sapiens; identical to SEQ ID NO: 29198

SEQ ID NO: 56420 - DNA, 3665 bp, Homo Sapiens; identical to SEQ ID NO: 25918

SEQ ID NO: 56421 - DNA, 5198 bp, Homo Sapiens; identical to SEQ ID NO: 28995

SEQ ID NO: 56422 - DNA, 2832 bp, Homo Sapiens
agcttcgaggccagtgggaggagggaggggccaggcagctgagggccaggaaagatgtgaaaaactctagctggtgaccgagaggaggagtagagtgtgcccttagttcatatgaactagagggagttggtatttgcacagcagtcagggtcacatgagtgatcatggtacagtgagaagttctccctcccagggccaggtcacagggtttgtttctgttcaatccggattcttccagtaaaagcttcaacttcccacactgaagctgagagcctcccaaagtgctggctacctgctgagcgcccccgtaactctgacacagtagtaatttgagcctctgcaattgccgtctgcttcctgtgaaagtcctttccgtgcccactgacccttgagtgggcctttgagctgctgactttcagctggaacttgaagggaccccaaccctgagacactatggccctgacctcagacctggggaaacagataaaactgaaagaggtggaggggaccctcctgcagcctgcaactgtggacaactggagccagatccagagcttcgaggccaaaccagatgatctcctcatctgcacctaccctaaagcagggacaacgtggattcaggaaattgtggatatgattgaacagaatggggacgtggagaagtgccagcgagccatcatccaacaccgccatcctttcattgagtgggctcggccaccccaaccttctgagacaggatttcaccatgttgcccaggctggtctcaaactcctgagctcaagcaatccacctgcctcaacctcccaaagtgccaagattacagacctgctgccaccgtctttctgggaaaacaactgcaagttcctttatgtagctcgaaatgccaaagactgtatggtttcctactaccatttccaaaggatgaaccacatgcttcctgaccctggtacctgggaagagtattttgaaaccttcatcaatggaaaagtggtttggggttcctggtttgaccacgtgaaaggatggtgggagatgaaagacagacaccagattctcttcctcttctatgaggacataaagagggacccaaagcatgaaattcggaaggtgatgcagttcatgggaaagaaggtggatgaaacagtgctagataaaattgtccaggagacgtcatttgagaaaatgaaagaaaatcccatgacaaatcgttctacagtttccaaatctatcttggaccagtcaatttcctccttcatgagaaaaggaactgtgggggattggaaaaaccacttcactgttgcccagaatgagaggtttgatgaaatctatagaagaaagatggaaggaacctccataaacttctgcatggaactctgagcaagatgtaaataaaattaaaaggtggatggcaagagtgcaaatactatcttcaatccttcagtcccagccagaagaatctctgaaagcatattgtgaatgtatacaatgtagtacaaacaatctctgtgatgattaacagtatgtcaccacttcattttttaaaaaggatcacgtctaatgcccattttcccaactattctttccaaagtaagatataaggtagcttaataaactaagtaaaacgtatgacttgagtacaaaaggattgttttaatccccattattctggaaagtgcatcctagtctcccagtctataacatcataataccttgagtataagtccaaatattaggttatatctatattaaaaacaaaatttctgtcatctgtcctggccattcaggcaactccagcctgggctcaatcctggagttctgtctggtcactatcagaaggaacactttgagggaaaccctggtgcagccagccctgaggaaacatggcctgagtgccctcactggtgggtgggaataaaatggaagtgcacagaggagatgtcagaagaccaaaacttggtgaatagtcccagtgctaggtcatataggaaacagaaagcatgacagtggccttttgggaacccaagttacgtcctggtgaaagcagaaaggaggagacaggatggctgtcaacaacgtcagcatgggcatggctcccaggcatggaggtaattgggtcttggcttcaatgccacccttttgggaagccctaaaccaagtgaggtgttcttttcccttgcttcccatatttgtcccagttgcagccctgttgttatgtatttactcttcaatttcttatttatacctctcactcaattgttaattctttgggttcagtctcatgccatatttactcctagtacctaatgcagtgcctggcacacagcaagtgcccttgagaacttgtagagggagtaaaaaagtgcatggataaatgactgcagcaaatcacaaattttgaactttgacccttttcttttagtcccaaatagtggcattccatagctgagggtagtaggagcagttcaccctgggagcagacaataagaggaagaatgaagccaactaaaattctgaatgctttttgttggatttcgtagggtattttttttaaaatagggtcttgctatgttgcccaggctggtcttaactgactgctttttattattaccatgcactggcaattccaaacaatgtcagtgttaaaatgcttctccctgaaaaagagaaaaaaaaaaggaaaaaaagaaaagaaaagtgaaaagaaaaactcttattggcctaagttctaaataatagctaggttaccactgagttttaactatatgtatatgagcttcaaataagcacctttttattatgtaaataaataaaagttatctgtatccccaaaaa

SEQ ID NO: 56423 - DNA, 1657 bp, Homo Sapiens
gggagagagaggagaaaggcgaaggagaaggaggaaaaaaaaaaggttgataggtttgtgcgcgggtccctcgtgcgggctgcgctcctcctgggtgctatttgacaattcctgcctctgccattggtcagtgttggatcagatggttgtatttccttctggccctcactggcacctcgccatcccccctcagctaaaacccaatctcggatatactactaataggcgcggcgctcggactataaaacacaacaaatcataaacccggcggagcagcagcggccgcgcgcgcctcccctcccaatgagttcctatttcgtgaactccaccttccccgtcactctggccagcgggcaggagtccttcctgggccagctaccgctctattcgtcgggctatgcggacccgctgagacattaccccgcgccctacgggccagggccgggccaggacaagggctttgccacttcctcctattacccgccggcgggcggtggctacggccgagcggcgccctgcgactacgggccggcgccggccttctaccgcgagaaagagtcggcctgcgcactctccggcgccgacgagcagcccccgttccaccccgagccgcggaagtcggactgcgcgcaggacaagagcgtgttcggcgagacagaagagcagaagtgctccactccggtctacccgtggatgcagcggatgaattcgtgcaacagttcctcctttgggcccagcggccggcgaggccgccagacatacacacgttaccagacgctggagctggagaaggagtttcactacaatcgctacctgacgcggcggcggcgcatcgagatcgcgcacgccctgtgcctgacggagaggcagatcaagatatggttccagaaccgacgcatgaagtggaaaaaggagagcaaactgctcagcgcgtctcagctcagtgccgaggaggaggaagaaaaacaggccgagtgaaggtgctggaaagggagggaggacgcgaggggaaaggcctgtggggagccacgggcgtcagagagacccgggaaggaaggctctcgggtgggggagccaggagacctgctctccggcgcagacaggcggggcccagcgctctcctggacgcccccgcccgcacagctcccggcgggtgctctgaggcctcactactcgagcccacccagcatcccgcgcgcccttccttcccgaggaactcgcctcagcctgatcaggcttcctggtgagaactgaggagcggactcacttgatgtttcctggaagcagagcaaaatgctcttgtccctgtcgcgtctcattttgtccatgtcccccgtgcacggttcaatggtagattcgctgtcccctcagcgggggccttgaagactccctgatcccagacctgtcgtctctcccaccccctccccaaagccactggaaggagcacatactacctagaagtaagaagaggagcctcagaagaaaacaaagttctattttattaattttctatgtgttgtgtttgtagtcttgtcttagctctggacgtgaaatacttcgatgatgatgatgatgatgatgatgataataataataataataacaacaacaacaacaataataaagatgtgaaaactcgaaaaaaaaaaaaaaaaaa

SEQ ID NO: 56424 - DNA, 2110 bp, Homo Sapiens; identical to SEQ ID NO: 22252

SEQ ID NO: 56425 - DNA, 7313 bp, Homo Sapiens
ggcagcgcatacactacaatggctgctggaaagaggcgtaaggaaacaatttccaggcccgccgcgtccagcccgaaatatgagaaaaaaattattagaaattccgcgggcggtgtagaggcggcggacgggccggagggaggatgttaaagccccgcggttgcctcttggtgctgccttggccgtatttggcacccagaatgcttcattctgtgacggtctattaataaggttgccttgctagagtttggagcagggcctcagattggccaaaatgggaaggattggattccactctcttccacgaagagtcaatgggactggctaagatcaaagtctgaggctttttccatcagtaatcagtccctttttgctttcttttacgaccacatgaaacttgagaagccacctaaagctatatcatttagtggagttgggcagttcccaagtgtccaacaagaaggcctggtttaggctgcgatggccactgtcattcctggtgatttgtcagaagtaagagatacccagaaagtcccttcagggaaacgtaagcgtggtgaaaccaaaccaagaaaaaactttccttgccaactgtgtgacaaggcctttaacagtgttgagaaattaaaggttcactcctactctcacacaggagagaggccctacaagtgcatacaacaagactgcaccaaggcctttgtttctaagtacaaattacaaaggcacatggctactcattctcctgagaaaacccacaagtgtaattattgtgagaaaatgtttcaccggaaagatcatctgaagaatcacctccatacacacgaccctaacaaagagacgtttaagtgcgaagaatgtggcaagaactacaataccaagcttggatttaaacgtcacttggccttgcatgccgcaacaagtggtgacctcacctgtaaggtatgtttgcaaacttttgaaagcacgggagtgcttctggagcaccttaaatctcatgcaggcaagtcgtctggtggggttaaagaaaaaaagcaccagtgcgaacattgtgatcgccggttctacacccgaaaggatgtccggagacacatggtggtgcacactggaagaaaggacttcctctgtcagtattgtgcacagagatttgggcgaaaggatcacctgactcgacatatgaagaagagtcacaatcaagagcttctgaaggtcaaaacagaaccagtggatttccttgacccatttacctgcaatgtgtctgtgcctataaaagacgagctccttccggtgatgtccttaccttccagtgaactgttatcaaagccattcacaaacactttgcagttaaacctctacaacactccatttcagtccatgcagagctcgggatctgcccaccaaatgatcacaactttacctttgggaatgacatgcccaatagatatggacactgttcatccctctcaccacctttctttcaaatatccgttcagttctacctcatatgcaatttctattcctgaaaaagaacagccattaaagggggaaattgagagttacctgatggagttacaaggtggcgtgccctcttcatcccaagattctcaagcatcgtcatcatctaagctagggttggatcctcagattgggtccctagatgatggtgcaggagacctctccctatccaaaagctctatctccatcagtgaccccctaaacacaccagcattggatttttctcagttgtttaatttcatacctttaaatggtcctccctataatcctctatcagtggggagccttggaatgagctattcccaggaagaagcacattcttctgtttcccagctccccacacaaacacaggatcttcaggatcctgcaaacactatagggcttgggtctctgcactcactgtcagcagctttcaccagcagtttaagcacaagtaccaccctcccacgtttccatcaagcttttcagtaggattctgggacatggattcattacagaaatgtatgtgtagctgtgccctagatgaccatttttattttagtgcctactttaaaacagtataaaaatttctgcttttgtataatacaaattttcattaagccagtataaaatagaaactagcttttaaactgagctttggaaccatttgtgttcagttaagtttacctgggtattttgtcctgattcactgccaattgtcacattttaagactttttttttttccatataggaaagccattattagtagtaaacttttacaaatcccattttcaaattacttttagatcttaaaattttcatttttgtctaataacagtggctctaccttttgacatctggctcattaaaaaatttagcaatagaatgtaaattgtataaaaagtttgtgaataactcaagggtttaaattttcttactagcttctaaatggattaataatcaagtgcttcaaatgaattaagagtccagtttcggaagataataaatgtttgttagatacaccataatttcagatcagtatattctgaagactctctgttgtctggctaaaatatttgccatctttattatgagcctttaaggaaaacaaaccctaaacacaaagcatcagtatttatagcaaaaagagactctgttaggtgacatggcatttcgtgtcacttaatagttggccctaaattagtacacaggatattttgtcgtgtttcatccttcttaacatgctatcttttcatttaataatagtaatagtgtatggcattggggtcttcagagtcgatatataggtagatctctttagtcttttccacctttcacatccaaggggtgggtcaagtgcagccagcaatttattttcattgttggcccacggttagtccataatctagagccattgtggaactgcagccatgaggtgtgtttatcccacagtggattgactcagcctctgtgggtgacagacttctaagcaggaagatagacgtgaagcacatggttacatttgggaacttgtgtagggatcatggcccctgtagccagggttaaaaactggactttttagaagtaaagtaaaagcatagcgcttatatcatttcttgctgaatttgatatgtttttctttcccttaagaatcaaaagcagaaaacaaaaacaacagtcctactccgatgttatctttctgattcaatgtgaatccatctttccttgcaatattttggatggagaatttgaagttaaatgcattagaaaactacctgatgaactaccacaaagttttaagtgactagaaatatatacagtaaaatcccactttcatgcatctctgggaaatgataggagtattgcaaataagttgagtttgtagagggtaacaaagtaaagtaaaacaaacctatcttggttaacatgaaaataacaattgagaatatattatattcactgaataattataggcttttcctcacattagacaaccaacataatcttcttaaaggtctaattaatatatttttctaagggtcagttgggacattaacctaagaaacatatctattaagcacttgttaacaccttattttaggaccctttccgttggggatgggggcaagggtgggaggtttttagaagagtatatatctctttaaaaaaaaacagaaagaaaaatatttctgagcactcattagccctatatggaaacttctttcctttttgtagggccagttatcactgcagattgcaatgtttaccaagaatttctaaaaatgagtgcagattactgaatataatacattatttaaaatatttgggagtagtataatttgttgagaaatgtaaattgtaataatgtaaatggggggcttcaatatatatatataatacacacacacacacacatgcacacataccgcacttcatagaatcaaagttgctctctgaaggagctttggctcctgatattttatcatgctcctatatttttttaatccttggagcagtagtttttatacttatgtatttaaattttattatgaaaaattacatttattaaaaaagtgtgttccaaaggcattaaaattatatatgttaataaggaagtacatttttaaatttttcaaactgctcctagcttttgattaggagaatattttttctgaaagtaggcttttcgctctgcttcattactgcttcctttagtttctatgaaacagattgcttacctaaatctttagttgaatgattagtgttcaatattgctttaatcaccatataaaaggaaaaaaattggtgacagagcacaaatagaaaacctatttttaaatagaaatcacaaatagcaagtgtggaagcactactttattctgtttaaaatgtacttaagaagtcatcaaattagtgaactgagacattggccttagtaggctgtattcactgctaatttaaaaaagggagtaccaggatttattaagtaaagcattttggaaatggggaatagcgccatatatgtatgtatgtgtatgtgtgtgtgtggtgtgtgtatatatacacacacacatacatacttaaatcttgccctgcatgaaattcaaatacatggaggcacatcttcagggcaccagtgttaaaattttggagtcttaattttcatgtgtacacctctttgcctgttcccacccccagacttgaaataacacttcagagtaagagggaattcagctaatttgtttttaaaattgactgtagtggtcactaaaccctttttgagagaatttctattaaagatgaggcagactcgcttatttgaattgcacaatgttctaacaaggatgtaacacagaattggcttttttttccctagaaaaagattgtttgtttctatgtcaactagatatgattaaaaataagtattgccaatgctgttttcattctctagtggccagaatcattatccttgaaatttctggtagtgccttagcttggttaaaaaaaaaaaaaaaaaaaaaaaaaaagggattaacattaaataaaagtagtttagaatttgggcctcagacaagatattgaacctcattcagtttcacttccacatgtatgtacaagttaggtcaccaaacacggaagttgagtgtggaaggatcttggcactgtaagcaatgctatccattgatgtatacaagtacctttatagttatcgatcactgttaaaactttcattttaaaatcctattaccaagttcagttttttaaaacttcaattgtcctggctgattatgcatcactctgtgtgcaacttttttatttcatttagtgtttctttcaagctgtgtatttttgcctatttgttgcttgtgctttatttttcttagtcatttgtggaatatagtgatatattgtgttaatttggacagtagcggtttttaaaaaccatatactgactgaaacatgagccagagccgattgctttattaagctaataatgaatgttaaagagtacatattttcaggatcgttcatctagtgagcaatacacatattataggccaatatttttttaaaaaatagagcttggtcaacctctatactacacatattacaagatatagcactttcaaaatgaatctaaacctttacagaaactttcttataggttatgccttttattttaagacttattataattcaagtgccattagatgatatatatgtaggcctttgatatataatgctttgtgtacaaaaatggtagatggtattttaaacaggtacatttttacagtgttttcttatcaatttgctatattgcacagaatcagtgtgtgtcttttcataaggttttacaatggtttatttttttacaaggtttacgtgtctcaaagcacactgtcttcccagtacgtaagttaaaaaataccagttcacccaagttgcttctagcctactgagatccatgtgacattggaggagatcttttaaatgtttagtattcgtcattagcaatggctggctgttagttctggtaaatgtgtgcctaagttgaatttgtcttgtttttctcacactgtgtcagcagccatgtctacaacacagataagtctgttgtgatcacatagatctacataagttgtgcagttttgtgctaaaaacccatagggagctcctttgggatcatagaaaagaagatcatgcaaccagcattggtgaaggcacactcagattgcacttagggcctttctatgatgttgtcaaccctctgaggatggaaggcagtgtcttttgatgttatctagcctagaaatgacacagaactattgctaatgtataaaacacttcattatataagcttcagtggtacagatgaaccagaatgaatgtttatcttctcagaaacactccttcaatattatattggatcatgctgctaatgtaacttgggctacaactcttcatggtgctacaaacttctctgtctcattcagtcgtatttttttatccatagaaaaaggactacattaggtgtaaaagtgtacaatatatttttatactgtgacttaatttgtcattaacaaacttttacaccaccacaatgtattcatgtgcacttgcaaaaggagatctcggacatgcaaatgttaccagaacaaacccagcttttgtccacaaggtgactgtaactcagaatggaaagtgggctttataatagggtgtggagtgaagaacatgctgtatgttactaacagccctttgaatttaacaaaaactgggaatccattaggaaacggattgcatcatacctgaacataagctggactgctgaaattgtatttttagctaatgaaaaagtgtttggactagtactctaaaaatgttctaatgataaagttttgagtcaaaatagaaaagaaaaaaatctgcattccaggccgaattttgtatatttttattgcatttaaaattgctattctgtaatattgggaaatcaagtggcttatcatgtatatcgtgtacttaaaatgtattcacaaactactgttgtatttgtataaaatatagacaaagatcatattttttgtgtgtgtataagctctgtaaaatagcaatcacattatgaagctgcagtgatactacattttaaacattcacatccaaagaagcagactatttattgtccatataccagatttaaaatattaatttgctgctaattaaataatagtactgcagcttcttgtggcctacagtgttatgtttgctgtaagaataagatatgtgaattccacaaaatatatgaataaaatctcgtgcc

SEQ ID NO: 56426 - DNA, 2976 bp, Homo Sapiens
ggaagaagtaggggcggggggaagtttaggagttgaggaaagaagattaaagagcgcgaggagacaaataaaaagaagtgttaagaattgcctttgggactctgaaggctgaagaattgatgaattgcaagtttgtgccccatagctgcacagactgcctgaagttacatttagagactgaaatcactgcaccttaaaaacaaaagattgagctgcactgtattcctaatgtttcatcattactaacaggatattcctcatgacattgctgtctgatctttgaccatcagtctgtgacctgccccttctctttacatgcagccgctctctgctccctgccccaatgaacatctgcactaggcccaagccttggagtaatttacctgaagagtgacaccattgattttgaaactactgaagaaacccaagacagctgaaaaccagaaggcatctgaggagaatgagattactcagccgggtggatccagcgccaagccgggccttccctgcctgaactttgaagctgttttgtctccagacccagccctcatccactcaacacattcactgacaaactctcacgctcacaccgggtcatctgattgtgacatcagttgcaaggggatgaccgagcgcattcacagcatcaaccttcacaacttcagcaattccgtgctcgagaccctcaacgagcagcgcaaccgtggccacttctgtgacgtaacggtgcgcatccacgggagcatgctgcgcgcacaccgctgcgtgctggcagccggcagccccttcttccaggacaaactgctgcttggctacagcgacatcgagatcccgtcggtggtgtcagtgcagtcagtgcaaaagctcattgacttcatgtacagcggcgtgctacgggtctcgcagtcggaagctctgcagatcctcacggccgccagcatcctgcagatcaaaacagtcatcgacgagtgcacgcgcatcgtgtcacagaacgtgggcgatgtgttcccggggatccaggactcgggccaggacacgccgcggggcactcccgagtcaggcacgtcaggccagagcagcgacacggagtcgggctacctgcagagccacccacagcacagcgtggacaggatctactcggcactctacgcgtgctccatgcagaatggcagcggcgagcgctctttttacagcggcgcagtggtcagccaccacgagactgcgctcggcctgccccgcgaccaccacatggaagaccccagctggatcacacgcatccatgagcgctcgcagcagatggagcgctacctgtccaccacccccgagaccacgcactgccgcaagcagccccggcctgtgcgtatccagaccctagtgggcaacatccacatcaagcaggggatggaggacgattacgactactacgggcagcaaagggtgcagatcctggaacgcaacgaatccgaggagtgcacggaagacacagaccaggccgagggcaccgagagtgagcccaaaggtgaaagcttcgactcgggcgtcagctcctccataggcaccgagcctgactcggtggagcagcagtttgggcctggggcggcgcgggacagccaggctgaacccacccaacccgagcaggctgcagaagcccccgctgagggtggtccgcagacaaaccagctagaaacaggtgcttcctctccggagagaagcaatgaagtggagatggacagcactgttatcactgtcagcaacagctccgacaagagcgtcctacaacagccttcggtcaacacgtccatcgggcagccattgccaagtacccagctctacttacgccagacagaaaccctcaccagcaacctgaggatgcctctgaccttgaccagcaacacgcaggtcattggcacagctggcaacacctacctgccagccctcttcactacccagcccgcgggcagtggccccaagcctttcctcttcagcctgccacagcccctggcaggccagcagacccagtttgtgacagtgtcccagcccggtctgtcgacctttactgcacagctgccagcgccacagcccctggcctcatccgcaggccacagcacagccagtgggcaaggcgaaaaaaagccttatgagtgcactctctgcaacaagactttcaccgccaaacagaactacgtcaagcacatgttcgtacacacaggtgagaagccccaccaatgcagcatctgttggcgctccttctccttaaaggattaccttatcaagcacatggtgacacacacaggagtgagggcataccagtgtagtatctgcaacaagcgcttcacccagaagagctccctcaacgtgcacatgcgcctccaccggggagagaagtcctacgagtgctacatctgcaaaaagaagttctctcacaagaccctcctggagcgacacgtggccctgcacagtgccagcaatgggaccccccctgcaggcacacccccaggtgcccgcgctggccccccaggcgtggtggcctgcacggaggggaccacttacgtctgctccgtctgcccagcaaagtttgaccaaatcgagcagttcaacgaccacatgaggatgcatgtgtctgacggataagtagtatctttctctctttcttatgaacaaaacaaaacaacaacaaaaaacaaacaaacaaaaaagctatggcactagaatttaagaaatgttttggtttcatttttactttctgtttttgtttttgtttcgtttcattttgtactacatgaagaactgttttttgcctgctggtacattacatttccggaggcttgggtgaataatagttttcccagtctccctcggatggtggccttaaggcctggtagtgcttcaagaggtccactggttggatctctagctactggcctctaaatacaacccttctttacaaaaaaatcttttaaaaaaaaaaaaaaaaaa

SEQ ID NO: 56427 - DNA, 1436 bp, Homo Sapiens
gggatgggagatactgttgtggtcacctctggaaaatacattctgctactcttaaaaactagtgacgctcatacaaatcaacagaaagagcttctgaaggaagactttaaagctgcttctgccacgtgctgctgggtctcagtcctccacttcccgtgtcctctggaagttgtcaggagcaatgttgcgcttgtacgtgttggtaatgggagtttctgccttcacccttcagcctgcggcacacacaggggctgccagaagctgccggtttcgtgggaggcattacaagcgggagttcaggctggaaggggagcctgtagccctgaggtgcccccaggtgccctactggttgtgggcctctgtcagcccccgcatcaacctgacatggcataaaaatgactctgctaggacggtcccaggagaagaagagacacggatgtgggcccaggacggtgctctgtggcttctgccagccttgcaggaggactctggcacctacgtctgcactactagaaatgcttcttactgtgacaaaatgtccattgagctcagagtttttgagaatacagatgctttcctgccgttcatctcatacccgcaaattttaaccttgtcaacctctggggtattagtatgccctgacctgagtgaattcacccgtgacaaaactgacgtgaagattcaatggtacaaggattctcttcttttggataaagacaatgagaaatttctaagtgtgagggggaccactcacttactcgtacacgatgtggccctggaagatgctggctattaccgctgtgtcctgacatttgcccatgaaggccagcaatacaacatcactaggagtattgagctacgcatcaagaaaaaaaaagaagagaccattcctgtgatcatttcccccctcaagaccatatcagcttctctggggtcaagactgacaatcccgtgtaaggtgtttctgggaaccggcacacccttaaccaccatgctgtggtggacggccaatgacacccacatagagagcgcctacccgggaggccgcgtgaccgaggggccacgccaggaatattcagaaaataatgagaactacattgaagtgccattgatttttgatcctgtcacaagagaggatttgcacatggattttaaatgtgttgtccataataccctgagttttcagacactacgcaccacagtcaaggaagcctcctccacgttctcctggggcattgtgctggccccactttcactggccttcttggttttggggggaatatggatgcacagacggtgcaaacacagaactggaaaagcagatggtctgactgtgctatggcctcatcatcaagactttcaatcctatcccaagtgaaataaatggaatgaaataattcaaacacaaaaaaaaaaaaaaaaaaaaaaaaaaaaaa

SEQ ID NO: 56428 - DNA, 1518 bp, Homo Sapiens
ggccgctaggggtgcggggttggggaggaggccgctagtctacgcctgtggagccgatactcagccctctgcgaccatggctgtgctggcggcacttctgcgcagcggcgcccgcagccgcagccccctgctccggaggctggtgcaggaaataagatatgtggaacggagttatgtatcaaaacccactttgaaggaagtggtcatagtaagtgctacaagaacacccattggatcttttttaggcagcctttccttgctgccagccactaagcttggttccattgcaattcagggagccattgaaaaggcagggattccaaaagaagaagtgaaagaagcatacatgggtaatgttctacaaggaggtgaaggacaagctcctacaaggcaggcagtattgggtgcaggcttacctatttctactccatgtaccaccataaacaaagtttgtgcttcaggaatgaaagccatcatgatggcctctcaaagtcttatgtgtggacatcaggatgtgatggtggcaggtgggatggagagcatgtccaatgttccatatgtaatgaacagaggatcaacaccatatggtggggtaaagcttgaagatttgattgtaaaagacgggctaactgatgtctacaataaaattcatatgggcagctgtgctgagaatacagcaaagaagctgaatattgcacgaaatgaacaggacgcttatgctattaattcttataccagaagtaaagcagcatgggaagctgggaaatttggaaatgaagttattcctgtcacagttacagtaaaaggtcaaccagatgtagtggtgaaagaagatgaagaatataaacgtgttgattttagcaaagttccaaagctgaagacagttttccagaaagaaaatggcacagtaacagctgccaatgccagtacactgaatgatggagcagctgctctggttctcatgacggcagatgcagcgaagaggctcaatgttacaccactggcaagaatagtagcatttgctgacgctgctgtagaacctattgattttccaattgctcctgtatatgctgcatctatggttcttaaagatgtgggattgaaaaaagaagatattgcaatgtgggaagtaaatgaagcctttagtctggttgtactagcaaacattaaaatgttggagattgatccccaaaaagtgaatatcaatggaggagctgtttctctgggacatccaattgggatgtctggagccaggattgttggtcatttgactcatgccttgaagcaaggagaatacggtcttgccagtatttgcaatggaggaggaggtgcttctgccatgctaattcagaagctgtagacaacctctgctatttaaggagacaaccctatgtgaccagaaggcctgctgtaatcagtgtgactactgtgggtcagcttatattcagataagctgtttcattttttattattttctatgttaacttttaaaaatcaaaatgatgaaatcccaaaaca

SEQ ID NO: 56429 - DNA, 1900 bp, Homo Sapiens
ggggcggagctggagggggtggttcggcgtgggggccgttggctccagacaaataaacatggagtccatcttccacgagaaacaagaaggctcactttgtgctcaacattgcctgaataacttattgcaaggagaatattttagccctgtggaattatcctcaattgcacatcagctggatgaggaggagaggatgagaatggcagaaggaggagttactagtgaagattatcgcacgtttttacagcagccttctggaaatatggatgacagtggttttttctctattcaggttataagcaatgccttgaaagtttggggtttagaactaatcctgttcaacagtccagagtatcagaggctcaggatcgatcctataaatgaaagatcatttatatgcaattataaggaacactggtttacagttagaaaattaggaaaacagtggtttaacttgaattctctcttgacgggtccagaattaatatcagatacatatcttgcacttttcttggctcaattacaacaggaaggttattctatatttgtcgttaagggtgatctgccagattgcgaagctgaccaactcctgcagatgattagggtccaacagatgcatcgaccaaaacttattggagaagaattagcacaactaaaagagcaaagagtccataaaacagacctggaacgagtgttagaagcaaatgatggctcaggaatgttagacgaagatgaggaggatttgcagagggctctggcactaagtcgccaagaaattgacatggaagatgaggaagcagatctccgcagggctattcagctaagtatgcaaggtagttccagaaacatatctcaagatatgacacagacatcaggtacaaatcttacttcagaagagcttcggaagagacgagaagcctactttgaaaaacagcagcaaaagcagcaacagcagcagcagcagcagcagcagggggacctatcaggacagagttcacatccatgtgaaaggccagccaccagttcaggagcacttgggagtgatctaggtgatgctatgagtgaagaagacatgcttcaggcagctgtgaccatgtctttagaaactgtcagaaatgatttgaaaacagaaggaaaaaaataatacctttaaaaaataatttagatattcatactttccaacattatcctgtgtgattacagcatagggtccactttggtaatgtgtcaaagagatgaggaaataagacttttagcggtttgcaaacaaaatgatgggaaagtggaacaatgcgtcggttgtaggactaaataatgatcttccaaatattagccaaagaggcattcagcaattaaagacatttaaaatagttttctaaatgtttctttttcttttttgagtgtgcaatatgtaacatgtctaaagttagggcatttttcttggatctttttgcagactagctaattagctctcgcctcaggctttttccatatagtttgttttctttttctgtcttgtaggtaagttggctcacatcatgtaatagtggctttcatttcttattaaccaaattaacctttcaggaaagtatctctactttcctgatgttgataatagtaatggttctagaaggatgaacagttctcccttcaactgtataccgtgtgctccagtgttttcttgtgttgttttctctgatcacaacttttctgctacctggttttcattattttcccacaattcttttgaaagatggtaatcttttctgaggtttagcgttttaagccctacgatgggatcattatttcatgactggtgcgttcctaaactctgaaatcagccttgcacaagtacttgagaataaatgagcattttttaaaaaaaaaaaaaaaaaaaaaa

SEQ ID NO: 56430 - DNA, 6997 bp, Homo Sapiens
atggatcctgtctcctgtggcagatccgggggtgtgcgtcgagaggctgtttcacgtagacagagctgtgtgactcacaaccaagagaacgtgtttgacctgcagtggctggagctgcccgacgtggctccggaggagctggaggccctgtcgaggagcatggtgctccacctgcggaggctcatcgaccagcgggacgagtgcaccgaggtgcgtccgcgggtcggtggcccgctgatcgtggacctcactcaggaacgggactacctgcaggcacagcatccacccagccccatcaagtcctccagcgccgactccactcccagccccaccagcagcctctctagcgaagacaagcagcacctggccgtagagctggccgacaccaaggccaggctgcggcgcgtcaggcaggagctggaggataagacagagcagcttgtggacaccagacatgaggtggaccagctggtgctggaactgcagaaagttaagcaggagaacatccagctagcggcagacgcccggtctgctcgtgcctatcgagacgagctggattccctgcgggagaaggcgaaccgcgtggagaggctggagctggagctgacccgctgcaaggagaagctgcacgacgtggacttctacaaggcccgcatggaggagctgagagaagataatatcattttaattgaaaccaaggccatgctggaggaacagctgactgctgctcgggcccggggcgataaagtccatgagctggaaaaggagaacctgcagctgaaatccaagcttcacgacctggaattggaccgggacacagataagaaacgaattgaggagctgctggaagaaaacatggtccttgagattgcacagaagcagagcatgaacgaatctgcccaccttggctgggagctggagcagctgtccaagaacgcagacttgtcagacgcctccaggaagtcgtttgtgtttgagctgaacgaatgtgcgtccagccgcatcctgaagctggagaaggagaatcagagcctccagagcaccatccaggggctgcgggacgcgtccctggtgttggaggagagcggcctcaagtgcggggagctggagaaggagaaccaccagctcagcaagaagattgaaaagttacaaacccagctggagagagaaaagcagagcaaccaagatctggagaccctcagtgaggagctgatcagagagaaggagcagctgcagagtgacatggagaccctgaaggctgacaaagccaggcagatcaaggaccttgagcaggaaaaggaccacctcaaccgagccatgtggtcgctgcgggagaggtcgcaggtcagcagtgaggcccgcatgaaagacgtggagaaggagaacaaagccctccaccagacggtgacggaggccaatggcaagctcagccagttggagtttgagaagcggcagctgcacagggacttggagcaggccaaggagaagggggagcgggcagagaagctggagagggagctacagcgactccaggaggagaacgggaggctggccaggaaggtgacctccctggagacagccaccgagaaagtcgaggccctggagcatgagagccagggcctgcagctggagaaccggactctgaggaagtctctggacaccttgcagaacgtgtccctgcagcttgagggcctggagcgtgacaacaagcagctggacgcagagaacctggagctgcgcaggctggtggagaccatgcgcttcaccagcaccaagctggcacagatggagagggagaaccagcagctggagcgtgagaaggaggagctgaggaagaacgtggatctgctcaaggcgctgggcaagaagtcagagcgcctggagctcagctaccagagcgtgagcgctgagaacctccggctgcagcagagcctggagagcagcagccacaagacgcagaccttggagagtgagctgggcgagctggaggctgagcgccaggcgctgcggcgggacctggaggccctccggctggccaatgcacagttggagggggccgagaaggacaggaaggccctggagcaggaggtggcccagctcgagaaggataagaagctgctggagaaggaggccaagcggctgtggcagcaggtggagctcaaggatgcagtcttggacgatagcactgccaaactgtccgccgttgagaaggagagccgcgcgctggacaaggagctggcccgctgcagggacgcagccggcaagctgaaggagctggagaaggacaaccgggacctcaccaagcaagtcaccgtgcatgcaaggacactgacaactctgagggaggacctggtgctcgagaagctgaagagccagcagctcagcagtgagctggacaagctgagccaggaactggagaaggtcggcctcaacagggagctgctgttgcaggaggacgacagcggcagtgacacaaaatacaagattttggagggcagaaatgaatcagcattaaaaacaacactagccatgaaagaagaaaagattgtgctcttagaagcacagatggaagagaaagcgagcctaaatcgccagttagagagtgagctgcagatgctaaagaaggagtgtgagaccctcaggcagaaccagggagaggggcagcacttgcagaactctttcaagcaccctgcggggaagacagccgccagtcaccaggggaaggaggcctgggggcccggccataaggaagccaccatggagcttctccgagtgaaggaccgggccatcgagctggagcggaataatgcagctctgcaggctgagaagcagctgctaaaggaacagctgcagcacctggagacccagaacgtgaccttcagcagccagatcttgacactgcagaaacagagcgccttcctgcaggagcacaacaccacactgcagacccagaccgccaagctgcaggtggagaactccacgctgagttcccagagcgcagcgctcaccgcgcagtacacgctgctgcagaaccaccacacggccaaggagacggagaacgaaagcctgcagaggcagcaggagcaacttacagcggcctacgaggccctgctgcaggaccacgagcacctgggcacgctgcacgagcggcaatcggccgagtacgaggccctcatccgccagcacagctgcctaaagacactgcatcggaatctggagctggagcacaaggagctcggggagaggcacggtgacatgctgaagcgcaaggcggagctggaggagcgggagaaggtcttgaccactgagcgagaggcgctgcagcaggagcagaggacaaacgccctcgccatgggcgagaaccagaggctgcggggcgagctggacagggtcaatttcctgcaccaccagctgaagggggagtacgaggagctgcacgcccacaccaaggagctgaaaacctcactgaacaacgcgcagctggagctcaaccgctggcaggcccgcttcgacgagctgaaggagcagcaccagaccatggacatctcgctgaccaagctggacaaccactgtgagctgctctcccgtctcaaggggaacttggaggaagaaaatcatcacctcctgagccagatccagctgttgagccagcagaaccagatgcttctggagcagaacatggagaacaaggagcagtaccatgaggagcagaagcagtacatagacaaattaaatgccttacgaagacataaggaaaagctggaagaaaaaatcatggatcaatacaagttctatgatcctcctccaaagaagaagaaccactggattggagccaaagccttagtcaaactcatcaaaccaaagaaagagggttcgagggaacgcttaaaatccaccgtggacagccctccctggcagctggagtcctcagaccccgcctcgccggcggcctctcagccgctcagatcacaggccgagaaccccgacacccccgcactgggctccaactgtgcagaagagcgcgacgcccacaacgggtctgtggggaaaggccctggggatctaaaaccaaagcgaggctccccacacagaggcagccttgaccgcacagatgcctccaccgatctggccatgaggtcctggccctcggagctgggctcccggacttgctcaacttcagccaccactacagccccttccaactccacccccatcgcccggcacccaggccgcaccaaaggctataactcagatgacaacctctgtgagccatccctggagtttgaggtccccaaccacaggcagtacgtgtcgcggccaagtagcttagagagcagtagaaacacatccagcaacagctcacctcttaacctaaaaggctcctccgagcagctccatggccggtctgagagcttcagcagcgaagacctgatccccagcagggacctggccactttgccccgggaagccagcacaccgggacgcaacgccctcggccgccacgagtaccccttgcctcggaacgggcctctcccacaggagggtgcccagaagaggggcacagcccctccctacgtcggagtgcggccctgctcggcctcccccagcagtgagatggtcaccttggaggagttcctggaggagagcaaccgcagctcccccacccatgacactcccagttgccgggatgacctgctgagtgactacttccgaaaggccagcgatcccccagccatcggaggccaaccaggaccacctgccaagaaagaaggggccaagatgcccaccaactttgtggcccccaccgtcaaaatggccgcccccacctcggaggggaggccgctgaagcccgggcagtacgtaaagccaaacttcagactgactgaggccgaggccccacccagcgtggccccgagacaggcccagcctccccagagcctgtctctgggcagaccccggcaggctccggtgcccccagcttcccatgcacctgccagccgcagtgcctccttgagccgggccttcagcctggcctcagctgaccttctccgggccagcgggccagaggcctgcaaacaggagtcccctcagaagctgggggctcctgaggccttagggggcagagagacaggcagccacaccctgcaaagccccgcaccccccagctcccatagcctggcccgggagcggaccccacttgtgggaaaggctggcagctcctgtcagggcccaggtccccgcagccggccgctggacacgaggcgcttctccctggctcccccaaaggaggagaggctggcccccctgcatcagtctgccacagcccccgccattgccactgcaggtgctggtgctgctgctgctggcagtggcagcaactcccagctcctgcacttctcacctgctgcagccccggctgccaggaccaagcccaaggcgcccccacgctcaggggaggtggccaccatcacccctgtccgggcagggctcagcctctcagagggagacggggtcccggggcagggctgcagtgaggggcttccggccaagagcccaggtcggtctcccgatttggctccccacctcggccgggccctggaggactgcagtcgagggagcgtctcaaagagcagtccggcctccccggagcccggcggggatccgcagaccgtgtggtatgagtacggctgtgtgtgactgtctcgtggttgagctcgcaaacctgaaaactactgacgcgccttccgactctcacggccttttctcttgcttgcctgcggtgccaggagagggtttggaatgaggaaaggggttcccacgcatttctgctgtttgttctgtgaatggaaacactgtgccaagccccaagaggattacgcttccaggtgtgtaacgtgttttctgtgtctgccgcttccagcagctgatatctttggaacaaataatccacgtcagcatggggaccaattaggatgcaatgacaaactgacttcccccaaagcagacactactccagtatgtcccagtagaacactcatttgcaatgtgttgagctccgttaagcacacacacactcacacaacaggcttacgaggctcaggcctggcgggtcagaaagcccactccctctcccaaggccactggatcccaggagaagcccagactggcgatactacaaaggtctccagggcctggcagaccccagagtcaggcctgctgttaaaaagtgagagtgctgctgttccattcctggggtcccaagcacttccctttaccccaggacccagggcagcctgcagggcagctggcggtggccttggccatttgcccccagcctccagctggctcctgagctctgcaccagggggtttggggaccacacaggcacctgccttcctagatttccctggctcacttttctgcaaacactggatctgccaggcctggggattggggggcaggaaagaggcccccatccagccccctccaggccagtgtgcacagtgcaccgaggggtcatccgcacagagcgaggtgcaagctcgatgtgtaacctggctgcggcacccgacatccccggtctcggggtgttgatttatttctgaataactttttgggtatagaaaccaattttttttaatatatgacatgtatatgtacacactcatgtgaaatatgtatactttggggggatctatttatgttccagtgggagtcactctcttctgtcgggaatcttatctgctgctttgtgtctttggtcagattcctgacaatttagtttcctgttgtaaaggtgcttttcctggggtgaactaaacctattgattttttttttttaagatttttttttccttttgatttaatatactgagaaagaaatgggagacttttgaatgttaacaagatccattttaggagtgtttggggttgtgtattaaatagccattcattctggaactcaaggacaggactgtaataaaatggaatggaaccg

SEQ ID NO: 56431 - DNA, 6897 bp, Homo Sapiens; identical to SEQ ID NO: 32264

SEQ ID NO: 56432 - DNA, 2258 bp, Homo Sapiens
agggaagctcctataaagggctgcatctctggactcacagctatcagaccattgagatgtggaagctgttgctgtgggttgggctggttcttgtgctgaaacaccacgatggtgctgcccataaactcgtgtgttatttcaccaactgggcacacagtcggccaggccctgcctcgatcttgccccatgacctggacccctttctctgcacccacctgatatttgcctttgcctcaatgaacaacaatcagattgttgctaaggatctccaggatgagaaaattctctacccagagttcaacaaactaaaggagaggaacagagagctgaaaacactactgtccatcggcgggtggaactttggcacctcaagattcaccactatgttgtccacatttgccaaccgtgaaaagtttattgcttcagttatatcccttctgaggacacatgactttgatggtcttgaccttttcttcttatatcctggactaagaggcagccccatgcatgaccggtggacttttctcttcttaattgaagagctcctgtttgccttccggaaggaggcactgctcaccatgcgcccgaggctgctgctgtctgctgctgtttctggggtcccacacatcgtccaaacatcctatgatgtgcgctttctaggaagactcctggatttcatcaatgtcttgtcttatgacttacatggaagttgggaaaggttcacaggacataatagccccctcttctctctgcctgaagaccccaaatcttcggcatatgctatgaattattggagaaagcttggggcaccctcagagaagctcatcatggggatccccacctatggacgtacctttcgcctcctcaaagcctctaagaatgggttgcaggccagagcgatcggaccagcatctccagggaagtacaccaagcaagaaggcttcttggcttattttgagatttgttcctttgtctggggagcgaagaagcactggattgattaccagtatgtcccgtatgccaacaaggggaaagagtgggttggctatgacaatgccatcagcttcagttacaaggcatggtttataaggcgagagcattttgggggggccatggtgtggacattggacatggatgacgtcaggggcacgttctgtggcactggccctttcccccttgtctacgtattgaatgatatcctggtgcgggctgagttcagttcaacttctttaccacaattttggctgtcatctgctgtgaattcttcaagcactgaccctgaaaggctggctgtgaccacggcatggaccactgatagtaagattttgcccccaggaggagaggctggggtcactgagatccacggaaagtgtgaaaatatgactataacccctagaggtacaactgtgacccctacaaaggaaactgtatcccttggaaagcacactgtagctctaggagagaagactgagatcactggggcaatgaccatgacttctgtgggtcatcagtccatgacccctggagagaaggccctgacccctgtgggtcatcaatctgtgaccactggacagaagaccctgacctctgtgggttatcagtctgtgacccctggggaaaagaccctgacccctgtgggtcatcagtctgtgacccctgtgagtcatcagtctgtgagccctggaggaacgactatgacccctgtccattttcagactgagacccttagacagaatacagtggcccctagaaggaaggctgtggcccgtgaaaaggtgactgtcccctccagaaacatatcagtcacccctgaagggcagactatgcctttaagaggggagaatttgacttctgaggtgggcactcaccccaggatgggtaacttgggtcttcagatggaagctgaaaacaggatgatgctgtcctccagccccgtcatccagctcccggaacaaactcctctagcttttgacaaccgctttgttcccatctatggaaaccattcctctgtcaactcagtaacccctcaaacaagtcctctttctctaaaaaaagaaatcccagaaaactctgctgtggatgaagaagcctaagcccctctggtgtcagaaaccagggaaaacccttgtcttttcttctaagtgacatgttggaagccttctcatcccggggcaaagcaggcatcaaaaccagaataggccaatctcttttccattaaataaactgtaaacacaagaacccaaaaaaaaaaaaaaaaa

SEQ ID NO: 56433 - DNA, 1124 bp, Homo Sapiens
aaatgcacaacccggacggaagtgcctctccgacagcagatccaggctcggagctccagacgctgggacaggccgcccgcagaccacccccgccgcgcgcgggacacgacgccccccgcaggacacgcccatcagcccggaaacccctgagctgcttctcccggaggccgatgcccacccgggagcccccaaagactcgcggctcccgggggcacctgcatactcacccgcctgggcctgggcccccgctgcagggactggcgccccgaggcctcaaaaccagcgccccccgccctccgtgccagccccagccgggaccccacaaggcaaagaccaagaagattgtgtttgaggatgagttgctctcccaggccctcctgggcgccaagaagcctattggagccatccctaaggggcataagcctaggccccacccagtgcccgactatgagcttaagtacccgccagtgagcagtgagagggaacggagccgctatgtcgcagtgttccaggaccagtacggagagttcttggagctccagcacgaggtggggtgtgcacaggcaaagctcaggcagctggaggccctgctgagctccctgcccccaccccaaagccagaaggaggcccaagttgcagcccgggtttggagggagtttgagatgaagcgaatggatcctggcttcctggacaagcaggctcgctgccactacctgaagggtaaactgaggcatctcaagactcagatccagaaattcgatgaccaaggagacagcgagggctccgtgtacttctaagtgcccctgcagatgggcagagggatgcatggggatgcaggtcccttgcatttcttggtatctctcagcttttcctcttgcagctccccctaccaggggtcgctttctcctggattgcaaatgcctcttcagtttggactcagctctgacagcccctcctccaggaaggccttccaggacttcctcctctgggtcctctagctctgaccctacagggactccagatctcaacctgttccctggaagtagggcctgctctccatcccagtgaaataaacatgtattagacacctaaaaaaaaaaaaaaaaaaaaaaaaaaaaaaaaaa

SEQ ID NO: 56434 - DNA, 4541 bp, Homo Sapiens; identical to SEQ ID NO: 29268

SEQ ID NO: 56435 - DNA, 1289 bp, Homo Sapiens
ctgccttgctccacacctggtcaggggagagaggggaggaaagccaagggaagggacctaactgaaaacaaacaagctgggagaagcaggaatctgcgctcgggttccgcagatgcagaggttgaggtggctgcgggactggaagtcatcgggcagaggtctcacagcagccaaggaacctggggcccgctcctcccccctccaggccatgaggattctgcagttaatcctgcttgctctggcaacagggcttgtagggggagagaccaggatcatcaaggggttcgagtgcaagcctcactcccagccctggcaggcagccctgttcgagaagacgcggctactctgtggggcgacgctcatcgcccccagatggctcctgacagcagcccactgcctcaagccccgctacatagttcacctggggcagcacaacctccagaaggaggagggctgtgagcagacccggacagccactgagtccttcccccaccccggcttcaacaacagcctccccaacaaagaccaccgcaatgacatcatgctggtgaagatggcatcgccagtctccatcacctgggctgtgcgacccctcaccctctcctcacgctgtgtcactgctggcaccagctgcctcatttccggctggggcagcacgtccagcccccagttacgcctgcctcacaccttgcgatgcgccaacatcaccatcattgagcaccagaagtgtgagaacgcctaccccggcaacatcacagacaccatggtgtgtgccagcgtgcaggaagggggcaaggactcctgccagggtgactccgggggccctctggtctgtaaccagtctcttcaaggcattatctcctggggccaggatccgtgtgcgatcacccgaaagcctggtgtctacacgaaagtctgcaaatatgtggactggatccaggagacgatgaagaacaattagactggacccacccaccacagcccatcaccctccatttccacttggtgtttggttcctgttcactctgttaataagaaaccctaagccaagaccctctacgaacattctttgggcctcctggactacaggagatgctgtcacttaataatcaacctggggttcgaaatcagtgagacctggattcaaattctgccttgaaatattgtgactctgggaatgacaacacctggtttgttctctgttgtatccccagccccaaagacagctcctggccatatatcaaggtttcaataaatatttgctaaatgagtgaaaaaaaaaaaaaaaa

SEQ ID NO: 56436 - DNA, 2948 bp, Homo Sapiens
atggctggcacggcgcggagctgggggtgctgtctgggctggccggggtacaggccggaggggtacagtgcacaaagccggggtgcagataacgtacacggcagccaggagcctccgatcagaggagggcccgctgacctgcaggggtgtgccgggcggtgcacgacagggggcactgtccctccagctccctcctccccaggctctcacctcgaacataagcccgatgaggacgcagagcaccaggcagaagccgatgtccgcatggttgtggatgacgaactcctggctgaagagcggccgctgggcacgcgcgggctaccggggcggaggcgtacgggggcggcgagcggggctcggctcctcctcgtcccgcgccagcgccgcgcccggccgcattctcggggcccgaggctcagccgctcgcggtggagaaagcaggccgcggaggaggcgggcgcccaggcctgcccggacaggaagtgggcccagctttcccactcctcgctccgctccttcctccgcgggaagggcaggccccggaggcagcgagcgccccgggggtggccgggcagccggatgctcccggggttgcgggctgtggccccgggggctgagggcggcgcgggtgcggcggaagcagggaagccgcgaaccggccttctggctggccacagcgccctgcacggacgatcagtgaatggagattactcaagtatttatcgagaacttgcagtgggctaggcacagttcaggtagatcaacaaaccgaaagaccctgccctaggggagctttcgctccaatgcggggagagggtggatgattgcagttttgcccagtaatttttgggaccctcatgccaccattaattagctacacacatttcaccgaaagtctaccttacatattaatcagaagaagtggaagaataaacacagaagaagcaaaaaaggaaggaactttctcactgaaagtttctatttaatattaagtcttaaaagtactcctggaaggacaaaaggtgttcttaataaattatattcgcaaatattggatttaatcctaccagtaatgaagcagtcagttactttctagatgtgcagaaatacgtaatgaacaaaaaaaactaattcctattccattttttattaggtccacagttatttcacttctaaataaatatggttttttaaaagtggcacgcggtggaatgtaattgagacaggatggagttcctagagaaattttacttcctcaatctgcactccaccttacttaaaatacagtcttgggtctgtaattcccttatctgactctcaaggaaatgacaaagtaatgcctagattggactaaacctcatttaacttcaaggctgacctttctcaaagttgaaccttcgtcttgtgaggaacagaaagatcaagaactctgaagcacctcgactttccacctgtgaagatgtgttcaaatttgcaacgtgcggccacacctatgaggcaggagtgcagtggcgagatctggactcactgcaacctctgcctcctggcttcaagcaattctcatgcttcagcctgtagctggaactacaggtcactccctctggaggaaaccagctgccactttgtgaggatactcatagtcctgtggaggcatatcctccatatggctgagacctcctgcgaacaaccatcactgacttgccagacatgagtgtgccaccttggaagcagattttccagccccagttaagccttcagatgacatcagcccctgctaatctcttgactacaacctcatgagagaccctgagccagaactagccaggcttacccctcatggttacaaagtggctgcaacagctccaggtgttctatcctttaacacagaataactcaaacaacaagacccaatattcagacaagaaggaaagggacttttggagagtgaagaaaactttcctagaaacctcaaacttctccccatgccttattggccagattgtatcccatgcccatttctaaaccaatcattggcaaagtgagtggaattgacgtgattagattaactttaccaagaatgcatcctcagagaggctgagaaaaagtccagcctcctttgaagagcctggctacctttcacctgaacaaaacaagaattctgatgaaaaatggagaatgtatgtggagcaggcacccggagtgtctatgccaggattttttttcagtgcgtttcaccggttatatttttgtctctttaccttacaagatatgtggcacgtttgcctaaaacaagccttgctttctgatttctgtgcactaggcacttaaaccttgcaaatgtcgcttacctaacagtcactgtcaaggagtacctggctaaagaatctccagctagacaaagtagaagtgtctgtgctctggcagttgaatatattgtatcaggctcaacagcacctttcaccaaaggatgagacttcacaaccattagatcttcttttattttgtttttattaaaaaaaaaaattttaacacaccattgctaacttgaagccattagatcttcttacccccaataccacaaaagtttagtggaatcaggggtataccaaggcaggtggagtaggggagctgggagtggtcagcccccagggcaggcaatgagggattgtgaatctgtgaagaattttaaagcaatgatacagctctaaatgcaatgtactatcctggacttagccctggaaaagaaaaaagatattagtggaaaaactggtaaaattcaaataatgtctgtagtttggttaatagtattataccaatgttaatttctgtgttttgataaatgtaccatggttatgtaagctggatgaaagatatgtgggaaatctctctactatttctgcaactctcctgtaaacctaaaaatgtttcaaaataaaagatttaatgct

SEQ ID NO: 56437 - DNA, 3788 bp, Homo Sapiens; identical to SEQ ID NO: 29810

SEQ ID NO: 56438 - DNA, 2287 bp, Homo Sapiens
aaacggatcgcgttgggtgaaggtgacggcgtcgagccattgacttccaaagactcctggcacatgaggaagaaacccagaagaggagagcaaaggagtcaggaatggcttttactcagttgacattcagggacgtggccatcgaattctctcaagatgagtggaaatgcctgaactctacacagaggactttatacagggatgtgatgttggagaactacaggaacctggtctccctggatctgtctcgtaactgtgtaatcaaggaactagcaccacaacaggaaggtaacccaggagaagtattccacacagtgacattggaacaacatgaaaaacatgacattgaagagttttgcttcagggaaatcaagaaaaaaatacacgactttgactgtcagtggagagatgatgaaagaaattgcaacaaagtgactacggccccaaaagaaaatcttacttgtaggagagaccaacgcgatagaagaggtataggaaacaagtctattaaacatcagcttggattaagctttctaccacatccccatgaactgcagcagtttcaagctgaagggaaaatttatgaatgtaaccatgttgagaagtctgtcaaccatggttcctcagtttcaccaccccaaataatttcttctaccatcaaaacccatgtttctaataaatatgggactgatttcatctgttcttcattactcacacaagaacagaaatcatgcattagggaaaaaccttacagatatattgagtgcgacaaagccttgaatcatggctcacacatgactgtacgtcaggtaagtcattctggagagaaaggatataaatgtgatctgtgtggcaaggtctttagtcaaaaatcaaaccttgcgcgtcattggagagttcatactggagagaaaccatacaaatgtaatgaatgtgacagaagtttcagtcgcaactcatgccttgcactacatcggagagttcacactggagagaaaccttacaaatgttatgagtgtgacaaggtcttcagtcgaaattcatgccttgcactacatcagaaaactcatattggagagaaaccttacacatgtaaagagtgtggcaaagcctttagtgtgaggtcaacacttaccaaccatcaggtaattcatagtggcaagaaaccttacaaatgcaatgaatgtggcaaggtgttcagtcagacttcaagccttgcaactcatcagagaattcacactggggagaaaccatacaagtgtaatgaatgtggtaaagtcttcagtcagacttcaagccttgcaaggcattggagaattcatactggagagaaaccttacaaatgcaatgaatgtggtaaggttttcagttacaattcacaccttgcgagtcatcggagagttcatactggagagaaaccttacaagtgtaatgagtgtgggaaagcctttagtgtgcattcgaacttaactacccatcaggtcatccatactggagagaagccttacaaatgtaatcaatgtggcaaaggcttcagtgtgcattcaagcctaactacccatcaggtcatccatactggagaaaaaccttacaaatgtaatgagtgtggcaaatcctttagtgtgcgcccaaacctcactagacatcagataatccatactggaaagaaaccttacaaatgtagtgattgtgggaagtcctttagtgtgcgcccaaacctcttcagacatcaaattatccatactaaggagaaaccttataaaagaaattaatatggcaaggtcttcagtcaaagtttaaatcctgtgagtcatcaaagaatttatatcagagagaaaccatacaagtataataaatgtggcaaggttttcagtcacaattcactcctacacagcatcagagaatttcattcttgagagaatccttacgagtacagcaaacccttcatcacaagttcaagcattcattgacatcagagtccatgctaaagagaaatcatatacacctaactgtgtggcagaggcttcatttaggtctcacaactcactagacatcaaaatgtgtaaacatctttgtatattttgtgcatgttgaagctattaaccaaggatcaaaactgtaacacatccaaggatttatgtgaggaataattcagtctagttgtgctgataaacttttcatattacacattgtagaacaaatgcaagcccaaatatgttaaaactcacacaacatgatatatattaaaggttgcaggatgtttgaagtcaaaaaaaaaaaaaaaaaa

SEQ ID NO: 56439 - DNA, 3463 bp, Homo Sapiens
tgaataaattattcggcatttagcttatcattctgaatttcactttttgctttttggtgctctgaaacttgcagagagaggtggagtgctaaggggagggtaggggttgtgatactttgcacacacatccctgtcattgttctgcctaaagagacagggctgggttcaaggccacatgtgctcctgtcatcctccacatttctgctccaagtgcaatccggagtgtcagctctccatctgtctctgcctggcaggcgcacgcgcccagcaccctgcctccggcgatgccgccccagcccctctgatggccctcctctctgctgccactcattccagaacaggaggcatgagcccggaacgcgcttgcttttaggagacagccactttctgtgtggtacgctggattcaaggatgcctgatcgtactgagaagcactccacaatgccagactcacctgtggatgtgaagacgcaatctaggctgactcctccaacaatgccacctcccccaactactcaaggagctccaagaaccagttcatttacaccgacaacgttaactaatggcacgagccattctcctacagccttgaatggcgccccctcaccacccaatggcttcagcaatgggccttcctcttcttcctcctcctctctggctaatcaacagctgcccccagcctgtggtgccaggcaactcagcaagctgaaaaggttccttactaccctgcagcagtttggcaatgacatttcacccgagataggagaaagagttcgcaccctcgttctgggactagtgaactccactttgacaattgaagaatttcattccaaactgcaagaagctactaacttcccactgagaccttttgtcatcccatttttgaaggccaacttgcccctgctgcagcgtgagctcctccactgcgcaagactggccaaacagaaccctgcccagtacctcgcccagcatgaacagctgcttctggatgccagcaccacctcacctgttgactcctcagagctgcttctcgatgtgaacgaaaacgggaagaggcgaactccagacagaaccaaagaaaatggctttgacagagagcctttgcactcagaacatccaagcaagcgaccatgcactattagcccaggccagcggtacagtccaaataacggcttatcctaccagcccaatggcctgcctcaccctaccccacctccacctcagcattaccgtttggatgatatggccattgcccaccactacagggactcctatcgacaccccagccacagggacctcagggacagaaacagacctatggggttgcatggcacacgtcaagaagaaatgattgatcacagactaacagacagagaatgggcagaagagtggaaacatcttgaccatctgttaaactgcataatggacatggtagaaaaaacaaggcgatctctcaccgtactaaggcggtgtcaagaagcagaccgggaagaattgaattactggatccggcggtacagtgacgccgaggacttaaaaaaaggtggcggcagtagcagcagccactctaggcagcagagtcccgtcaacccagacccagttgcactagacgcgcatcgggaattccttcacaggcctgcgtctggatacgtgccagaggagatctggaagaaagctgaggaggccgtcaatgaggtgaagcgccaggcgatgacggagctgcagaaggccgtgtctgaggcggagcggaaagcccacgacatgatcacaacagagagggccaagatggagcgcacggtcgccgaggccaaacggcaggcggcggaggacgcactggcagttatcaatcagcaggaggattcaagcgagagttgctggaattgtggccgtaaagcgagtgaaacctgcagtggctgtaacacagcccgatactgtggctcattttgccagcacaaagactgggagaagcaccatcacatctgtggacagaccctgcaggcccagcagcagggagacacacctgcagtcagctcctctgtcacgcccaacagcggggctgggagcccgatggacacaccaccagcagccactccgaggtcaaccaccccgggaaccccttccaccatagagacaacccctcgctagacgtgaactcagaactgtcggaggaaagacaacacaaccaacgcgaaaccaattcctcatcctcagatgctcaaagttgttttttttgtttgtttgtttattagatgaattatcctatttcagtacttcagcaagagagaacctaactgtatcttgaggtggtagtaaaacacagagggccagtaacgggtcgtaatgacttattgtggataacaaagatatcttttctttagagaactgaaaagagagcagagaatataacatgaaatgatagatttgacctcctccctgttattttcaagtagctgggattttaaactagatgacctcattaaccgatgctttaccaaacagcaaaccaagagattgctaattgctgttgaaagcaaaaatgctaatattaaaagtcacaatgttctttatatacaataatggaaaaaaaaaaaagaggaaaaccctcaagggcatgagcattggatacagcagtagacattttaacaagaagatgaatggcgtccgtgggttgctaactgaactttgaagacccgctacaaaacgcgcagatgtgcagcagattggaaggagacacagatgttcggtttttttcctgtttctgaaaagaaataataatatccaggtcaacagaatgaaaaatgaaagatgatttgcaatgggatgtatgaatacagcagcaagaaaaaaaaatgccataatacaaaaggctccatatatatatatatatatatatatatacacacacacacacgcacatatacacacacacacacacacacacacacacacacacacacacacacacacacacacaagtaagagactcagcctgcagttaattagcattctggcagttttgacatcagccagctgccctaaataacccttcaacgtttcttcacttttgcaaggttccacagagtaagacattgggtctattccagctcattcattttatattgaaaaaaataattttaaaaatggtggcttcagctccagcccctttccaaaatttttcaaccccaccctgtttggatttttaattaaaaactagtagttctcttggtgttaaaacacttctgtcctgtgaggtttcccaatggtgtttttcttgtaaatgtgttggacaaatgtgaagatgcattgtagtttaaccatatgcccacatttagtctctttattcctagttggtgagaaacctgtatctttctatgctgcttttatatctgtatgtattagtgatatttctctagtagttaaaaaaaaaaaaaggaaaaaaagactctttttggttgtcctcaag

SEQ ID NO: 56440 - DNA, 2305 bp, Homo Sapiens
gttactgtcccgcgaacccacatccctacaaagcaggaaagtatgcttgggagaggccaagtgagtggggaatcagcccaaagccaggcgtccagggtctccctcacctgaagctgactttttccccaccttggacagagggcgggagatgccatccccactgaacccagtgctttcaccagccatattagctcccactcaccccccgtcgtggaagcctcggccgtcacacctgcagggccggggcgtgcatggcctcagggatggcctgttcagctgctgggtgactcgggtccaggtgcctcaccacctgctgagctctgtgtgatttctggacacttctgctcgttgcctttgggctcagtgaagagtctggagtttatctggagtgaggtggccggttcttggtgggatctgagcaggacagcgtctggctccttccctcggctcatggccctcagaatctgcgtcacatacaccccagctctcccgataggtctctgcactcgctgttgcctctgcctggaacagtctccctcctggtgtcattgtctccgtggtgtgtccttcctgaccttccacctccaccagtctgtcccccttggggacagggactcgttgctcatgttcacccggcaggctggacacttcgtggagggctccaaagccggcagatcccggggccgcctctgtctctcccaggccctgcgtgttgcggtgagaggagcatttgtgtctctgtggtttgctgctggagctggtgaccgggagagaaacaagggagacaagggtgcccagacaggtgcggggctcagccaggaggcagaagacgtggacgtgtcccgggccaggagggtcacagatgcaccacaaggcactctgtgtggcactgggaacaggaattctgggagtcagtctgcaagggtggtgggcgttgctcacctgggagaagcctttagagtgggcgttgagcaggccattagctcgtgccctgaggaggtgcatgggcggcatgggctctccatggaaattatgtgggcgcgaatggatgtggctctgcgctcacctgggcgaggacttctggccggtgccggggcactctgcatgaccctggcagaatcgagctgccctgactatgaaaggggaagaagagcatgcctgaccctccaccggcaccccacccctcactgctccacctggggcctgcctctgcgggtggctgggtcctggctgactgttgtgactgttgaggccctgggggggtggcgcatgggagttaggaggactggccaggtggggcccactatgcacccacccccagtgtcaggtgcttctcctctcctcctccaccacctcctcctcctcctcctcatcatcatcctcacttgttgaggacgtcctgtgtgccaagtggtttatatgcccagcctcatttaatcctcagaatgactccatgaggtagctactaaaaccccccacttaacagatgaggaaactgaggcctagagaagctcaacaagttgcctaagttccaagtttcctctcccaactctcctaccctctcctcttccttctcctttctcccattcttccctgcctcttccctaactagacaattttttattgagtgtctcccaggtgcaggcatgagccaggtgctgggaaaatcatgataacccagctccttctggtcattttctcagctggttagaggctgggaggacacgcaagttcagctccagccgactggggcattggtggtagcccctggagacattgtgcaatggggctacgaggctgcatctggctccagggaagcgtgttgcaatccatgagtgatgtctgccatgcgtacaggcatggagagtgaggcgcctgtactgtctttctgtagaccctagactggtggggcctctgaaatgcatccagacactgtgctgggtgtgttgcatggccctcccaaccaattcagtatttttctccccattttccagggagaaatctaaggcgtcagaatgtaaggttcttattggaacccaggctccagggtccctggttttctgtgacatcatgctgcaggaccctgtttctctctttgctttggctgctggggagctcagaagggagctttaggcttgctctcagtcaccacattagctcaggggtttgggcatttttgtcgccgtctcctttgggctctgtctcctccctgctgtgcttcctgaggagcaggccggatgtaagttatcaactataaataaaaccaagacttccgttctggctctcaaaaaaaaaaaaaaaaaaa

SEQ ID NO: 56441 - DNA, 4646 bp, Homo Sapiens
gaatgcaggtgagaaaaggcacggactctgcggctgcgaacccaaacttgggcaccgcacggtgcgcactgctcagccttcgcccccgtgggcgaaaggctgctgcggtttcaggcggctgcttcgtgactaatgaccttgcgcagagttgttaagaaaaaagagaaacccgcgctctccggggtgagaagggactgactctgggcgtctctgaagatggctcgggcttctctttggcgcgccggggggaccctgacactgaccgctctgtgacgcgagtagtctcccctgcaccgtgcccgaagcgacgtgccgggggatttttcattctcgatctgttgactggctcccccgctgcatgagcagagtcggagttgagactggcttgttgctggccccagcgcctggtgcaggaagcgactcacgtttgtctgggtggccggagccggagcagagcctgggtttggagtgagtgcctggaacgtgaattggactcaactcgagtagcagcaaagaccagcgggctggcaggcgggggaggctgcaggctcattccccacctcttcccagccccactgcccgtctgccggagcggttctggccccttccgacagagcggggactagagccggggattctccgcccgctgaggggatgactctgggttgggggagcgccgaacccgcggcgcgcagtgtcccgtgaactgtgagtactgcgactgaacggcggcaggcgagcgggcgattagcacccattgcatgaattatgaaacaataactttcggaagaagcaggaggaaaaaaagaagcatctatcgctgccctcccacccccattcccggccaactctccacgccgcttttgccccctccctcccctccctctcgctccttcctttccgggagaggggagaggactcgggggagggcaggcggccggccccggaggaggggggcgccgagggggctgtggttagaaggagcagtagcagcagcagcaggagaagatgctgaggatgcggaccgcgggatgggcgcgcggctggtgcttgggctgctgcctcctcctgccgctctcgctcagcctggcggccgccaagcagctcctccggtaccggctggccgaggagggccccgccgacgtccgcatcggcaacgtggcttcagacctgggcatcgtgaccggatcgggtgaggtgactttcagcctggagtccggttccgagtacctgaagatcgacaacctcactggcgagctgagcacgagcgagcggcgcatcgaccgcgagaagctgccccagtgtcagatgatcttcgacgagaacgagtgcttcctggacttcgaggtgtcggtgatcgggccctcgcagagctgggtggacctgtttgagggtcaggtcatcgtgcttgacatcaacgacaacacgcccaccttcccgtcgcccgtgctcacgctcacggtggaggagaatcggccggtgggcacactttacctgctgcccacagccaccgaccgcgacttcggccgcaacggcatcgagcgctacgagctgctccaggagcccggaggcggcggcagcggcggcgagagccggcgcgccggggcggccgacagcgccccctaccccgggggcggcgggaacggcgcgagcggcggcggctcgggaggctccaagcggcggctggacgcatcagagggcggcggcggcaccaaccccggcggccgcagcagcgtgttcgagctgcaggtggcggacaccccggacggcgagaagcagccgcagctgatcgtgaagggggcgctggaccgcgagcagcgcgactcctacgagctgaccctgcgagtgcgcgacggcggcgacccgcctcgctcctcgcaggccatcctacgggtcctcatcaccgacgtgaacgacaacagcccccgcttcgagaagagcgtgtacgaggccgacttggctgagaacagcgccccggggacccccatcctgcaactgcgcgcagccgacttggacgtgggggtcaacgggcagatcgaatacgtgttcggggcggccaccgagtcggtgaggcggctgctgcgccttgacgagacgtccggctggctcagcgtcctgcaccggatcgaccgcgaggaggtgaaccagctgcgcttcacggtcatggcccgcgaccgcgggcagccccccaagaccgacaaggccaccgtggtccttaacatcaaagacgagaacgacaacgtgccgtccattgaaatccgcaagattgggcgcatccccctcaaggacggggtggccaacgtggccgaggacgttctggtcgacacccccatcgctctggtgcaggtgtccgaccgagaccaaggcgagaacggggtggtcacctgcaccgtggtgggcgacgtgcccttccagctcaagccagccagcgacaccgagggcgaccagaacaagaaaaagtacttcttgcacacctcgacccctctggactatgaggccacccgggagttcaacgtggtcatcgtggcggtggactcaggcagccccagcctctcgagcaacaactccctgattgtcaaggtgggagacaccaacgacaacccgcccatgttcggccagtcggtggtggaggtttacttccctgagaacaacatcccgggcgagagggtggccacggtgctggcgacagacgcagacagcggtaagaacgccgagatcgcctactcgctggactcctctgtgatggggatctttgccatcgatcccgattctggggacatcctggtcaataccgtgctggaccgcgagcagactgacaggtatgagtttaaagttaacgccaaagacaaaggcatccccgtgctgcagggcagcactacggtgattgtgcaggtggctgataaaaatgacaatgaccctaagtttatgcaggacgtcttcaccttttatgtgaaagaaaacttgcagcccaacagccctgtggggatggtcaccgtgatggatgctgacaaggggcggaatgcagagatgagcctgtacatagaggagaacaataacattttttctattgaaaatgacacggggaccatttactccacaatgtcttttgaccgggaacatcagaccacatacactttcagagtcaaggctgtggatgggggagatcctcccagatctgccacagctacagtctcgctttttgtgatggatgaaaatgacaatgctcccacagttacccttcccaaaaacatttcctacactttactgccaccttcgagtaatgtcaggacagtagtagctacagtgttggcaacagacagtgatgatggcatcaatgcagacctgaactacagcattgtgggaggaaatcccttcaagctgtttgaaattgatcccactagtggtgtggtttccttagtgggaaaactcacccaaaagcattatggcttgcacaggttggtggtgcaagtgaatgacagtgggcagccttcccagtccaccacgactctggtgcacgtgtttgtcaatgaaagtgtttctaatgcaactgcgattgactcccagatagctagaagtttgcacatcccactcacccaggatatagctggtgacccaagctatgaaattagcaaacagagactcagtattgtcattggcgtggttgctggcattatgacggtgattctaatcatcttaattgtagtgatggcaaggtactgcaggtccaaaaataaaaatggctatgaagccggcaaaaaagatcacgaagacttttttacaccccaacagcatgacaaatctaaaaagcctaaaaaggacaagaaaaacaaaaaatctaagcagcctctctacagcagcattgtcactgtggaggcttctaagccaaatggacagaggtatgatagtgtcaatgagaagctgtcagacagcccaagcatggggcgatacaggtccgttaatggtgggcccggcagtcctgacctggcaaggcattacaaatctagttccccattgcctactgttcagcttcatccccagtcaccaactgcaggaaaaaaacaccaggccgtacaagatctaccaccagccaacacatttgtgggagcaggagacaacatttcaattggatcagatcactgctctgagtacagctgtcaaaccaataacaagtacagcaaacagatgcgtctacatccatacattactgtgtttggctgaattccactctaatatgatgctccattatgcaccatactgtgatgacctttctactccgaaacctgctggagcctgcccttggccgtggggtgtcagccaatcactgcttgttccacttgttgtacattttatttttgagtctttttctttctcatatacagaaaaatagtatgaaaataaaataaatgtatgaaacagtattaatgcagaaatgtgctactaatggatgtctgagtcaccagaaattccattcttaaagaggcggttagcacctattagacgtaacagtgatgtcttttaaaaaatccaaaagcatattgcaacaataagtttgagactttgtgtgaacaaagggaaattcagcctcttatgtctttgtctttaatacattaaatactgattttgaataaaaatctaaattgatcaat

SEQ ID NO: 56442 - DNA, 3982 bp, Homo Sapiens
cacagctgcttgctgctccagccttgccctcccagagctgccggacgctcgcgggtctcggaacgcatcccgccgcgggggcttcggccgtggcatgggcgccgcgggcctgctcggggttttcttggctctcgtcgcaccgggggtcctcgggatttcttgtggctctcctccgcctatcctaaatggccggattagttattattctacccccattgctgttggtaccgtgataaggtacagttgttcaggtaccttccgcctcattggagaaaaaagtctattatgcataactaaagacaaagtggatggaacctgggataaacctgctcctaaatgtgaatatttcaataaatattcttcttgccctgagcccatagtaccaggaggatacaaaattagaggctctacaccctacagacatggtgattctgtgacatttgcctgtaaaaccaacttctccatgaacggaaacaagtctgtttggtgtcaagcaaataatatgtgggggccgacacgactaccaacctgtgtaagtgttttccctctcgagtgtccagcacttcctatgatccacaatggacatcacacaagtgagaatgttggctccattgctccaggattgtctgtgacttacagctgtgaatctggttacttgcttgttggagaaaagatcattaactgtttgtcttcgggaaaatggagtgctgtcccccccacatgtgaagaggcacgctgtaaatctctaggacgatttcccaatgggaaggtaaaggagcctccaattctccgggttggtgtaactgcaaactttttctgtgatgaagggtatcgactgcaaggcccaccttctagtcggtgtgtaattgctggacagggagttgcttggaccaaaatgccagtatgtgaagaaattttttgcccatcacctccccctattctcaatggaagacatataggcaactcactagcaaatgtctcatatggaagcatagtcacttacacttgtgacccggacccagaggaaggagtgaacttcatccttattggagagagcactctccgttgtacagttgatagtcagaagactgggacctggagtggccctgccccacgctgtgaactttctacttctgcggttcagtgtccacatccccagatcctaagaggccgaatggtatctgggcagaaagatcgatatacctataacgacactgtgatatttgcttgcatgtttggcttcaccttgaagggcagcaagcaaatccgatgcaatgcccaaggcacatgggagccatctgcaccagtctgtgaaaaggaatgccaggcccctcctaacatcctcaatgggcaaaaggaagatagacacatggtccgctttgaccctggaacatctataaaatatagctgtaaccctggctatgtgctggtgggagaagaatccatacagtgtacctctgagggggtgtggacaccccctgtaccccaatgcaaagtggcagcgtgtgaagctacaggaaggcaactcttgacaaaaccccagcaccaatttgttagaccagatgtcaactcttcttgtggtgaagggtacaagttaagtgggagtgtttatcaggagtgtcaaggcacaattccttggtttatggagattcgtctttgtaaagaaatcacctgcccaccaccccctgttatctacaatggggcacacaccgggagttccttagaagattttccatatggaaccacggtcacttacacatgtaaccctgggccagaaagaggagtggaattcagcctcattggagagagcaccatccgttgtacaagcaatgatcaagaaagaggcacctggagtggccctgctcccctgtgtaaactttccctccttgctgtccagtgctcacatgtccatattgcaaatggatacaagatatctggcaaggaagccccatatttctacaatgacactgtgacattcaagtgttatagtggatttactttgaagggcagtagtcagattcgttgcaaagctgataacacctgggatcctgaaataccagtttgtgaaaaagaaacatgccagcatgtgagacagagtcttcaagaacttccagctggttcacgtgtggagctagttaatacgtcctgccaagatgggtaccagttgactggacatgcttatcagatgtgtcaagatgctgaaaatggaatttggttcaaaaagattccactttgtaaagttattcactgtcaccctccaccagtgattgtcaatgggaagcacacaggcatgatggcagaaaactttctatatggaaatgaagtctcttatgaatgtgaccaaggattctatctcctgggagagaaaaaattgcagtgcagaagtgattctaaaggacatggatcttggagcgggccttccccacagtgcttacgatctcctcctgtgactcgctgccctaatccagaagtcaaacatgggtacaagctcaataaaacacattctgcatattcccacaatgacatagtgtatgttgactgcaatcctggcttcatcatgaatggtagtcgcgtgattaggtgtcatactgataacacatgggtgccaggtgtgccaacttgtatcaaaaaagccttcatagggtgtccacctccgcctaagacccctaacgggaaccatactggtggaaacatagctcgattttctcctggaatgtcaatcctgtacagctgtgaccaaggctacctgctggtgggagaggcactccttctttgcacacatgagggaacctggagccaacctgcccctcattgtaaagaggtaaactgtagctcaccagcagatatggatggaatccagaaagggctggaaccaaggaaaatgtatcagtatggagctgttgtaactctggagtgtgaagatgggtatatgctggaaggcagtccccagagccagtgccaatcggatcaccaatggaaccctcccctggcggtttgcagatcccgttcacttgctcctgtcctttgtggtattgctgcaggtttgatacttcttaccttcttgattgtcattaccttatacgtgatatcaaaacacagagcacgcaattattatacagatacaagccagaaagaagcttttcatttagaagcacgagaagtatattctgttgatccatacaacccagccagctgatcagaagacaaactggtgtgtgcctcattgcttggaattcagcggaatattgattagaaagaaactgctctaatatcagcaagtctctttatatggcctcaagatcaatgaaatgatgtcataagcgatcacttcctatatgcacttattctcaagaagaacatctttatggtaaagatgggagcccagtttcactgccatatactcttcaaggactttctgaagcctcacttatgagatgcctgaagccaggccatggctataaacaattacatggctctaaaaagttttgccctttttaaggaaggcactaaaaagagctgtcctggtatctagacccatcttctttttgaaatcagcatactcaatgttactatctgcttttggttataatgtgtttttaattatctaaagtatgaagcattttctggggttatgatggctttacctttattaggaagtatggttttattttgatagtagcttcctcctctggtggtgttaatcatttcatttttacccttacttggtttgagtttctctcacattactgtatatactttgcctttccataatcactcagtgattgcaatttgcacaagtttttttaaattatgggaatcaagatttaatcctagagatttggtgtacaattcaggctttggatgtttctttagcagttttgtgataagttctagttgcttgtaaaatttcacttaataatgtgtacattagtcattcaataaattgtaattgtaaagaaaacatacaaaaaaaaaaaaaaaa

SEQ ID NO: 56443 - DNA, 3106 bp, Homo Sapiens
ctgctgttcacaggacatgccattatgtctttccagtacggatcacagtgctgccatatcacagaccctgccagccggcacagaaccatgcctcgtcacagctctgcccaactcacaggctgccaagatgaggccacaggtccacctagggcggcagatgctggtgctatttgtcacgacttttgccaaaacatgtacactgttgctcacatctttcgtaagaatggttgacactaaggggccatggaaaagcacttttaaaaaattatgtggtggaatcaaactcacagaggcagaaatgttagtgccgtgctctaaccaagtaagcttagtgttccccacagtgatctgtatctggcctgagtctcctcaagcagcaacccccactgtccagcatgtggaaggtagatccttatgacaacaccagacccatagttaccaggaaagaaaaaggaagctgagtgttgtgaaggggaagaaatcctttttataagaagtaatcatttttaggccgggtgcagtggctcatgcctgtaatcccagcactttgggaggctgagacaggtggatcacttgaggtcaggagtttgagacctgcctggccaacatgatgaaaccctgtctctactaaaaatgcaaaaaaaattagccaggcatggtggcatgtgcctgtagtcccaactactcaggaggctgaggcaggagaatcacttgaacctgggaggcagaggttgcaatgagctgagatcgcaacactgcactccagcctgggcgacagagcaagactccatctcaaaaacaaaaacaaaaaaaaaacctttttaaagtaaattgagtgtaaaatgttttcaccatgaagccattgcaccctctcccccaggaaacagtgcctaaggatgatgtcaagttacagccagtttgctctgatcccccaggacctaagaaaactgtgagtgcttcagcatgcaaaggtagagctaccagataaggagaataacttggccatttatagcaaactgcctgactttggagtgagaaaccaagcaccttctaggtcctaggataggtgaattggaggtgcagctgctgaagttcccattttctacatacttcaggagccagggtgtttcatttggttttgtaaaactttgctgtaagtcatcacagttaattcttcgaatggacattttagagtgtaactttttttcaaaattagcagaacagatatctctgctcattctctttatacatttagttttttaaagttcccctagtatacctgttaggcactctaaataggacacagttaaagctaaaagaaggaccagttgctccctagagcctacagttcagaactatcttgttgtcatgtcctggtttggtttggtttgtttttaactcaacaagttggaaaccatgagtttaaagcaaactatttccttttcttaagcttaaagagaatttttttttaatctttagctcctcatttaggtagtgaaggcttccctgaaagacagcagtgcccttctctggaagaagaggctgggaccaaaagcctgagtctatgggttgaggattttgagcattcctttgacaagcttctatgtatttttaatataagactcataaatgaacctgatgtggtgttcatgacccatcccttaagcatgcttgctttttttactttactttttgagtatagtacttgtcttgtttttcctggagccatgctaggatttaattcctatgtgccactacccgcccatgtcctggaagatggccatgcctgcagcaatgctcatgtcttgaggagaagcaatgtgaaaagcatcaggaaagctgaaccttacgttcaagtcagcaaacatttgtgagcattctagtatgcttgcgaccttgacactttttaaaaattatctttttatttgcttcgagtatcaaccgtatagttgactctagtggggcgaagggagcagagatgagagcaaaattcagacttgctgcccctgtgtgtctcagttctcatgtctctctgagaaatgtgttggcccaattccctatctgccactctgagtctcttgagtaaatgtgtgtaaatgagaaaaattatctcaaagatttaacttattatttagatattttcttctttttaaactcaggaataaacctggtttgtagataatataatatggctactagagctataattgagtaggtgactagaagcattttttcaaatatatttcttgtaaagacatctactttgttttaactaggaaaagaaactcctcatattaaaataaacatttccataagcactttctagaagagtgtagcatccatctaccatccatcccagaatgtttgtatcttgctcatagtatttcaaaaatttttatgggtgaaaaaaatgcacttttttatttattggaaaagtgtagagttattgaattaaattctcaagtgggacaatttagtgtaaagggaaacatgggttttggagacaagagcacagggctgtggtccctgttccagcattgactttactatgtgacctcgagcaaatgatttaacttctctgtgcctcagtttctccatatacaaaatggggataatgatactaaccattgcctacctcatagagatgttatggggacaaacgaaataatagagataagcacgaatgctttcaactcttcggaagaaaggtgctatataaattgaagttgtgtttttaatgatccaattattaattatgtttagggtttaaataacaatactgttagtcatgttaagaataagttttgttttgatgcatatttccacttctcttctgtggccagatcttgatcattcaaccagtaatggtacctgaggaactgaaatgggtatttgttttcgtatgtttctgccagtagtatttcaattgaatatccagaaaagactggagtttaacttgtaatatcttatagtttacatgtaataaaacttattcaagctatatataaaagtatgattacatgtaaatagcaggtatgttgtaattaaaggcacttatcaaattgtctttgttcttttttaattgtaataaaagtcagttttacat

SEQ ID NO: 56444 - DNA, 1288 bp, Homo Sapiens
agcatcgcgcgcaaggcctgccggttgctcggggtcgtatgacgcacttttccagctcgagccctcacgaggccgtgggtacgaccggaagccgcagatgctgatcccattttcaatgaagaattgcttccagttactttgtaactgccaggtcccagcagctggctttaaaaaaacagtaaaaaatgggctcattttacagtcaatttccaatgatgtctatcaaaatctggctgtggaagactggatccatgaccatatgaatctagaaggcaaaccaattctattcttttggcagaattctccctctgttgtaattggtaggcatcaaaatccttggcaggaatgtaacctgaatctaatgagagaagaaggtataaaactggctcggagaagaagtggaggaggaacagtctaccatgatatgggtaatatcaatttgactttctttacaaccaaaaaaaagtatgatagaatggaaaatctgaaattaattgtgagagctctgaatgctgtccaaccccagctggatgtgcaggctaccaaaagatttgaccttttacttgatggacagtttaaaatctcaggaacagcttctaagatcggccggactactgcctatcaccattgcactttattatgtagtactgatgggacgttcttgtcttctttgctaaagagcccttaccaagggatcaggagcaatgccactgctagcataccttccttagtgaaaaatcttttggaaaaggatcccactctgacctgtgaagtactaatgaatgctgttgctacagagtatgctgcttatcatcaaattgataatcacattcacctaataaacccaacggatgagacactgtttcctggaataaatagcaaagccaaagaactgcaaacttgggagtggatatatggcaaaactccaaagtttagtataaatacttcctttcatgtgttatatgaacagtcacacttggaaattaaagtattcatagacataaagaatggaagaattgaaatttgtaatattgaagcacctgatcattggttgccattggaaatacgtgacaaattaaattcaagtcttattggcagtaagttttgcccaactgaaactaccatgctaacaaatatattacttagaacatgtccacaagaccacaaactaaacagtaaatggaatattctctgtgaaaaaattaagggaataatgtgattccaagtaaatgtcttaatacagtttcaattagaaaataaaatgtctcatacttgcacattgtatgtc

SEQ ID NO: 56445 - DNA, 4091 bp, Homo Sapiens
agccagcccttgccgtggccggagccgagcggcgcatccgggccggagaagaggacgacgacgaggtcctcgaagtggacccgtttgcgaagcgccagggagaaggaggagcggacgcatcgtagaaaggggtggtggcgcccgaccccgcgccccggcccgaagctctgagggcttcccggcccccactgcctgcggcatggcccggggctcggcgctcccgcggcggccgctgctgtgcatcccggccgtctgggcggccgccgcgcttctgctctcagtgtcccggacttcaggtgaagtggaggttctggatccgaacgaccctttaggaccccttgatgggcaggacggcccgattccaactctgaaaggttactttctgaattttctggagccagtaaacaatatcaccattgtccaaggccagacggcaattctgcactgcaaggtggcaggaaacccaccccctaacgtgcggtggctaaagaatgatgccccggtggtgcaggagccgcggcggatcatcatccggaagacagaatatggttcacgactgcgaatccaggacctggacacgacagacactggctactaccagtgcgtggccaccaacgggatgaagaccattaccgccactggcgtcctgtttgtgcggctgggtccaacgcacagcccaaatcataactttcaggatgattaccacgaggatgggttctgccagccttaccggggaattgcctgtgcacgcttcattggcaaccggaccatttatgtggactcgcttcagatgcagggggagattgaaaaccgaatcacagcggccttcaccatgatcggcacgtctacgcacctgtcggaccagtgctcacagttcgccatcccatccttctgccacttcgtgtttcctctgtgcgacgcgcgctcccggacacccaagccgcgtgagctgtgccgcgacgagtgcgaggtgctggagagcgacctgtgccgccaggagtacaccatcgcccgctccaacccgctcatcctcatgcggcttcagctgcccaagtgtgaggcgctgcccatgcctgagagccccgacgctgccaactgcatgcgcattggcatcccagccgagaggctgggccgctaccatcagtgctataacggctcaggcatggattacagaggaacggcaagcaccaccaagtcaggccaccagtgccagccgtgggccctgcagcacccccacagccaccacctgtccagcacagacttccctgagcttggaggggggcacgcctactgccggaaccccggaggccagatggagggcccctggtgctttacgcagaataaaaacgtacgcatggaactgtgtgacgtaccctcgtgtagtccccgagacagcagcaagatggggattctgtacatcttggtccccagcatcgcaattccactggtcatcgcttgccttttcttcttggtttgcatgtgccggaataagcagaaggcatctgcgtccacaccgcagcggcgacagctgatggcctcgcccagccaagacatggaaatgcccctcattaaccagcacaaacaggccaaactcaaagagatcagcctgtctgcggtgaggttcatggaggagctgggagaggaccggtttgggaaagtctacaaaggtcacctgttcggccctgccccgggggagcagacccaggctgtggccatcaaaacgctgaaggacaaagcggaggggcccctgcgggaggagttccggcatgaggctatgctgcgagcacggctgcaacaccccaacgtcgtctgcctgctgggcgtggtgaccaaggaccagcccctgagcatgatcttcagctactgttcgcacggcgacctccacgaattcctggtcatgcgctcgccgcactcggacgtgggcagcaccgatgatgaccgcacggtgaagtccgccctggagccccccgacttcgtgcaccttgtggcacagatcgcggcggggatggagtacctatccagccaccacgtggttcacaaggacctggccacccgcaatgtgctagtgtacgacaagctgaacgtgaagatctcagacttgggcctcttccgagaggtgtatgccgccgattactacaagctgctggggaactcgctgctgcctatccgctggatggccccagaggccatcatgtacggcaagttctccatcgactcagacatctggtcctacggtgtggtcctgtgggaggtcttcagctacggcctgcagccctactgcgggtactccaaccaggatgtggtggagatgatccggaaccggcaggtgctgccttgccccgatgactgtcccgcctgggtgtatgccctcatgatcgagtgctggaacgagttccccagccggcggccccgcttcaaggacatccacagccggctccgagcctggggcaacctttccaactacaacagctcggcgcagacctcgggggccagcaacaccacgcagaccagctccctgagcaccagcccagtgagcaatgtgagcaacgcccgctacgtggggcccaagcagaaggccccgcccttcccacagccccagttcatccccatgaagggccagatcagacccatggtgcccccgccgcagctctacgtccccgtcaacggctaccagccggtgccggcctatggggcctacctgcccaacttctacccggtgcagatcccaatgcagatggccccgcagcaggtgcctcctcagatggtccccaagcccagctcacaccacagtggcagtggctccaccagcacaggctacgtcaccacggccccctccaacacatccatggcagacagggcagccctgctctcagagggcgctgatgacacacagaacgccccagaagatggggcccagagcaccgtgcaggaagcagaggaggaggaggaaggctctgtcccagagactgagctgctgggggactgtgacactctgcaggtggacgaggcccaagtccagctggaagcttgagtggcaccagggcccggggttcggggatagaagccccgccgagaccccacagggacctcagtcacctttgagaagacaccatactcagcaatcacaagagcccgccggccagtgggcttgtttgcagactgggtgaggtggagccctgctcctctctgtcctctgacacagagagctgccctgcctaggagcacccaagccaggcagggggtctggcagcacggcgtcctggggagcaggacacatggtcatccccagggctgtatacattgattctggtggtagactggtagtgagcagcaaatgcctttcaagaaaataggtggcagcttcactccatgtcatatatggagtgaatatttcaaaacgttgggaataagggcctgcaaaaggcagcgaggaggcacctcgggtcttgaggttcctgacaaccgatctggtctgttggtttgaggatgaaggggctccatttctgctgcctccctgctgagaatattctccctttagcagccaaagattcgctggaacggaggctgccctctgctgcctgttggggtcggaagacaaggggcttctgaaatgggagttcctgagatacaacaaaatgtgtgccttcaaagaaactgacagctttgtatttggtgaaatggttttaattatactccatgtgtattttgcccactttttttgggaattcaagggaaagtgtttcttgggtttggaatgttcagaggaagcagtattgtacagaacacggtattgttatttttgttaagaatcatgtacagagcttaaatgtaatttatatgtttttaatatgccattttcattgaagtattttggtcttaagatgactttagtaatttaactgtttatgttacccacgttgggatccagttggtcttggtttgcttctctctgtaccacgtgcacatgaggtccattcattttacagcccctgttacacacagacccacaggcagccgtctgtgccccgcacacattgttggtcctatttgtaaatcccacacccggtgtatccaataaagtgaaacaaagc

SEQ ID NO: 56446 - DNA, 10396 bp, Homo Sapiens
cgggcctgggctgtggctgtgactggcgctgccgtgggcgccgcagccctcgcgggagccggacgcggtaatgccccagcggcgcagcgggcggctgcgtccctgagccgctatataagcgcggcagggaacatccggaggggctgaagatgaaggtgcccgcgcatgggcccccgctgattgccagtccctcccgaccccgcgccccgcgcggagcccgaggccgccgaggacccgccttcgccgcagtagcagctggagcagcgacagaggcggcagctgcggcggcggcggcgcccgcgcccctcgcgccagcgcgtagagcggcggcggcagctcgggggccgccactgccccggctgccatgagttgtgcggaggtgatgtatcacccccagccttatggagcgtcccagtatctgcccaaccccatggcagcgacaacctgccccacagcctactatcagccggcgccccaacctggccagcagaagaagttagcggtattcagcaagatgcaggactctctggaagtcacccttcccagcaaacaagaggaggaggatgaggaggaggaggaggaggagaaagaccagcctgccgagatggagtaccttaactctcgctgtgtccttttcacttatttccagggagacattgggtcagtagtggatgaacacttctcaagagctttgggccaagccatcaccctccatccagaatctgccatttcaaaaagcaagatggggctaacccccctatggcgagacagctcagctctctcaagccagcggaatagtttcccaacttccttttggaccagctcttaccagcccccacctgcaccttgtttggggggagttcatcctgacttccaggtcactggaccccctggcaccttttctgcagctgatcccagtccttggccgggacacaacctgcatcagactggcccagcccctccccctgctgtgtctgagtcctggccttatcctttgacatctcaggtgagcccatcctacagccatatgcatgacgtgtacatgcggcaccaccaccctcatgcccacatgcaccaccgccaccgccaccatcatcaccatcaccaccctcctgctggctctgccctggatccatcctatgggcctctgctgatgccttcagtgcatgcggccaggattcctgctccccagtgtgacatcacaaagacagaaccaactacagtcacctctgctacctcagcatgggctggagcctttcatggaacagtagacatagtgcccagcgtgggattcgatacaggtctacagcatcaagacaagagtaaggaatcaccgtggtactgaaacacacaatcttagtgagttaagttgcagcataaatccaagggcccactgggaaaagatactgtcgggtttttccattcagcaataggacacgaaaggcatagaaggagaagacaaagtgtcacgcagttgactggttttcggcctttcttgagaaagcaaagtgggtcccagacattgaagaaaagcatttttatttgtttatttcctcatctgagcctttgccaactgtgcaactctctccttttgttatcttgcttttatcaatatatagctaagtttttgtttcattttgatttttttttttagccaaccaccttgtcaggaaaggatgaaccacacattaaaatgttcattctttcaggaatacaagtttgtagctctatgtgcatctatttttgtagaaatacaaaaagtttggtttagcattgatgggctatttttgagggatgtattttttttaaaattgtaaaaattgttgagttctgtttaaagaacttgctctcagagaagcactggcaaaaatgtttaaaatgcttatctctaagatgtctattatatgctctgtctgtgctttctaggttacctcaaatgttttgtttttttccttcttacaaaagtagctataccgtagtcaaaccaatgcagtattgtttttacattgaatctcagtaaagatttaattccatgctagctcaattagttttgaattatatgtatagcttgaaaagtttttttttaatgactgtgctaaagaaatgatattttattgctttgatttctcccaaagaataacttggaggttgactaataagaaagttggcataaactttcaatcaaatgaagagtttgcctagaggagactaattctctttctagcccatccaaatttgataaatggaaccagaggttatatacaactacaaggaaaaaaatgcatttaaccatgccacctatgagtgccagtgacttattttacttgtttttaattattcattcatggcaatttaaaaagtcatattttaagtgggatttgtttttcctgaagggcatttgaaggaacaatatctgggaaggtactagagaaattacaaagcccgagctctttcttataatgccacctatccctgtaagctaaacaaacaaacaaacaaacaaacaaacagttctatatataatagtttcaacacagaacttaacaagtctctttttttgtttgtttaaatctggctttacttgatttaattcctttttagaaagaaatttagggcaaaataaagtgtatattaggatttaaatttatgccacaatttaaaaataaaaccagaggttatatacaatttaaattgggctaaaaattaaaaatttgaggatttaacttgatatagctctcaggatctaaataaagtttaaattatcattaagacactgctaggagaagattaagattatgaaagtaacagttattgatactgctggacttcaaaggcaaagttcatttcttccattaactgcttccagagatgtcatgtaaaaaagttagtgtattagagaagttttttagctttataaagaggttttttcaaatttctcccatttttctctccacccacataaaatagtatgttcagtgaaatgccactttctatctttaattgttcgtatcatatatgcgaactttttagacatgaacatgacatgttcagctaggcagagttctcatagataattttcaaatattttccttggctgtaatttatgtattcatttatatcctatccgtcttttgagcttcagatctatatactcttttgtactctcatcactccgcactttgctgtttcttacctagactctcttttacacaatatgcacatttttaccattgtggggtccaaatttaagataccttccactcactaataatatgaacttatatttcctgggagtagccaggttaaattttctatactttggtccataatttgatttgatatgattgtttcatttataatttgcccaaatacatggagcacaaaatttagtgaatttataaatctggatttgccttgtgtccttctgagttttcaaaggcaagtattcaacagtccctgtgtgatgactgacagggttatttgcctcatccacatccaccttcggaatacattaacttcctttgtaatttatttgaaagtagtgttaaactcattcagatcattcagttggattttcccaatgaagaggaaaaggaaagtagttattcctagctccatttcttattttccaccaaatttaattgaagggcattaattagatgtcttcaccctgaatttagactttgctctgtgttctcccggtaactgtcagacaaaaagtttattggctctgaggaactgagaaatgttgggaacctggtttctgctgtacacaggaaagatttgtaagtgagctctctctttgaaaacaggacccaggctgggcacagcagctcatgcctgtaatcctagtattataggaggcagaggctcgggaggattgcttgagcccaggagttcaagatcagcctaggcaacatagggagaccctatccctacaaaaaatttctgaaaaattacctgggcattgtggggcacacctgttgtcccagctactctggaggctgagtccggaggaacgtttgagcctgggagtttgagtttgcagcttgcagtgagctgtgattgcaccactgtactccagcttgggcaacagagcaagatcctgtctcaaaaggaaaaagaaaacaggacctaggtgtttggggtacactgccacccagggagtggatcaaaaatatacatagaaagagaatgagcatgtctctataattgtcttctaggaccatattgctgttagaagtcctaaaagaggatgggttgtaatttagcataatattctgaattcattccaagtttaaaatcctgtcattctctggctcttcttttttcacatcaaaatgatgctgttggacttagaggcttccgaactgttttattgagggctactatctgcctccacaattttattaaaaccactccacctttagacaaaggtgacttttgtctgattttacaaatcagattttattcaagctttctaaatatctgtgaagtagaccctagaaaattgtctcgtttattttaaatagaatctatgcttccaccaataaaccatcgggagctaagaaacaacataatgttgacaaatcaggaacctaacagattattttgtctctcattattaatttgaaagagcctctaaacttttgagaaatcaatgtgtcttcttaagaaagttaagcaccctctcttaactttcccctctatttgctctcctttttctttcttcttaagagtatttatattattttgttaagcaaaaatggctaagattgctctaaaatttgcaaaatgaggagtggattgcaaataattgagggatttatttctttaactttataagactttaaaaaaaaaacccaaattctaagcactgacatgaaagttgcctttgagaagcttgttattcattatacaaaaagtatttgcccattcctattctaagatttgcagaatatgtcaccctatctagcttttgagtttgctatctggtttaatgttgtatttataatttaaagtggaaatcagaaactgtttcaagaacctgtattctattccttactgagtgtcccttctttaaatagtgtttgctgaattaagccgatgggggcagtggcgttaagtggtggaaaaaggaaagtatatatgttagagttttgaatgagggataaatagaaagcagaatgaattaatggaaaagaactcggctgttaggccattctctaaattctagtttagccaaaagtttatgtgtggtttggggcttcatttatttatctcatgagtaaaatggaataatacctaacaggcaggctctggaagttggaaatcacatacacacacacacacacacagacacacacacacacgatcaatcatgtagctcatattagatgttcaataaataacagctactacagatgcctatcagttgagtaagtagttcattaaattgagctcccaaaggtctcttctcttcacatccatatccgtttctgcagcaatcaaatagatacatgattgtttttctgtaagaaattactgcaaagagaatctttttctcctactaactgttccttctacctggtataggagataaatgtacgtttcttaattagctgactttttagtatgtcatttctgaaggaaaaataaattaaccttaaagtggcatgtaggtccaattcagttttcctacatgttccaaaattttatttaaattactgtgtccaaaattatgaggacagtgtcattcattcaccatagtttatatttttagttatatatcaaacttccttggcacctaggataagaacatttcttttgaagttatccaatttttttttatttttacttgacttgaaggaaagttggaaaatatggtggaaaaaatcttccgcattaaaagggggaaaaacacaaccatttacgatctcagtcagcagatttactctactcaaggaaaaaaagaaacaatcttattggaagcagatgttgacactgtgtcagttattgaagacggaaggagttcacttgagccattgcagttacaaaggggtattgatggcagtttggattcctgattgatcacctttgcagccaagggaaagacagcagaaactgtatgggatcagaaatgaaatcagcctgccagtttaatggagaggctcctagaaactcattttttttctttcctgtaagataaaagacatctttcagaataagaaaggcttgtttgagagagaaattacagtttattctctgaaaatatttaaaggccaaagtgccctttaaatctattattaaagcattgaaactgttattaaaatcattatagaaaaattaggtaaaaattttagcctaactttcaacatccattcaaaaacgaatgttgaaaacaaacatataacctataaaaaagtgaatggctctggcaagtgggggcatgggtggagtccataaggaaacctcagtctcaataacttcaaaatgttacttttcatggtaacttggtcatggagattggtcacagcacagacatttagaattttttagcaggttttttttttcttttgaatcttgtagtgctctctgggaattgcaccatgtacacttttacaacctacagaaatcgtcattattgttaaagtatctcaacttttctatttcttttattgtctattgtgcttttttgtttaaaaatacttttatagttttaaagtattggtcaaagtagtattctcttgaagttctagtcaatttaatttgatccaataagtttttctgaatctcctttttaagttccaagaaattctattataaataagtgtacttttaccaattccattgtataagcaaacagacaccttttagaaaaggataagtaatcatcaatttgtttttttaaaaaaaaaaacaatttctagactactaaatttggcataagaataattcttttaaaatgcaacatactttaattagtttttttggtatatgcataagatgtgaactttcctattgatatcactttatattaatagagatgtacatttctttctatgccgtggctagagcaaaagttaataatgattatttacacaattgatttaatttcttaggatatgtataatattggatattatatctgatttaaaaatactattccatacattttttttttcaggagataaaacatagggaaaggttttcatgtgaattctttgtatcactttgaagtacatatatttaaagggaagatggatacaatttgtttttattatataaatctaggtaaggtgaaatgcttttgtcaacaaaaatacagtgtagtgaattttatatttgtcacttgattaggtaaactgaaaactaacaatagaaatattattttactgcattgaaataccatgaactttcagacttgttagttctacaagaagttgtgctaccttaattttgtgtttccagaaataaaaattaaccttagttatgctgtcatttttaactaataaaaaaagtataattcataaaacttttggctttataagataattataaaattatatatttttttctgtttttgtggggttgggaaaacattttcttatttctattcactcttcaaatgcaggtctcataatatgtgtcaatgatataagatgatggaagactttgtaataaaaacatatgtcattatcttcaatttgttcaataaataatttaatgtgaattgaatgtttgtattttaacatagcatttggatttggtctgcatttcttgagaatttaaagctctttttgtttcctccttattcaattaagcatcttataaatattttggaaattacaacatcttaggtgttattaattaagaagttaatttctagggccaagaagtctatatgttacagcaaggaatagattataaaatacatgtttataatggaaaagaaaatgaaatggggtatattaattacataacagcaagagtcttgagaattttataatacaatgcttctaaggatattggttgaccaaggtgtattttattgtttttacatttgttgacagggactctgccataagtagtatgaaaaaacaaacaaaaacttttctacgattcattaacattgaaaagagaattccaagaccttgtattctgaagaaagctagagtttctctaagtgggccttcaattttcttattacacgtatctttaatgtgaaagtactaaagtctgaaaatcagcatttaaataatagactttccagcattacagatgaaataatttggcgcaggctttttaactgtctaccatatttagaatgtggtgtcaaaatgagatttttagaactgctgtaaaatattactacattactacaacgataacggcctaaaacaacacaaatttattatcttacagctctgtcagtcagacattcagcaaagatcttagtcttggtgggctacagaatgtaggaggcatttcctggatgcttccaagagagaatcttgctgttccctgcttctagagtcctttgcttagtttccttccatcttcaaatccagcaacctggtcaagaccttctcacatgacatcactgacttcctcttcttcctctcccttacatatttaaggactcatgtgattacaatagctgcatctgtgtaatccagaataatctcttcatctcaaggtttttgttctgttttgtttttttgttttgttttgttttgttttgttttgatggagtcttgctctgtcgtcaggctggagtgcagtggcgcgatctcggctcactccaacctccacctcccgggttcaaaggattcccctgcctcagcctctcgagtagctgggactacagatgcgtgctaccacacaaggctaatattttgtattttagtagagacgggatttcaccatgttggccaggatggtctccgtctcctgacctcgtgatctgcctgccttggcctcccaaagtgttgggattacaggcataagccattgcgccatgctcaaggttcttaattacatctttaaaggccctttttccatgtacagtaacatattcaatggttctggggattaggacttggagccattattctacctacaacaattagtattggacttccatcattttctatcactcttgtaatcgagaaggactatttcactgggagtagcaagtcataatgtttgcgttggcatttgtgtgggggtttatcttcattcattaaataattgcatgtaaagaaaattcctgtcactatttcaaatgtttcatgtagttattatagtgcttcagaatccaaagggttatgtgttacttatgtaagatgagcagtctagggggtggagaacaggtcatctagtgcagattcttcctagctgaagtgtgttttctctggggacaaccaagtaggatttaattgttttgcttccttttttgggaacttagacccatcttgcgatgtcctaagtctccaagcatcttatttgacctgcttatacacatttgactaaatagctaaatatgaccacattgacgtggtaaagctttaacacttttgtccagattgaatcactccatctgctatcagttaagcagtggaaaactgttatggaaaagcaaacatgttttgatagatttaatgtgtaaagaaggtatccatactctggaatgctgctgatcaataaatgagctgcaagactttgttcgaaacaacactcaagcacaactgttttactttccataccaagtttggctgtgactgaatgaagaacatcagcattgatctttgctttgcacttgtacaagagactatttgcagagagccaaatatagcaacagaggatttaatatcttgccaaaaaatacaaaatctgttcccctttaagcatgacactctatcctttcttgtggatcttgctaaaaggaaaatatagctttaaactcccctattccttctgttgaaagcttaagaatctttttcaaatgagctatgtatggttttgtggtattttatgtttccaaaagaaaatggctacatgaaaaatctgtccagtgttatcatttttcttacaaaaaatacttctagttatggttgtattaattaatttgattgtgataatgattacacaatgtttacctatatcaaatcatcatatcgtataccttaaatatatataacttttatgtgtcaattataactcagtaagtctgggaaaatatcgttaagtcaaagattagagtcaacagaaataaagaaaaatcatactttgataacttcaggactaatcaaggatcaatgggtgacatgatatcatgctatgtgccattttgtgttaaacaaattacaccaacaataaaaaaaattggcttcaa

SEQ ID NO: 56447 - DNA, 5021 bp, Homo Sapiens
cccgggggggagagagccggcaggcggcggcggtggtggcgggggcgatgcgccgcgcccggccgcgctaggtgagccggcaccgggagcgcgggccgcggccatgggcaccctgggcaaggcgagagaggctccgcggaaaccttcccatggctgcagagctgcctctaaagcaagactagaggcaaagccagccaacagccccttcccctcccatcccagcttggcccacatcacccagttccgaatgatggtgtctctgggacatttagccaaaggagccagcctggacgatctcattgacagctgcattcaatcttttgatgcagatggaaacctgtgtcgaagtaaccaactgttgcaagtcatgctgaccatgcaccgaattgtcatctcctctgcagaactgctccaaaaagttatcaccctctataaggatgctttggcaaagaattcaccaggactttgcctgaagatctgttattttgtaaggtattggataacagaattctgggtcatgtttaaaatggacgccagcttgacagacactatggaggagtttcaggaactggtgaaagctaagggtgaggagttacattgccgcctgattgacacaactcaaatcaatgcccgtgactggtccaggaaacttactcaaaggataaaatcaaataccagcaagaaacggaaagtctccctgctctttgaccatctggaaccagaagagctatccgagcacctcacctaccttgagttcaagtctttccggaggatatcgttctctgattatcagaattaccttgtaaatagctgtgtgaaggaaaaccccaccatggagcgatctattgctctgtgcaacggcatctcccagtgggtacaactgatggttctcagccgccccacgccgcagctccgagcagaagtcttcatcaagttcatccaggtggctcagaagctccaccaactacagaacttcaatacactgatggctgtgataggtgggctgtgtcacagctcaatctcgaggctcaaggagacaagttcgcatgtcccacatgaaatcaataaggttctcggtgagatgactgagctgctgtcctcctccagaaactacgacaattaccggcgagcctatggagagtgcaccgacttcaagatccccattctgggtgtgcatctcaaggacctcatctccctgtatgaagccatgcctgactatctgggggacgggaaagtgaacgtccataagctactggccctatacaatcatatcagtgaattggtccagctgcaagaggtggccccacccttggaggctaacaaggacttggtacacttgctgacgttatccctggatctttactacactgaggatgaaatctatgagctttcctatgcccgggaaccaaggaaccacagagctccaccactaacaccttcaaagccaccagtagtagtggactgggcttctggagtgtctcccaaacctgatccaaaaaccattagcaaacacgtccagaggatggtggattctgtcttcaagaactatgatcacgaccaggatggatacatttctcaggaagaatttgaaaagattgctgcgagttttccattttccttctgtgtgatggacaaagacagggaaggcctcatcagcagggatgagatcacagcctacttcatgagagccagctcaatctattccaagctgggcctgggctttcctcacaacttccaagagaccacctacctgaagcccactttttgtgacaactgtgctggatttctctggggagtgatcaaacaaggatatcgatgtaaagactgcgggatgaactgtcacaaacaatgcaaagatctggttgtgtttgagtgtaagaagcgagccaagaacccagtagctcccacagagaacaacacttctgtggggccagtgtccaacctttgctcattgggagccaaagatctgctccatgcacctgaggaaggaccttttacattccctaatggggaggctgtggaacatggtgaggagagtaaggatcggaccatcatgctgatgggagtgtcctcacagaagatttctcttcggctgaagagggctgttgcccacaaggccacccagactgaatcacagccttggattggcagtgagggcccttcaggtccctttgtgctgtcttccccaaggaagacagcccaggatactctatatgtgcttcccagtcccacctctccatgtcctagcccagtcttggtcagaaagcgggcttttgtcaagtgggagaataaagactccctcataaaatcaaaggaggagctccgtcacctcagactgcctacctaccaagaactggaacaggaaataaatactctgaaagcagataatgatgccctaaagatccaactgaaatatgcacagaagaaaatagaatccctccagcttgaaaaaagcaatcatgtcttagctcaaatggagcagggtgactgttcttagcccagaaactaagtagcacaatctgtagatgagtatagtgatctcatttcctaaactgtaatgcacagacctgaggaactttacactgaccagctttaaaacagtactttaaaaggaaaagcctgttactgtttatttacctaaaagattcctaatgtgcagcactgttttctctttcagttagttgactcaaagggggaaaactaaagaatgcaaaacttttgctattcataccactgatgttcatcaaaagtatgcgatctaaaacatgactatcatttcctgacaatggggcatctcggtggcctgcctggctgattcttccttaaaactaaaatctctggaaaatggatttgcttcttaccctgtgttttctgcaaactgacttactttgttccagccaaagcttgctaataatagaaaactacccatattccaaaagtagatttcctctgtatcccagcatactttgtgaacctggctccttcttcactacctcagatctaatcaattagtccatgtaccctccttcctcactacagtcataacacatgagcatatctacctagaagccaatttctactgatgtagccacaactttttagaggcctattaaacatgacgttatccaattgcaggtcaacttatagttgtagccttacaacttacaggcatcagaaaataagtaatcaaattaggtacctggaaacatagctattaccatctcatattactgtctaattaaaataaacataacgcaaacatgtttgtccttatatattctacagtggatagaattaggaattgatggcttaaaaaaaaaagtctatgaagagtctgtttaactcttcatgttccatctttctcttctgaagtaaactattttgaaagttctctttttgaaatgaatttgtgcttaactgtcttcactattaatactatttagaaataagctaattggatcagtggcttaaataatagctgactgtgtgtacatatgtatataatatgtatatacaatatcaggcatgcatgtggcttggaattttgtttcctccataaaatgtggaagtgaattaaacaagttttagtcatttatacaaagtcacaaatataaagttcagtttgtcacaagattaaattgctcacaaggtaaaattgtattgtttggcaaaatcacaagtaacaatcctgtgagttttctattatgaaggttaataataaatgggctcatttagttgcctgggcacctattcacaaattcatttgtcagcctctttttagttctcttaaaaaaaaaaaaatcatatgatcattttcctttttgggggtacttagcttccatgcctataaagtctggtaccagactgacttgaaattcataaacaagttgtccaattgccaagaatatgttaacaattaaaagttccaaactaaagccaatagcaccaagtcttcataagaatacaaagtatacatacagtattgcttacctggaggattcagatcatttaggaattctctttgatgaaagatcagttcccatttgagttcctccttgcactgagttttagtgatatagaactagcttgtagttagtgtttcattacattataaagaatagttttacacacgtatttaccgttttccaaatttaaactcagaaatacccaaagcaggcctgcttaagcccactacctggcatataaacttatagtaacactttgttactttctttttaataggacaagcatgagttaggacaaactctaaaaattcatattcttcactattcttgttttcctttgattgatatagaccaaagatggtgtactctaattttttaaaacagtaatggaacacaatttttttcattcttcctcctctccattcgaagtaaagatccccagttagtttttatataaataatctatagggattcaaaaggtgtcacagtccacttaattagtcaaattagcaatggctaaacagtatcaagtactgcagaatttatcactgaaatggataagaggaaatagtttagtcacaggtttttacagtccagcaagggccaaagaggtatagtatacaagttaatagtatttgtgttgagcaacatggggctagtgggatcacagaaatctggaaaaaaaaaaaaaaaggctttggcttatcaagcctagtgtaaatttctgcatctcacacgactttagtttggccaggtatttatctgccaaaacaaggacaaatcttgttgtattaacagcagggtcacttctcattttctttgctgacttacctttttactgaccgttgtgaatttctgtctcaaaatgtataatatagaaatgcaagaaaaaaacaaatgtacagattgtaaagttttttgatacctaatgtaagttttctttgtgtaatatttatatgataaaagacattaggatccctacaaaaaaaaaaaaaaaaaaaaaaaaaaaaaaaaaaaaaaaaaaaaaaaaaaaaaaaaaaaaaaaaaaaaaaaaaa

SEQ ID NO: 56448 - DNA, 5301 bp, Homo Sapiens; identical to SEQ ID NO: 29258

SEQ ID NO: 56449 - DNA, 4338 bp, Homo Sapiens
ggggcacactcatgcattcctgtcaagtcatcttgtgaaaggctgcctgcttccagcttggcttggatgtgcaaccttaataaaactcactgaggtctgggagaaaatagcagatctgcagcagatagggtagaggaaagggtctagaatatgtacacgcagctgactcaggcaggctccatgctgaacggtcacacagagaggaaacaataaatctcagctactatgcaataaatatctcaagttttaacgaagaaaaacatcattgcagtgaaataaaaaattttaaaattttagaacaaagctaacaaatggctagttttctatgattcttcttcaaacgctttctttgagggggaaagagtcaaacaaacaagcagttttacctgaaataaagaactagttttagaggtcagaagaaaggagcaagttttgcgagaggcacggaaggagtgtgctggcagtacaatgacagttttcctttcctttgctttcctcgctgccattctgactcacatagggtgcagcaatcagcgccgaagtccagaaaacagtgggagaagatataaccggattcaacatgggcaatgtgcctacactttcattcttccagaacacgatggcaactgtcgtgagagtacgacagaccagtacaacacaaacgctctgcagagagatgctccacacgtggaaccggatttctcttcccagaaacttcaacatctggaacatgtgatggaaaattatactcagtggctgcaaaaacttgagaattacattgtggaaaacatgaagtcggagatggcccagatacagcagaatgcagttcagaaccacacggctaccatgctggagataggaaccagcctcctctctcagactgcagagcagaccagaaagctgacagatgttgagacccaggtactaaatcaaacttctcgacttgagatacagctgctggagaattcattatccacctacaagctagagaagcaacttcttcaacagacaaatgaaatcttgaagatccatgaaaaaaacagtttattagaacataaaatcttagaaatggaaggaaaacacaaggaagagttggacaccttaaaggaagagaaagagaaccttcaaggcttggttactcgtcaaacatatataatccaggagctggaaaagcaattaaacagagctaccaccaacaacagtgtccttcagaagcagcaactggagctgatggacacagtccacaaccttgtcaatctttgcactaaagaaggtgttttactaaagggaggaaaaagagaggaagagaaaccatttagagactgtgcagatgtatatcaagctggttttaataaaagtggaatctacactatttatattaataatatgccagaacccaaaaaggtgttttgcaatatggatgtcaatgggggaggttggactgtaatacaacatcgtgaagatggaagtctagatttccaaagaggctggaaggaatataaaatgggttttggaaatccctccggtgaatattggctggggaatgagtttatttttgccattaccagtcagaggcagtacatgctaagaattgagttaatggactgggaagggaaccgagcctattcacagtatgacagattccacataggaaatgaaaagcaaaactataggttgtatttaaaaggtcacactgggacagcaggaaaacagagcagcctgatcttacacggtgctgatttcagcactaaagatgctgataatgacaactgtatgtgcaaatgtgccctcatgttaacaggaggatggtggtttgatgcttgtggcccctccaatctaaatggaatgttctatactgcgggacaaaaccatggaaaactgaatgggataaagtggcactacttcaaagggcccagttactccttacgttccacaactatgatgattcgacctttagatttttgaaagcgcaatgtcagaagcgattatgaaagcaacaaagaaatccggagaagctgccaggtgagaaactgtttgaaaacttcagaagcaaacaatattgtctcccttccagcaataagtggtagttatgtgaagtcaccaaggttcttgaccgtgaatctggagccgtttgagttcacaagagtctctacttggggtgacagtgctcacgtggctcgactatagaaaactccactgactgtcgggctttaaaaagggaagaaactgctgagcttgctgtgcttcaaactactactggaccttattttggaactatggtagccagatgataaatatggttaatttcatgtaaaacagaaaaaaagagtgaaaaagagaatatacatgaagaatagaaacaagcctgccataatcctttggaaaagatgtattataccagtgaaaaggtgttatatctatgcaaacctactaacaaattatactgttgcacaattttgataaaaatttagaacagcattgtcctctgagttggttaaatgttaatggatttcagaagcctaattccagtatcatacttactagttgatttctgcttacccatcttcaaatgaaaattccatttttgtaagccataatgaactgtagtacatggacaataagtgtgtggtagaaacaaactccattactctgatttttgatacagttttcagaaaaagaaatgaacataatcaagtaaggatgtatgtggtgaaaacttaccacccccatactatggttttcatttactctaaaaactgattgaatgatatataaatatatttatagcctgagtaaagttaaaagaatgtaaaatatatcatcaagttcttaaaataatatacatgcatttaatatttcctttgatattatacaggaaagcaatattttggagtatgttaagttgaagtaaaagcaagtactctggagcagttcattttacagtatctacttgcatgtgtatacatacatgtaacttcattattttaaaaatatttttagaactccaatactcaccctgttatgtcttgctaatttaaattttgctaattaactgaaacatgcttaccagattcacactgttccagtgtctataaaagaaacactttgaagtctataaaaaataaaataattataaatatcattgtacatagcatgtttatatctgcaaaaaacctaatagctaattaatctggaatatgcaacattgtccttaattgatgcaaataacacaaatgctcaaagaaatctactatatcccttaatgaaatacatcattcttcatatatttctccttcagtccattcccttaggcaatttttaatttttaaaaattattatcaggggagaaaaattggcaaaactattatatgtaagggaaatatatacaaaaagaaaattaatcatagtcacctgactaagaaattctgactgctagttgccataaataactcaatggaaatattcctatgggataatgtattttaagtgaatttttggggtgcttgaagttactgcattattttatcaagaagtcttctctgcctgtaagtgtccaaggttatgacagtaaacagtttttattaaaacatgagtcactatgggatgagaaaattgaaataaagctactgggcctcctctcataaaagagacagttgttggcaaggtagcaataccagtttcaaacttggtgacttgatccactatgccttaatggtttcctccatttgagaaaataaagctattcacattgttaagaaaaatactttttaaagtttaccatcaagtcttttttatatttatgtgtctgtattctacccctttttgccttacaagtgatatttgcaggtattataccatttttctattcttggtggcttcttcatagcaggtaagcctctccttctaaaaacttctcaactgttttcatttaagggaaagaaaatgagtattttgtccttttgtgttcctacagacactttcttaaaccagtttttggataaagaatactatttccaaactcatattacaaaaacaaaataaaataataaaaaaagaaagcatgatatttactgttttgttgtctgggtttgagaaatgaaatattgtttccaattatttataataaatcagtataaaatgttttatgattgttatgtgtattatgtaatacgtacatgtttatggcaatttaacatgtgtattcttttaattgtttcagaataggataattaggtattcgaattttgtctttaaaattcatgtggtttctatgcaaagttcttcatatcatcacaacattatttgatttaaataaaattgaaagtaatatttgtgcaa

SEQ ID NO: 56450 - DNA, 5872 bp, Homo Sapiens
ggcattatgcaattatattactaaggctgctacctgcccatgcccctctcctcctcctggtttggaactaccctccccatctgctgctatatttatctgccttcttggccataaaaggctggttgtgtggcctgacattcgactgcctgaccacatgcattatttttgaactggcccccagggtcctgtctttagccctgcctcttaacattgtcttggattcaacctaggtggagtcttcattctctcatccagctcctcggcctcatcggaacatttccaccaccattactcctttggaaactggtggcccggttccttcaagaggcacaggatgtctttgcctttttatcagaggtgccaccagcactatgatctcagctaccgcaacaaggacgtgcgcagcaccgtgagtcactaccagcgggagaagaaacgctccgccgtctacacccagggctccacggcctacagcagccgctcctccgccgcgcaccgccgggagtccgaggccttccgtcgggcgtccgcctcctcctcccagcagcaggcctcgcagcacgccctgagctctgaagtcagtcggaaggcagcctcagcctacgattatggctcctcccatggacttacagattccagtctgctgttagatgattattcatccaagttgagccccaaaccaaagagagccaagcacagcctactgtctggagaagagaaagaaaatttgcccagtgactacatggtacccattttctcaggacgtcaaaagcatgtcagtggaattactgatacggaagaagaaagaattaaagaagctgctgcttatatagcccagaggaatcttcttgctagtgaggaaggaatcacaacacctaaacagtccacggcatccaagcagaccacggcatctaagcagtccacggcatccaagcagtccacagcatccaagcagtccacggcatccaggcagtccacggcatccaggcagtctgtggtttccaaacaggccacatccgctcttcaacaggaagaaacttctgaaaagaagtcaaggaaagttgtgattcgagaaaaggcagaacgcctgtccctgaggaaaacattagaagaaaccgagacatatcatgccaagctgaatgaagaccatcttctccatgctcctgagtttatcattaaacctcgctcccacacggtttgggagaaggagaatgtaaaattgcattgctccatagcaggctggccagaacctcgtgtcacgtggtataaaaaccaggtgccaataaatgtccatgcaaaccctggaaagtatattattgagagtcgatatgggatgcacactctggagattaatgcatgtgattttgaagatacagctcagtaccgggcctcggcgatgaatgttaaaggagagctttcggcatatgcttcagttgtggtaaaaaggtataagggagagtttgatgagactcgcttccacgctggggcttccaccatgcccctcagctttggtgtgaccccatatggttatgcatcccggtttgagatccactttgatgacaaatttgatgtgtcttttgggagagagggagagacaatgagtctaggctgtcgtgttgtcatcactcctgaaattaaacatttccagccagagatccagtggtacagaaacggagtacctctttctccatcaaaatgggtgcaaacactttggagtggagagcgggcaacgctgacattttcccatctcaacaaagaagatgaaggcctctatacaatccgtgtacggatgggagaatattatgaacaatatagtgcttatgtctttgttcgagatgctgatgcagagattgaaggagccccagctgctcccttggatgtgaagtgcttggaggccaacaaagattatatcatcatctcctggaaacagccagctgtcgatggagggagtcctattctcggatattttattgataagtgtgaggtgggcacagatagctggtcgcagtgcaatgacacacctgtgaagtttgctcgttttcctgtcactggattgatcgaaggtcgttcctatatcttccgagttcgagctgtgaataaaatgggaataggtttcccatctcgagtttccgagcccgtggctgctctggatccggctgagaaagctagacttaaaagtcgcccctcagcaccctggactggacagatcattgttactgaagaggaaccttcagagggtattgtgcctggccccccgacagacctctctgtcactgaggccacccggagctatgtggtgctcagctggaagccccctggccagcgtggtcatgagggcattatgtactttgtggaaaagtgtgaggcaggaacagaaaactggcagcgagtgaacacggagctccctgtgaagtctccccgctttgctctgtttgacttggccgaggggaaatcctactgtttccgtgtccgctgttctaattctgcaggagttggtgagccctcagaggcaacggaggtgactgtggtaggggacaaacttgatatccccaaggctcctggcaaaatcatcccaagcagaaacacagacacctcagtggtagtttcgtgggaggagtccaaagatgccaaagagctggtcgggtactacatagaggcgagcgttgctggctctggcaagtgggagccctgtaacaacaaccccgtgaagggctcacgattcacttgtcatggattagtgactggtcagagttatattttccgggtcagagcagtcaatgcagctggacttagtgaatattcccaggattcagaagctattgaagtcaaagctgctattgggggaggagtgtctccagatgtgtgtcccgcactgagcgatgagcctggtggactaaccgcctccagggggcgcgtgcatgaagcctccccgccaaccttccagaaagatgctttgcttggcagcaaacctaacaaaccttcactacccagtagctctcaaaacctgggccaaacagaagtgagtaaagtaagtgaaacagttcaggaagagcttaccccgccaccacagaaagcggctcctcaggggaaaagtaagtctgaccccctgaaaaagaagacagacagagcaccaccatctccaccctgtgatatcacctgtcttgaaagttttcgtgactcaatggttcttggatggaagcaaccagataagattggaggggcagaaattactggctattatgtgaactatcgcgaggtcattgatggggtaccaggaaaatggagagaagccaatgtcaaggctgtcagtgaggaggcatacaagattagcaacttgaaggaaaacatggtgtatcagttccaagtggcagccatgaacatggctgggctgggcgcgccctccgcagtaagcgaatgcttcaaatgtgaagagtggaccatcgccgtcccaggaccaccgcacagtctcaagtgtagtgaagtcaggaaagactcactggttctccagtggaagccgccagtccactccgggcggactccggtcactggttacttcgtggacttgaaggaggccaaggccaaagaagaccagtggcgagggctcaatgaggcggctattaaaaacgtatacctgaaggttcgaggcctcaaggagggcgtcagctacgtgttccgtgttcgagccataaaccaggcgggagttgggaagccatctgaccttgctggccctgttgtggcagagacccgtccaggaaccaaagaggttgttgtaaatgtggatgatgatggagtcatttcattgaacttcgagtgtgataagatgactccaaagtccgagttctcctggtccaaagattatgtatccactgaggactctccacgattggaagtcgaaagcaagggcaacaagacgaaaatgaccttcaaagaccttgggatggatgacttgggtatttactcttgcgatgtaacagacactgatggaatagcatcaagctacttaatagatgaggaagaattgaaacgtttacttgctctcagccatgaacacaagttcccaactgtcccagttaaatcagagttggcagttgaaattttggagaaaggccaggtccggttttggatgcaggctgagaaactgtctggcaatgccaaagtcaactacatatttaacgagaaggaaatttttgaaggcccgaaatataaaatgcatattgaccgaaacactggcatcatcgaaatgttcatggaaaagctacaggatgaggatgagggaacgtacactttccagcttcaagatggaaaagcaactaaccattctactgttgttctcgttggagatgttttcaaaaagctccagaaagaagctgaattccagcggcaagaatggatcaggaaacaaggtcctcactttgttgagtatttgagctgggaagtgactggtgaatgtaatgtactattgaaatgcaaggtggcaaatattaagaaggagactcatattgtgtggtacaaagatgagagggagatatcagtggatgaaaagcatgactttaaggatggtatatgtaccctgcttataacagagttttccaagaaagatgctgggatttatgaagttatcctgaaagatgaccgaggaaaagataagagcagactgaagcttgtggatgaagcctttaaggaactgatgatggaagtatgcaaaaaaatagctttgtctgctacagacctgaaaatccagagcacagccgagggcatccaactgtactcttttgtaacttactatgtggaggatttgaaagttaactggtcccacaatgggtccgccattaggtactcagacagagttaagaccggggtcactggagagcagatctggctacaaatcaacgagcccaccccgaatgacaaagggaagtatgtcatggagctctttgatggcaaaactggacatcagaagacagtggatctctctggacaagcatacgatgaggcctatgctgaattccagaggttgaaacaagctgccattgccgagaaaaatcgtgcccgggtgttgggaggtctcccagacgtggtcaccatccaggaggggaaggcccttaatctcacttgcaacgtgtggggagacccgcctccggaggtgtcgtggttgaagaacgagaaggccctggcctcagacgaccactgcaacctcaagttcgaggctgggaggaccgcgtacttcaccatcaacggcgtgagcaccgctgactcgggcaaatacgggctggttgtgaagaacaagtatggctcggagaccagcgacttcaccgtcagcgtgttcatcccagaggaggaggcgaggatggccgccttggagtccctgaaaggtggcaagaaggccaagtgaccggaggtgcgaggagagccagccggcctgtgtgacttgggtgtgaatggtttgggttaaggatgagacgtcttcatgctttctcctccctattattttctggcttgaggggaaaataatgtcaggtctttcactcatataaaaaagcaccaactaatgacactttaattgtttttctttatctacaaaattatgtgttaagaaaataccattcatagcatgaagattaggaaacagttttaaggagaagacttgaatgaagttggagggacattgaatgatggtcagagggcagacgaatgtgtcgtggggcgaattgggatttgctgcagctgtgaagccatggccgtgtctcgtgtgttgttacagaggtgatgtgcttttcgacgggcgcctcgtggcttggaacctcctctgtatgaataaacagttttcacgtctgtcctcttccccgaaaaaaaaaaaaaaaaaaaaaaaaaa

SEQ ID NO: 56451 - DNA, 3298 bp, Homo Sapiens
atggcttcactgagaagagtcaaagtgctgttggtgttgaacttgatcgcggtagccggcttcgtgctcttcctggccaagtgccggcccatcgcggtgcgcagcggagacgccttccacgagatccggccgcgcgccgaggtggccaacctcagcgcgcacagcgccagccccatccaggatgcggtcctgaagcgcctgtcgctgctggaggacatcgtgtaccggcagctgaatggcttatccaaatcccttgggctcattgaaggttatggtgggcggggtaaagggggccttccggctactctttccccggctgaagaagaaaaggctaagggaccccatgagaagtatggctacaattcatacctcagtgaaaaaatttcactggaccgttccattccggattatcgtcccaccaagtgtaaggagctcaagtactccaaggacctgccccagatatccatcatattcatcttcgtgaacgaggccctgtcggtgatcctgcggtccgtgcacagtgccgtcaatcacacgcccacacacctgctgaaggaaatcattctggtggatgacaacagcgacgaagaggagctgaaggtccccctagaggagtatgtccacaaacgctaccccgggctggtgaaggtggtaagaaatcagaagagggaaggcctgatccgcgctcgcattgagggctggaaggtggctaccgggcaggtcactggcttctttgatgcccacgtggaattcaccgctggctgggctgagccggttctatcccgcatccaggaaaaccggaagcgtgtgatcctcccctccattgacaacatcaaacaggacaactttgaggtgcagcggtacgagaactcggcccacgggtacagctgggagctgtggtgcatgtacatcagccccccaaaagactggtgggacgccggagacccttctctccccatcaggaccccagccatgataggctgctcgttcgtggtcaacaggaagttcttcggtgaaattggtcttctggatcctggcatggatgtatacggaggagaaaatattgaactgggaatcaaggtatggctctgtgggggcagcatggaggtccttccttgctcacgggtggcccacattgagcggaagaagaagccatataatagcaacattggcttctacaccaagaggaatgctcttcgcgttgctgaggtctggatggacgattacaagtctcatgtgtacatagcgtggaacctgccgctggagaatccgggaattgacatcggtgatgtctccgaaagaagagcattaaggaaaagtttaaagtgtaagaatttccagtggtacctggaccatgtttacccagaaatgagaagatacaataataccgttgcttacggggagcttcgcaacaacaaggcaaaagacgtctgcttggaccaggggccgctggagaaccacacagcaatattgtatccgtgccatggctggggaccacagcttgcccgctacaccaaggaaggcttcctgcacttgggtgccctggggaccaccacactcctccctgacacccgctgcctggtggacaactccaagagtcggctgccccagctcctggactgcgacaaggtcaagagcagcctgtacaagcgctggaacttcatccagaatggagccatcatgaacaagggcacgggacgctgcctggaggtggagaaccggggcctggctggcatcgacctcatcctccgcagctgcacaggtcagaggtggaccattaagaactccatcaagtagagggagggagctggggcactggagcctggcccccaggacatggctgctccccccaacatctggaccagctgccctggcggagagacagcaaggggccggcaggtgctcgatgggccccccagggcttctccagggcagcacagggaccccggatgaagactctgtcccccctcaggcattcagctgcccacaagtttcctgcaccctggaaaagccccccacccttcctctgggaaactgacagctgtcttccacagcctctgatgtggacctggtactgaggagcaagactgtccagttctcctccacatctcccatcccagaatcaggatctgggactggcagggtcccctcctgtgtctcatctcttgcagcagcagctgctgaactccagccatcaacacggtgggaggcagcgggggcttcagccatgtcctagctccccgccctaaaaggaggcagtgaggaccaggcactatttcctccgaggttacttctacccagatgacacctgcctgttcacgccccaaggcagctactgcccctaacccttcccaccagggtagctttgggcactgcagctctggacttttctggcccctcctgagatgacctgatggagctgatgctttctctcctaatccctgggcactaggctcttatcagtgtgcttgggccagctctcctgcctgtgtctagaggaagccagagacagaaataggctaagcctgcagtaggatctcagccacaagggccccgcaggatggagctgggtcaaggaccagggagccctgactcccagaggctgccaccggggagaagcagcggtcctccatccagaacctaagggctgaagcaaaggctgccaggacccttgaagatgcttttggctcacctcatttcaccccacgctctgctggctggcagaggagaaggcagtcgtttcctctctgaagagtatttttttcgattgccctctggttagggtgcacatataaatcagagttaatatatgaacgcgtgtgcatgcacaagtgtgtgtgtgcctgcgtgctgtgcgtggcagggtgtgtgtgtgtgtgtctggctgtgcgttccggagtgtgtgacgatgctgacctagctgtgtggccttgggcttgctgcttcattactcacctggatggggacgagggatgagaagggtgtgggtttggccccatgtcactggccggaaggatgtgtctcagccctgccctgtggggtgcccccgatgggaggctgtcccatctcccagtccccatctctttttccccacactgtccctggccaagccctgcccagagctgaaccctgtagctgcccccttgccctgtgtgggattcgcagtgtctcatttggtgacgtcttactggtgatcatctcctcaccccatctcccaccttgtggaataaatacatgttagcacttcccaaaaaaaaaaaaaaaaaaaaaaaaaaaaagaaaaaaaaaaaaaaaaaaa

SEQ ID NO: 56452 - DNA, 4281 bp, Homo Sapiens; identical to SEQ ID NO: 24814

SEQ ID NO: 56453 - DNA, 5218 bp, Homo Sapiens
ggataacaacttacagaggccaaatgacataggatgaaggctgttcgtaacctgctgatttatatattttccacctatctcctggttatgtttggatttaatgctgcccaagacttctggtgttcaactttggtgaagggagtcatttatggatcgtattctgtaagtgaaatgtttcctaaaaactttacaaactgcacttggacgctggaaaatccagatccaaccaaatatagcatttacctgaaattttccaaaaaggaccttagctgctctaacttttcactcctggcttatcagtttgatcatttttcccatgaaaaaataaaggatcttttaagaaagaatcattctataatgcaactctgcaattccaagaatgctttcgtttttctacagtatgataaaaattttattcaaatacgtcgagtatttccaactaatttcccaggattacagaaaaaaggggaagaagatcagaaatctttttttgagtttttggtattgaacaaggtcagcccaagccagtttggttgccatgtattatgtacttggttggagagctgcttaaaatcagaaaatgggagaacagaatcatgtgggatcatgtatacaaaatgcacctgccctcagcatttgggagagtgggggatcgacgaccagtcgctgattttgttaaataacgtggtgttacccctgaatgagcagacagagggctgcctgacccaggagctgcaaaccacccaagtctgcaatcttaccagggaggccaagcgaccacccaaagaagaatttggaatgatgggagatcatacaattaaaagtcagcgacctcgatctgttcatgaaaaaagggtccctcaggaacaagctgatgctgctaaatttatggcacaaactggtgaatctggtgtggaagagtggtcccagtggagcacatgttcggttacttgtggtcaagggtcgcaggtgcgaaccagaacttgtgtatcaccttacgggacacactgcagcggcccattaagagaatcaagggtttgcaataacactgccctctgtccagtacacggagtatgggaggaatggtcaccatggagtttatgttcatttacatgtggtcgaggccaaagaacaagaacaaggtcatgcacacctcctcagtatggaggaaggccgtgtgaaggacctgaaacacatcataagccttgtaatattgctctttgcccagttgatggacagtggcaagagtggagttcgtggagccagtgctcagtaacgtgctcgaatgggactcagcagagaagccggcagtgcactgcagctgcccatggaggctccgaatgcagagggccatgggcagaaagcagagagtgctataaccctgaatgtacagccaatggtcaatggaatcagtggggtcattggagtggttgttccaagtcctgtgatggcggctgggaaaggcgaataaggacctgtcagggtgcagtgataacagggcagcaatgtgaaggaacgggcgaagaagtgagaagatgcagtgagcagcgatgccctgcaccttatgaaatatgccctgaggattatctgatgtcgatggtgtggaaaagaactccagcaggcgacttggcattcaatcaatgtcccctgaatgccacaggcaccactagcagacgctgctctctcagtcttcatggagtggccttctgggaacagccgagctttgcaagatgcatatcaaatgagtacagacacttgcagcattcaattaaagagcaccttgctaaggggcagcgaatgctggcaggtgatggaatgtcccaggtgaccaagacactgttggatttaactcagagaaaaaatttctatgcaggcgatcttctgatgtctgtggagatcctgagaaatgtgacagacacatttaaaagggcaagttacatccctgcatctgatggtgtccagaacttctttcaaatagttagcaaccttctagatgaagaaaacaaggaaaaatgggaagatgcacaacagatttatccagggtcaatagagttaatgcaggtgattgaagattttatacacattgttggaatggggatgatggactttcagaattcatacttaatgactggaaatgtagtggctagtattcagaagcttcctgcagcctctgttctaacagacatcaactttccaatgaaaggacggaagggaatggttgactgggcaagaaactcagaagatagggtagtaattccaaaaagcattttcactccggtgtcatcaaaagaattagatgaatcatctgtatttgttcttggcgcagtcctatacaaaaacttagatctaattttgcccactttgagaaattatactgtcattaattccaaaatcatcgtggtcacaataaggcctgaacccaaaacaaccgattcgtttctggagatagaactagctcatttggctaatggtactttgaatccctattgtgtattgtgggatgactccaaaacgaacgagtctttgggaacgtggtccacccagggatgtaaaactgtgcttaccgatgcatcccatacgaaatgcttatgtgatcgtctctctaccttcgccattttggctcagcaacctagagaaataatcatggaatcctctggcacaccttcagttaccctaatagtaggcagtggtctttcttgcttggccttgattaccctagcagttgtctatgcagcattatggaggtacatacgctctgagagatccataatactaattaacttctgcctgtctatcatctcatccaatatcctcatactggttggacagactcagacacataataagagtatctgcacaaccaccactgcatttttgcactttttcttcctggcttcattctgttgggttttgactgaggcgtggcaatcatatatggctgtaactggaaaaattaggacacggcttataagaaaacgctttttgtgccttggatggggtttaccagcattagtagtggccacatcagtaggcttcaccagaacaaaaggatatggcactgatcactactgctggctctctcttgaaggaggactactctatgcttttgtgggacctgcagccgctgttgtcctggtcaacatggtgattggcattttggtatttaataaacttgtttccagagatggaatcctagataaaaagctcaaacacagagccggtcagatgagtgagcctcatagcggtttgacgctcaaatgtgccaagtgtggagtagtttcaacaacagctttgtcagccaccaccgccagtaacgccatggcgtctctttggagctcctgtgtggtgttgccccttctggctttgacgtggatgtctgcggttctggccatgacagataaacgctccatattgtttcaaatactttttgctgtgtttgattcattgcaaggctttgttatagtcatggtccactgcattcttcggagagaggttcaggatgcatttagatgccgattgagaaactgtcaggatcccatcaatgcagattcttcgagttcgtttcctaatgggcatgctcaaatcatgacagactttgaaaaggatgtagacattgcctgtcgatcagttcttcataaggatattggtccttgccgagcagccacaataacaggaacactttctaggatttctctaaatgatgatgaagaagaaaagggaacaaaccctgaagggctaagctattcaacattgcctggaaatgtcatttccaaagtcatcatccagcaacccacaggtttgcacatgcccatgagtatgaatgagcttagcaatccatgtttgaaaaaagaaaatagtgaattgcggagaactgtgtacttatgtacggatgataatttgagaggggctgacatggacatagtccatcctcaagaaagaatgatggaaagtgactatattgtgatgcccagaagttctgtaaataaccagccttcaatgaaagaagaaagcaaaatgaatattggcatggaaaccttgccacatgaaaggctattgcactacaaagtaaaccctgaattcaatatgaatccccctgtaatggaccagttcaatatgaacttagagcaacatctcgcaccccaggaacatatgcagaatttgccctttgaacctcgcacagctgtgaagaatttcatggcctctgagttggatgataatgcaggactatcaagaagtgaaactggatcaacgatatcaatgagttctttagagagaagaaaatcacgatattcagaccttgactttgagaaggtcatgcatacaaggaagaggcatatggaactatttcaagaactaaatcagaaatttcaaactttggacagatttcgggatataccaaatacaagcagtatggaaaaccccgcaccaaacaagaatccatgggacactttcaaaaaccccagtgaatacccgcattacaccacaatcaatgtcttagacacagaggcaaaggatgctttggaactgaggccagcagagtgggagaagtgtctgaatttgcctctggatgtgcaagagggtgactttcaaacagaagtttaaaaaaatcaaaatggactaaggtagagacaaaactttattgcactgacacttaagacttgggaagcctgacatttctatctggacagtgtgactatcttatgtcaggaccttcatgtgccaaacgtcagtggtgttttcatatggtaacttctcactagtcaggctagtggagagatgaccaggtgtacagttctgaccatcctgtgttgtaagtacccgtggaatggatttgtaaggtaatctttatagataaacctcaagcaacgattcatgttgtaaccgcttcatatggtttagttttcaaaaaacttcaccatgaagcacaatgtatatatttatgcagtttttaaagtttataacagtctgtttggccattactacactttttactttataatataaaagcaaagtttttgtcattaaatgaatgtttgttgagctacattcttcattgctttaaatgcaataaagtaataatctcacttttatatgaataatatatttcacatctttattattgcagttttctctagaaagctctgagaagctttctctgctgcagctgtgtataaaatatttaaaatgttgtatggtgtaaataaacttttgtctacat

SEQ ID NO: 56454 - DNA, 4662 bp, Homo Sapiens
cccctcctcctcctcactcctcgccctccagggtagcggctaccggagcgctgcagggggctgcgcctgcctgctccgccccagacctgtcggcgaaaggtagtttatgccaacgtgacttcattcatacagatgaaccaaggatcgggatagcagtataaaattagaatcaagacagctgactgctcagcaggatgccatcaactaacagagcaggcagcctgaaggaccctgaaattgcagagctcttcttcaaagaagatccagagaagctcttcacagatctcagagaaattggccatggaagctttggagcagtgtattttgcacgagatgtgcgtaccaatgaagtggtggccatcaagaaaatgtcttatagtggaaagcagtctactgagaaatggcaggatattattaaggaagtcaagtttctacaaagaataaaacatcccaacagtatagaatacaaaggctgttatttacgtgaacacacagcatggcttgtaatggaatattgtttaggatctgcttcggatttactagaagttcacaaaaagccattacaagaagtggaaatagcagcaattacacatggtgctcttcagggattagcctacttacattctcatactatgattcatagagatatcaaagcaggaaatatccttctgacagaaccaggccaggtgaaacttgctgactttggctctgcttccatggcatcacctgccaattcctttgtgggaacgccgtattggatggccccagaagtaattttagccatggatgaaggacaatatgatggcaaagtagatgtgtggtctcttggaataacatgtattgaactagcggaaaggaagcctcctttatttaatatgaatgcaatgagtgccttatatcacatagcccaaaatgaatcccctacactacagtctaatgaatggtctgattattttcgcaactttgtagattcttgcctccagaaaatccctcaagatcgacctacatcagaggaacttttaaagcacatatttgttcttcgggagcgccctgaaaccgtgttaatagatctcattcagaggacaaaggatgcagtaagagagctggacaatctgcagtatcgaaagatgaagaaactccttttccaggaggcacataatggaccagcagtagaagcacaggaagaagaagaggaacaagatcatggtgttggccggacaggaacagttaatagtgttggaagtaatcaatccattcccagcatgtccatcagtgccagcagccaaagcagtagtgttaacagtcttccagatgtctcagatgacaagagtgagctagacatgatggagggagaccacacagtgatgtctaacagttctgttatccatttaaaaccagaggaagaaaattacagagaagagggagatcctagaacaagagcatcagatccacaatctccaccccaagtatctcgtcacaaatcacactatcgtaatcgagaacactttgctactatacggacagcatcactggttacgaggcaaatgcaagaacatgagcaggactctgagcttagagaacaaatgtctggctataagcgaatgaggcgacaacatcaaaagcaactgatgactctggaaaacaagctaaaggctgagatggatgaacatcgcctcagattagacaaagatcttgaaactcagcgtaacaattttgctgcagaaatggagaaacttatcaagaaacaccaggctgccatggagaaagaggctaaagtgatgtccaatgaagagaaaaaatttcagcaacatattcaggcccaacagaagaaagaactgaatagttttctcgagtcccagaaaagagagtataaacttcgaaaagagcagcttaaagaggagctaaatgaaaaccagagtacccccaaaaaagaaaaacaggagtggctttcaaagcagaaggagaatatacagcatttccaagcagaagaagaagctaaccttcttcgacgtcaaagacaatacctagagctggaatgccgtcgcttcaagagaagaatgttacttgggcgtcataacttagagcaggaccttgtcagggaggagttaaacaaaagacagactcagaaggacttagagcatgccatgctactccgacagcatgaatctatgcaagaactggagttccgccacctcaacacaattcagaagatgcgctgtgagttgatcagattacagcatcaaactgagctcactaaccagctggaatataataagcgaagagaacgagaactaagacgaaagcatgtcatggaagttcgacaacagcctaagagtttgaagtctaaagaactccaaataaaaaagcagtttcaggatacctgcaaaatccaaaccagacagtacaaagcattaagaaatcacctgctggagactacaccaaagagtgagcacaaagctgttctgaaacggctcaaggaggaacagacccggaaattagctatcttggctgagcagtatgatcacagcattaatgaaatgctctccacacaagccctgcgtttggatgaagcacaggaagcagagtgccaggttttgaagatgcagctgcagcaggaactggagctgttgaatgcgtatcagagcaaaatcaagatgcaagctgaggcacaacatgatcgagagcttcgcgagcttgaacagagggtctccctccggagggcactcttagaacaaaagattgaagaagagatgttggctttgcagaatgagcgcacagaacgaatacgaagcctgttggaacgtcaagccagagagattgaagcttttgactctgaaagcatgagactaggttttagtaatatggtcctttctaatctctcccctgaggcattcagccacagctacccgggagcttctggttggtcacacaaccctactgggggtccaggacctcactggggtcatcccatgggtggcccaccacaagcttggggccatccaatgcaaggtggaccccagccatggggtcacccttcagggccaatgcaaggggtacctcgaggtagcagtatgggagtccgcaatagcccccaggctctgaggcggacagcttctgggggacggacggagcagggcatgagcagaagcacgagtgtcacttcacaaatatccaatgggtcacacatgtcttatacataacttaataattgagagtggcaattccgctggagctgtctgccaaaagaaactgcctacagacatcatcacagcagcctcctcacttgggtactacagtgtggaagctgagtgcatatggtatattttattcatttttgtaaagcgttctgttttgtgtttactaattgggatgtcatagtacttggctgccgggtttgtttgtttttggggaaattttgaaaagtggagttgatattaaaaataaatgtgtatgtgtgtacatatatatacacacacatacacatatattatgcatgtggtgaaaagaattggctagataggggatttttctgaacactgcaaaaatagaacgtagcaaaatggcttcagttatcacttttgggtgtctgtatcctaagaagtttctgaaaagatctaaagcctttttatcccatatcccaaattcttatgagccactcacagcaggcagcatatgttgaaataagttattactggtacacacctgcattgcctcaccagtgtatttatttgttattaaattgatctgacttctcagcctcatttggactaaaaaaagaaagcagaaatccatgaacacattgcttctcggccttttggctaagatcaagtgtagaaatccatgaacactaaaggacttcattgattttttcagagagtagaaaacaacttagtttttcttttttcctgaatgcgtcataggcttgtgagtgatttttgtccattcaattgtgccttctttgtattatgataagatgggggtacttaaggagatcacaagttgtgtgaggattgcattaacaaacctatgagccttcaatggggaagaccagaagggtgagaggggccctgaaagttcatatggtgggtatgtcccgcagcagagtgaggagatgaagcttacgtgtcctgacgttttgttgcttatactgtgatatctcatcctagctaagctctataatgcccaagaccccaaacagtacttttactttgtttgtacaaaaacaaagacatatagccaatacaaatcaaatgccggaggtgtttgatgccatatttgcaaattgccatctattgaaattctcgtcacactacatagacataattgttatctccttttggcttatgtgattttctgtttacaagtagaatagccaattatttaaatgtttagttgccacagtgaaccaggagtcactgagccaatgactttaccagctgctgactaatcttcatcaccactgtagattttgctgcatgtgcaggtcctctatttttaattgctgttttcgttgctgcagtactttacaaacttctagttcgttgagacttagtgaccatttggcatcaagttaacatcacacaataggaaacaccacttccacaagtctcaagcctcagtgctaaagtactactgaaaaggaactaggaagtttggccaatt

SEQ ID NO: 56455 - DNA, 2222 bp, Homo Sapiens; identical to SEQ ID NO: 27873

SEQ ID NO: 56456 - DNA, 1466 bp, Homo Sapiens
ggctcagcgacgccacggccagcagcgctcgcgtcctccccagcaacagttactcaaagctaatcagatagcgaaagaagcaggagagcaagtcaagaaatacggtgaagagtccttcccaaagttgtctaggtccttccgcgccggtgcctggtcttcgtcgtcaacaccatggacagctcccgggaaccgactctggggcgcttggacgccgctggcttctggcaggtctggcagcgctttgatgcggatgaaaaaggttacatagaagagaaggaactcgatgctttctttctccacatgttgatgaaactgggtactgatgacacggtcatgaaagcaaatttgcacaaggtgaaacagcagtttatgactacccaagatgcctctaaagatggtcgcattcggatgaaagagcttgctggtatgttcttatctgaggatgaaaactttcttctgctctttcgccgggaaaacccactggacagcagcgtggagtttatgcagatttggcgcaaatatgacgctgacagcagtggctttatatcagctgctgagctccgcaacttcctccgagacctctttcttcaccacaaaaaggccatttctgaggctaaactggaagaatacactggcaccatgatgaagatttttgacagaaataaagatggtcggttggatctaaatgacttagcaaggattctggctcttcaggaaaacttccttctccaatttaaaatggatgcttgttctactgaagaaaggaaaagggactttgagaaaatctttgcctactatgatgttagtaaaacaggagccctggaaggcccagaagtggatgggtttgtcaaagacatgatggagcttgtccagcccagcatcagcggggtggaccttgataagttccgcgagattctcctgcgtcactgcgacgtgaacaaggatggaaaaattcagaagtctgagctggctttgtgtcttgggctgaaaatcaacccataatcccagactgctttgccttttgctcttactatgtttctgtgatcttgctggtagaattgtatctgtgcattgatgttgggaacacagtgggcaaactcacaaatggtgtgctattcttgggcaagaagagggacgctagggccttccttccaccggcgtgatctatccctgtctcactgaaagcccctgtgtagtgtctgtgttgttttcccttgaccctgggctttcctatcctcccaaagactcagctcccctgttagatggctctgcctgtccttccccagtcaccagggtgggggggacaggggcagctgagtgcattcattttgtgcttttcttatgggctttctgcttagtctgaaaggtgtgtggcattcatggcaatcctgtaacttcaacatagattttttttgtgtgtgtggaaataaatctgcaattggaaacaaaaaaaaaaaaaaaaaaaa

SEQ ID NO: 56457 - DNA, 2471 bp, Homo Sapiens
agaaagcgagcagccacccagctccccgccaccgccatggtccccgacaccgcctgcgttcttctgctcaccctggctgccctcggcgcgtccggacagggccagagcccgttgggctcagacctgggcccgcagatgcttcgggaactgcaggaaaccaacgcggcgctgcaggacgtgcgggagctgctgcggcagcaggtcagggagatcacgttcctgaaaaacacggtgatggagtgtgacgcgtgcgggatgcagcagtcagtacgcaccggcctacccagcgtgcggcccctgctccactgcgcgcccggcttctgcttccccggcgtggcctgcatccagacggagagcggcgcgcgctgcggcccctgccccgcgggcttcacgggcaacggctcgcactgcaccgacgtcaacgagtgcaacgcccacccctgcttcccccgagtccgctgtatcaacaccagcccggggttccgctgcgaggcttgcccgccggggtacagcggccccacccaccagggcgtggggctggctttcgccaaggccaacaagcaggtttgcacggacatcaacgagtgtgagaccgggcaacataactgcgtccccaactccgtgtgcatcaacacccggggctccttccagtgcggcccgtgccagcccggcttcgtgggcgaccaggcgtccggctgccagcggcgcgcacagcgcttctgccccgacggctcgcccagcgagtgccacgagcatgcagactgcgtcctagagcgcgatggctcgcggtcgtgcgtgtgtgccgttggctgggccggcaacgggatcctctgtggtcgcgacactgacctagacggcttcccggacgagaagctgcgctgcccggagcgccagtgccgtaaggacaactgcgtgactgtgcccaactcagggcaggaggatgtggaccgcgatggcatcggagacgcctgcgatccggatgccgacggggacggggtccccaatgaaaaggacaactgcccgctggtgcggaacccagaccagcgcaacacggacgaggacaagtggggcgatgcgtgcgacaactgccggtcccagaagaacgacgaccaaaaggacacagaccaggacggccggggcgatgcgtgcgacgacgacatcgacggcgaccggatccgcaaccaggccgacaactgccctagggtacccaactcagaccagaaggacagtgatggcgatggtataggggatgcctgtgacaactgtccccagaagagcaacccggatcaggcggatgtggaccacgactttgtgggagatgcttgtgacagcgatcaagaccaggatggagacggacatcaggactctcgggacaactgtcccacggtgcctaacagtgcccaggaggactcagaccacgatggccagggtgatgcctgcgacgacgacgacgacaatgacggagtccctgacagtcgggacaactgccgcctggtgcctaaccccggccaggaggacgcggacagggacggcgtgggcgacgtgtgccaggacgactttgatgcagacaaggtggtagacaagatcgacgtgtgtccggagaacgctgaagtcacgctcaccgacttcagggccttccagacagtcgtgctggacccggagggtgacgcgcagattgaccccaactgggtggtgctcaaccagggaagggagatcgtgcagacaatgaacagcgacccaggcctggctgtgggttacactgccttcaatggcgtggacttcgagggcacgttccatgtgaacacggtcacggatgacgactatgcgggcttcatctttggctaccaggacagctccagcttctacgtggtcatgtggaagcagatggagcaaacgtattggcaggcgaaccccttccgtgctgtggccgagcctggcatccaactcaaggctgtgaagtcttccacaggccccggggaacagctgcggaacgctctgtggcatacaggagacacagagtcccaggtgcggctgctgtggaaggacccgcgaaacgtgggttggaaggacaagaagtcctatcgttggttcctgcagcaccggccccaagtgggctacatcagggtgcgattctatgagggccctgagctggtggccgacagcaacgtggtcttggacacaaccatgcggggtggccgcctgggggtcttctgcttctcccaggagaacatcatctgggccaacctgcgttaccgctgcaatgacaccatcccagaggactatgagacccatcagctgcggcaagcctagggaccagggtgaggacccgccggatgacagccaccctcaccgcggctggatgggggctctgcacccagccccaaggggtggccgtcctgagggggaagtgagaagggctcagagaggacaaaataaagtgtgtgtgcagggaaaaaaaaaaaaaaaaaaaa

SEQ ID NO: 56458 - DNA, 8595 bp, Homo Sapiens
ggaatcggacgccccaggcatatacaagctgagtttcagccatggaaaaactccatgggcatgtgtctgcccatccagacatcctctccttggagaaccggtgcctggctatgctccctgacttacagcccttggagaaactacatcagcatgtatctacccactcagatatcctctccttgaagaaccagtgcctagccacgcttcctgacctgaagaccatggaaaaaccacatggatatgtgtctgcccacccagacatcctctccttggagaaccagtgcctggccacactttctgacctgaagaccatggagaaaccacatggacatgtttctgcccacccagacatcctctccttggagaaccggtgcctggccaccctctctagtctaaagagcactgtgtctgccagccccttgttccagagtctacagatatctcacatgacgcaagctgatttgtaccgtgtgaacaacagcaattgcctgctctctgagcctccaagttggagggctcagcatttctctaagggactagacctttcaacctgccctatagccctgaaatccatctctgccacagagacagctcaggaagcaactttgggtcgttggtttgattcagaagagaagaaaggggcagagacccaaatgccttcttatagtctgagcttgggagaggaggaggaggtggaggatctggccgtgaagctcacctctggagactctgaatctcatccagagcctactgaccatgtccttcaggaaaagaagatggctctactgagcttgctgtgctctactctggtctcagaagtaaacatgaacaatacatctgaccccaccctggctgccatttttgaaatctgtcgtgaacttgccctcctggagcctgagtttatcctcaaggcatctttgtatgccaggcagcagctgaacgtccggaatgtggccaataacatcttggccattgctgctttcttgccggcgtgtcgcccccacctgcgacgatatttctgtgccattgtccagctgccttctgactggatccaggtggctgagctttaccagagcctggctgagggagataagaataagctggtgcccctgcccgcctgtctccgtactgccatgacggacaaatttgcccagtttgacgagtaccagctggctaagtacaaccctcggaagcaccgggccaagagacacccccgccggccaccccgctctccagggatggagcctccattttctcacagatgttttccaaggtacatagggtttctcagagaagagcagagaaagtttgagaaggccggtgatacagtgtcagagaaaaagaatcctccaaggttcaccctgaagaagctggttcagcgactgcacatccacaagcctgcccagcacgttcaagccctgctgggttacagatacccctccaacctacagctcttttctcgaagtcgccttcctgggccttgggattctagcagagctgggaagaggatgaagctgtctaggccagagacctgggagcgggagctgagcctacgggggaacaaagcgtcggtctgggaggaactcattgaaaatgggaagcttcccttcatggccatgcttcggaacctgtgcaacctgctgcgggttggaatcagttcccgccaccatgagctcattctccagagactccagcatgcgaagtcggtgatccacagtcggcagtttccattcagatttcttaacgcccatgatgccattgatgccctcgaggctcaactcagaaatcaagcattgccctttccttcgaatataacactgatgaggcggatactaactagaaatgaaaagaaccgtcccaggcggaggtttctttgccacctaagccgtcagcagcttcggatggcaatgaggatacctgtgttgtatgagcagctcaagagggagaagctgagagtacacaaggccagacagtggaaatatgatggtgagatgctgaacaggtaccgacaggccctagagacagctgtgaacctctctgtgaagcacagcctgcccctgctgccaggccgcactgtcttggtctatctgacagatgctaatgcagacaggctctgtccaaagagcaacccacaagggcccccgctgaactatgcactgctgttgattgggatgatgatcacgagggcggagcaggtggacgtcgtgctgtgtggaggtgacactctgaagactgcagtgcttaaggcagaagaaggcatcctgaagactgccatcaagctccaggctcaagtccaggagtttgatgaaaatgatggatggtccctgaatacttttgggaaatacctgctgtctctggctggccaaagggttcctgtggacagggtcatcctccttggccaaagcatggatgatggaatgataaatgtggccaaacagctttactggcagcgtgtgaattccaagtgcctctttgttggtatcctcctaagaagggtacaatacctgtcaacagatttgaatcccaatgatgtgacactctcaggctgtactgatgcgatactgaagttcattgcagagcatggggcctcccatcttctggaacatgtgggccaaatggacaaaatattcaagattccaccacccccaggaaagacaggggtccagtctctccggccactggaagaggacactccaagccccttggctcctgtttcccagcaaggatggcgcagcatccggcttttcatttcatccactttccgagacatgcatggggagcgggacctgctgctgaggtctgtgctgccagcactgcaggcccgagcggcccctcaccgtatcagccttcacggaatcgacctccgctggggcgtcactgaggaggagacccgtaggaacagacaactggaagtgtgccttggggaggtggagaacgcacagctgtttgtggggattctgggctcccgttatggatacattccccccagctacaaccttcctgaccatccacacttccactgggcccagcagtacccttcagggcgctctgtgacagagatggaggtgatgcagttcctgaaccggaaccaacgtctgcagccctctgcccaagctctcatctacttccgggattccagcttcctcagctctgtgccagatgcctggaaatctgactttgtttctgagtctgaagaggccgcacgtcggatctcagaactgaagagctacctaagcagacagaaagggatcacctgccgcagatacccctgtgagtgggggggtgtggcagctggccggccctatgttggcgggctggaggagtttgggcagttggttctgcaggatgtatggaatatgatccagaagctctacctgcagcctggggccctgctggagcagccagtgtccatcccagacgatgacttggtccaggccaccttccagcagctgcagaagccaccgagtcctgcccggccacgccttcttcaggacacagtgcaacggctgatgctgccccacggaaggctgagcctggtgacggggcagtcaggacagggcaagacagccttcctggcatctcttgtgtcagccctgcaggctcctgatggggccaaggtggcatcattagtcttcttccacttttctggggctcgtcctgaccagggtcttgccctcactctgctcagacgcctctgtacctatctgcgtggccaactaaaagagccaggtgccctccccagcacctaccgaagcctggtgtgggagctgcagcagaggctgctgcccaagtctgctgagtccctgcatcctggccagacccaggtcctgatcatcgatggggctgataggttagtggaccagaatgggcagctgatttcagactggatcccaaagaagcttccccggtgtgtacacctggtgctgagtgtgtctagtgatgcaggcctaggggagacccttgagcagagccagggtgcccacgtgctggccttggggcctctggaggcctctgctcgggcccggctggtgagagaggagctggccctgtacgggaagcggctggaggagtcaccatttaacaaccagatgcgactgctgctggtgaagcgggaatcaggccggccgctctacctgcgcttggtcaccgatcacctgaggctcttcacgctgtatgagcaggtgtctgagagactccggaccctgcctgccactgtccccctgctgctgcagcacatcctgagcacactggagaaggagcacgggcctgatgtccttccccaggccttgactgccctagaagtcacacggagtggtttgactgtggaccagctgcacggagtgctgagtgtgtggcggacactaccgaaggggactaagagctgggaagaagcagtggctgctggtaacagtggagacccctaccccatgggcccgtttgcctgcctcgtccagagtctgcgcagtttgctaggggagggccctctggagcgccctggtgcccggctgtgcctccctgatgggcccctgagaacagcagctaaacgttgctatgggaagaggccagggctagaggacacggcacacatcctcattgcagctcagctctggaagacatgtgacgctgatgcctcaggcaccttccgaagttgccctcctgaggctctgggagacctgccttaccacctgctccagagcgggaaccgtggacttctttcgaagttccttaccaacctccatgtggtggctgcacacttggaattgggtctggtctctcggctcttggaggcccatgccctctatgcttcttcagtccccaaagaggaacaaaagctccccgaggctgacgttgcagtgtttcgcaccttcctgaggcagcaggcttcaatcctcagccagtacccccggctcctgccccagcaggcagccaaccagcccctggactcacctctttgccaccaagcctcgctgctctcccggagatggcacctccaacacacactacgatggcttaataaaccccggaccatgaaaaatcagcaaagctccagcctgtctctggcagtttcctcatcccctactgctgtggccttctccaccaatgggcaaagagcagctgtgggcactgccaatgggacagtttacctgttggacctgagaacttggcaggaggagaagtctgtggtgagtggctgtgatggaatctctgcttgtttgttcctctccgatgatacactctttcttactgccttcgacgggctcctggagctctgggacctgcagcatggttgtcgggtgctgcagactaaggctcaccagtaccaaatcactggctgctgcctgagcccagactgccggctgctagccaccgtgtgcttgggaggatgcctaaagctgtgggacacagtccgtgggcagctggccttccagcacacctaccccaagtccctgaactgtgttgccttccacccagaggggcaggtaatagccacaggcagctgggctggcagcatcagcttcttccaggtggatgggctcaaagtcaccaaggacctgggggcacccggagcctctatccgtaccttggccttcaatgtgcctgggggggttgtggctgtgggccggctggacagtatggtggagctgtgggcctggcgagaaggggcacggctggctgccttccctgcccaccatggctttgttgctgctgcgcttttcctgcatgcgggttgccagttactgacggctggagaggatggcaaggttcaggtgtggtcagggtctctgggtcggccccgtgggcacctgggttccctttctctctctcctgccctctctgtggcactcagcccagatggtgatcgggtggctgttggatatcgagcggatggcattaggatctacaaaatctcttcaggttcccagggggctcagggtcaggcactggatgtggcagtgtccgccctggcctggctaagccccaaggtattggtgagtggtgcagaagatgggtccttgcagggctgggcactcaaggaatgctcccttcagtccctctggctcctgtccagattccagaagcctgtgctaggactggccacttcccaggagctcttggcttctgcctcagaggatttcacagtgcagctgtggccaaggcagctgctgacgcggccacacaaggcagaagactttccctgtggcactgagctgcggggacatgagggccctgtgagctgctgtagtttcagcactgatggaggcagcctggccaccgggggccgggatcggagtctcctctgctgggacgtgaggacacccaaaacccctgttttgatccactccttccctgcctgtcaccgtgactgggtcactggctgtgcctggaccaaagataacctactgatatcctgctccagtgatggctctgtggggctctgggacccagagtcaggacagcggcttggtcagttcctgggtcatcagagtgctgtgagcgctgtggcagctgtggaggagcacgtggtgtctgtgagccgggatgggaccttgaaagtgtgggaccatcaaggcgtggagctgaccagcatccctgctcactcaggacccattagccactgtgcagctgccatggagccccgtgcagctggacagcctgggtcagagcttctggtggtaaccgtcgggctagatggggccacacggttatggcatccactcttggtgtgccaaacccacaccctcctgggacacagcggcccagtccgtgctgctgctgtttcagaaacctcaggcctcatgctgaccgcctctgaggatggttctgtacggctctggcaggttcctaaggaagcagatgacacatgtataccaaggagttctgcagccgtcactgctgtggcttgggcaccagatggttccatggcagtatctggaaatcaagctggggaactaatcttgtggcaggaagctaaggctgtggccacagcacaggctccaggccacattggtgctctgatctggtcctcggcacacaccttttttgtcctcagtgctgatgagaaaatcagcgagtggcaagtgaaactgcggaagggttcggcacccggaaatttgagtcttcacctgaaccgaattctacaggaggacttaggggtgctgacaagtctggattgggctcctgatggtcactttctcatcttggccaaagcagatttgaagttactttgcatgaagccaggggatgctccatctgaaatctggagcagctatacagaaaatcctatgatattgtccacccacaaggagtatggcatatttgtcctgcagcccaaggatcctggagttctttctttcttgaggcaaaaggaatcaggagagtttgaagagaggctgaactttgatataaacttagagaatcctagtaggaccctaatatcgataactcaagccaaacctgaatctgagtcctcatttttgtgtgccagctctgatgggatcctatggaacctggccaaatgcagcccagaaggagaatggaccacaggtaacatgtggcagaaaaaagcaaacactccagaaacccaaactccagggacagacccatctacctgcagggaatctgatgccagcatggatagtgatgccagcatggatagtgagccaacaccacatctaaagacacggcagcgtagaaagattcactcgggctctgtcacagccctccatgtgctacctgagttgctggtgacagcttcgaaggacagagatgttaagctatgggagagacccagtatgcagctgctgggcctgttccgatgcgaagggtcagtgagctgcctggaaccttggctgggcgctaactccaccctgcagcttgccgtgggagacgtgcagggcaatgtgtactttctgaattgggaatgaagatgtgccactcgggaataatgataccccttgtgctagagatgcaaagcctgaagacactggtagcttttaataattataaaattaataatttcttgataattataaaaatgaagtgtcaaaaaatctcaagtgtaggcctgcctgtgttctcatgtggatttagaacaggaggatattctatgtgtatgtatatgtacattctaatgtgtgtctcttcttattcaacattaatccttactagaaccacaagaaagtgaatgaaatctttagtaggtactcttttgaaactaggttttagaattcttgcatcactcgcgggccctaggaccctaggatgccattcttgccaggaggaggaatgagagtgatgttggccaacattcaatttgaacagagcatggaagacctttcagttcatcgggaaagaatgagggagggagaataagtcagtcatgcatcagggcatttagaaagagctatgtttctgtcacagagacagcccttttctcagaactacccagaggaggccgggcatggtggctcacgcttgtaatcccagcactttgggaggccgaggtgggcagatcacgaggtcaggagatcaagaccatcctggctaacatagtgaaaccctgtctctactaaaaaatacaaaaagttagccagg

SEQ ID NO: 56459 - DNA, 2599 bp, Homo Sapiens; identical to SEQ ID NO: 26387

SEQ ID NO: 56460 - DNA, 1567 bp, Homo Sapiens
tcctgggcctctcaaagtctgagccccgctccgctgatgcctgtctgcagaatccgcaccaaccagcaccatgcccatgactctggggtactgggacatccgtgggctggcccacgccatccgcttgctcctggaatacacagactcaagctatgtggaaaagaagtacacgctgggggacgctcctgactatgacagaagccagtggctgaatgaaaaattcaagctgggcctggactttcccaatctgccctacttgattgatggggctcacaagatcacccagagcaatgccatcctgcgctacattgcccgcaagcacaacctgtgtggggagacagaagaggagaagattcgtgtggacattttggagaaccaggttatggataaccacatggagctggtcagactgtgctatgacccagattttgagaaactgaagccaaaatacttggaggaactccctgaaaagctaaagctctactcagagtttctggggaagcggccatggtttgcaggagacaagatcacctttgtggatttccttgcctatgatgtccttgacatgaagcgtatatttgagcccaagtgcttggacgccttcctaaacttgaaggacttcatctcccgctttgagggtttgaagaagatctctgcctacatgaagtccagccaattcctccgaggtcttttgtttggaaagtcagctacatggaacagcaaatagggcccagtgatgccagaagatgggagggaggagccaaccttgctgcctgcgaccctggaggacagcctgactccctggacctgccttcttcctttttccttctttctactctcttctcttccccaaggcctcattggcttcctttcttctaacatcatccctccccgcatcgaggctctttaaagcttcagctccccactgtcctccatcaaagtccccctcctaacgtcttcctttccctgcactaacgccaacctgactgcttttcctgtcagtgcttttctcttctttgagaagccagactgatctctgagctccctagcactgtcctcaaagaccatctgtatgccctgctccctttgctgggtccctaccccagctccgtgtgatgcccagtaaagcctgaaccatgcctgccatgtcttgtcttattccctgaggctcccttgactcaggactgtgctcgaattgtgggtggttttttgtcttctgttgtccacagccagagcttagtggatgggtgtgtgtgtgtgtgtgttgggggtggtgatcaggcaggttcataaatttccttggtcatttctgccctctagccacatccctctgttcctcactgtggggattactacagaaaggtgctctgtgccaagttcctcactcattcgcgctcctgtaggccgtctagaactggcatggttcaaagaggggctaggctgatggggaagggggctgagcagctcccaggcagactgccttctttcaccctgtcctgatagacttccctgatctagatatccttcgtcatgacacttctcaataaaacgtatcccaccgtattgt

SEQ ID NO: 56461 - DNA, 9030 bp, Homo Sapiens
gcttagtgctgagcacatccagtgggtaaagttccttaaaatgctctgcaaagaaattgggacttttcattaaatcagaaattttacttttttcccctcctgggagctaaagatattttagagaagaattaaccttttgcttctccagttgaacatttgtagcaataagtcatgcaaatagagctctccacctgcttctttctgtgccttttgcgattctgctttagtgccaccagaagatactacctgggtgcagtggaactgtcatgggactatatgcaaagtgatctcggtgagctgcctgtggacgcaagatttcctcctagagtgccaaaatcttttccattcaacacctcagtcgtgtacaaaaagactctgtttgtagaattcacggatcaccttttcaacatcgctaagccaaggccaccctggatgggtctgctaggtcctaccatccaggctgaggtttatgatacagtggtcattacacttaagaacatggcttcccatcctgtcagtcttcatgctgttggtgtatcctactggaaagcttctgagggagctgaatatgatgatcagaccagtcaaagggagaaagaagatgataaagtcttccctggtggaagccatacatatgtctggcaggtcctgaaagagaatggtccaatggcctctgacccactgtgccttacctactcatatctttctcatgtggacctggtaaaagacttgaattcaggcctcattggagccctactagtatgtagagaagggagtctggccaaggaaaagacacagaccttgcacaaatttatactactttttgctgtatttgatgaagggaaaagttggcactcagaaacaaagaactccttgatgcaggatagggatgctgcatctgctcgggcctggcctaaaatgcacacagtcaatggttatgtaaacaggtctctgccaggtctgattggatgccacaggaaatcagtctattggcatgtgattggaatgggcaccactcctgaagtgcactcaatattcctcgaaggtcacacatttcttgtgaggaaccatcgccaggcgtccttggaaatctcgccaataactttccttactgctcaaacactcttgatggaccttggacagtttctactgttttgtcatatctcttcccaccaacatgatggcatggaagcttatgtcaaagtagacagctgtccagaggaaccccaactacgaatgaaaaataatgaagaagcggaagactatgatgatgatcttactgattctgaaatggatgtggtcaggtttgatgatgacaactctccttcctttatccaaattcgctcagttgccaagaagcatcctaaaacttgggtacattacattgctgctgaagaggaggactgggactatgctcccttagtcctcgcccccgatgacagaagttataaaagtcaatatttgaacaatggccctcagcggattggtaggaagtacaaaaaagtccgatttatggcatacacagatgaaacctttaagactcgtgaagctattcagcatgaatcaggaatcttgggacctttactttatggggaagttggagacacactgttgattatatttaagaatcaagcaagcagaccatataacatctaccctcacggaatcactgatgtccgtcctttgtattcaaggagattaccaaaaggtgtaaaacatttgaaggattttccaattctgccaggagaaatattcaaatataaatggacagtgactgtagaagatgggccaactaaatcagatcctcggtgcctgacccgctattactctagtttcgttaatatggagagagatctagcttcaggactcattggccctctcctcatctgctacaaagaatctgtagatcaaagaggaaaccagataatgtcagacaagaggaatgtcatcctgttttctgtatttgatgagaaccgaagctggtacctcacagagaatatacaacgctttctccccaatccagctggagtgcagcttgaggatccagagttccaagcctccaacatcatgcacagcatcaatggctatgtttttgatagtttgcagttgtcagtttgtttgcatgaggtggcatactggtacattctaagcattggagcacagactgacttcctttctgtcttcttctctggatataccttcaaacacaaaatggtctatgaagacacactcaccctattcccattctcaggagaaactgtcttcatgtcgatggaaaacccaggtctatggattctggggtgccacaactcagactttcggaacagaggcatgaccgccttactgaaggtttctagttgtgacaagaacactggtgattattacgaggacagttatgaagatatttcagcatacttgctgagtaaaaacaatgccattgaaccaagaagcttctcccagaattcaagacaccctagcactaggcaaaagcaatttaatgccaccacaattccagaaaatgacatagagaagactgacccttggtttgcacacagaacacctatgcctaaaatacaaaatgtctcctctagtgatttgttgatgctcttgcgacagagtcctactccacatgggctatccttatctgatctccaagaagccaaatatgagactttttctgatgatccatcacctggagcaatagacagtaataacagcctgtctgaaatgacacacttcaggccacagctccatcacagtggggacatggtatttacccctgagtcaggcctccaattaagattaaatgagaaactggggacaactgcagcaacagagttgaagaaacttgatttcaaagtttctagtacatcaaataatctgatttcaacaattccatcagacaatttggcagcaggtactgataatacaagttccttaggacccccaagtatgccagttcattatgatagtcaattagataccactctatttggcaaaaagtcatctccccttactgagtctggtggacctctgagcttgagtgaagaaaataatgattcaaagttgttagaatcaggtttaatgaatagccaagaaagttcatggggaaaaaatgtatcgtcaacagagagtggtaggttatttaaagggaaaagagctcatggacctgctttgttgactaaagataatgccttattcaaagttagcatctctttgttaaagacaaacaaaacttccaataattcagcaactaatagaaagactcacattgatggcccatcattattaattgagaatagtccatcagtctggcaaaatatattagaaagtgacactgagtttaaaaaagtgacacctttgattcatgacagaatgcttatggacaaaaatgctacagctttgaggctaaatcatatgtcaaataaaactacttcatcaaaaaacatggaaatggtccaacagaaaaaagagggccccattccaccagatgcacaaaatccagatatgtcgttctttaagatgctattcttgccagaatcagcaaggtggatacaaaggactcatggaaagaactctctgaactctgggcaaggccccagtccaaagcaattagtatccttaggaccagaaaaatctgtggaaggtcagaatttcttgtctgagaaaaacaaagtggtagtaggaaagggtgaatttacaaaggacgtaggactcaaagagatggtttttccaagcagcagaaacctatttcttactaacttggataatttacatgaaaataatacacacaatcaagaaaaaaaaattcaggaagaaatagaaaagaaggaaacattaatccaagagaatgtagttttgcctcagatacatacagtgactggcactaagaatttcatgaagaaccttttcttactgagcactaggcaaaatgtagaaggttcatatgacggggcatatgctccagtacttcaagattttaggtcattaaatgattcaacaaatagaacaaagaaacacacagctcatttctcaaaaaaaggggaggaagaaaacttggaaggcttgggaaatcaaaccaagcaaattgtagagaaatatgcatgcaccacaaggatatctcctaatacaagccagcagaattttgtcacgcaacgtagtaagagagctttgaaacaattcagactcccactagaagaaacagaacttgaaaaaaggataattgtggatgacacctcaacccagtggtccaaaaacatgaaacatttgaccccgagcaccctcacacagatagactacaatgagaaggagaaaggggccattactcagtctcccttatcagattgccttacgaggagtcatagcatccctcaagcaaatagatctccattacccattgcaaaggtatcatcatttccatctattagacctatatatctgaccagggtcctattccaagacaactcttctcatcttccagcagcatcttatagaaagaaagattctggggtccaagaaagcagtcatttcttacaaggagccaaaaaaaataacctttctttagccattctaaccttggagatgactggtgatcaaagagaggttggctccctggggacaagtgccacaaattcagtcacatacaagaaagttgagaacactgttctcccgaaaccagacttgcccaaaacatctggcaaagttgaattgcttccaaaagttcacatttatcagaaggacctattccctacggaaactagcaatgggtctcctggccatctggatctcgtggaagggagccttcttcagggaacagagggagcgattaagtggaatgaagcaaacagacctggaaaagttccctttctgagagtagcaacagaaagctctgcaaagactccctccaagctattggatcctcttgcttgggataaccactatggtactcagataccaaaagaagagtggaaatcccaagagaagtcaccagaaaaaacagcttttaagaaaaaggataccattttgtccctgaacgcttgtgaaagcaatcatgcaatagcagcaataaatgagggacaaaataagcccgaaatagaagtcacctgggcaaagcaaggtaggactgaaaggctgtgctctcaaaacccaccagtcttgaaacgccatcaacgggaaataactcgtactactcttcagtcagatcaagaggaaattgactatgatgataccatatcagttgaaatgaagaaggaagattttgacatttatgatgaggatgaaaatcagagcccccgcagctttcaaaagaaaacacgacactattttattgctgcagtggagaggctctgggattatgggatgagtagctccccacatgttctaagaaacagggctcagagtggcagtgtccctcagttcaagaaagttgttttccaggaatttactgatggctcctttactcagcccttataccgtggagaactaaatgaacatttgggactcctggggccatatataagagcagaagttgaagataatatcatggtaactttcagaaatcaggcctctcgtccctattccttctattctagccttatttcttatgaggaagatcagaggcaaggagcagaacctagaaaaaactttgtcaagcctaatgaaaccaaaacttacttttggaaagtgcaacatcatatggcacccactaaagatgagtttgactgcaaagcctgggcttatttctctgatgttgacctggaaaaagatgtgcactcaggcctgattggaccccttctggtctgccacactaacacactgaaccctgctcatgggagacaagtgacagtacaggaatttgctctgtttttcaccatctttgatgagaccaaaagctggtacttcactgaaaatatggaaagaaactgcagggctccctgcaatatccagatggaagatcccacttttaaagagaattatcgcttccatgcaatcaatggctacataatggatacactacctggcttagtaatggctcaggatcaaaggattcgatggtatctgctcagcatgggcagcaatgaaaacatccattctattcatttcagtggacatgtgttcactgtacgaaaaaaagaggagtataaaatggcactgtacaatctctatccaggtgtttttgagacagtggaaatgttaccatccaaagctggaatttggcgggtggaatgccttattggcgagcatctacatgctgggatgagcacactttttctggtgtacagcaataagtgtcagactcccctgggaatggcttctggacacattagagattttcagattacagcttcaggacaatatggacagtgggccccaaagctggccagacttcattattccggatcaatcaatgcctggagcaccaaggagcccttttcttggatcaaggtggatctgttggcaccaatgattattcacggcatcaagacccagggtgcccgtcagaagttctccagcctctacatctctcagtttatcatcatgtatagtcttgatgggaagaagtggcagacttatcgaggaaattccactggaaccttaatggtcttctttggcaatgtggattcatctgggataaaacacaatatttttaaccctccaattattgctcgatacatccgtttgcacccaactcattatagcattcgcagcactcttcgcatggagttgatgggctgtgatttaaatagttgcagcatgccattgggaatggagagtaaagcaatatcagatgcacagattactgcttcatcctactttaccaatatgtttgccacctggtctccttcaaaagctcgacttcacctccaagggaggagtaatgcctggagacctcaggtgaataatccaaaagagtggctgcaagtggacttccagaagacaatgaaagtcacaggagtaactactcagggagtaaaatctctgcttaccagcatgtatgtgaaggagttcctcatctccagcagtcaagatggccatcagtggactctcttttttcagaatggcaaagtaaaggtttttcagggaaatcaagactccttcacacctgtggtgaactctctagacccaccgttactgactcgctaccttcgaattcacccccagagttgggtgcaccagattgccctgaggatggaggttctgggctgcgaggcacaggacctctactgagggtggccactgcagcacctgccactgccgtcacctctccctcctcagctccagggcagtgtccctccctggcttgccttctacctttgtgctaaatcctagcagacactgccttgaagcctcctgaattaactatcatcagtcctgcatttctttggtggggggccaggagggtgcatccaatttaacttaactcttacctattttctgcagctgctcccagattactccttccttccaatataactaggcaaaaagaagtgaggagaaacctgcatgaaagcattcttccctgaaaagttaggcctctcagagtcaccacttcctctgttgtagaaaaactatgtgatgaaactttgaaaaagatatttatgatgttaacatttcaggttaagcctcatacgtttaaaataaaactctcagttgtttattatcctgatcaagcatggaacaaagcatgtttcaggatcagatcaatacaatcttggagtcaaaaggcaaatcatttggacaatctgcaaaatggagagaatacaataactactacagtaaagtctgtttctgcttccttacacatagatataattatgttatttagtcattatgaggggcacattcttatctccaaaactagcattcttaaactgagaattatagatggggttcaagaatccctaagtcccctgaaattatataaggcattctgtataaatgcaaatgtgcatttttctgacgagtgtccatagatataaagccatttggtcttaattctgaccaataaaaaaataagtcaggaggatgcaattgttgaaagctttgaaataaaataacaatgtcttcttgaaatttgtgatggccaagaaagaaaatgatgatgacattaggcttctaaaggacatacatttaatatttctgtggaaatatgaggaaaatccatggttatctgagataggagatacaaactttgtaattctaataatgcactcagtttactctctccctctactaatttcctgctgaaaataacacaacaaaaatgtaacaggggaaattatataccgtgactgaaaactagagtcctacttacatagttgaaatatcaaggaggtcagaagaaaattggactggtgaaaacagaaaaaacactccagtctgccatatcaccacacaataggatcccccttcttgccctccacccccataagattgtgaagggtttactgctccttccatctgcctgaccccttcactatgactacacagaatctcctgatagtaaagggggctggaggcaaggataagttatagagcagttggaggaagcatccaaagattgcaacccagggcaaatggaaaacaggagatcctaatatgaaagaaaaatggatcccaatctgagaaaaggcaaaagaatggctacttttttctatgctggagtattttctaataatcctgcttgacccttatctgacctctttggaaactataacatagctgtcacagtatagtcacaatccacaaatgatgcaggtgcaaatggtttatagccctgtgaagttcttaaagtttagaggctaacttacagaaatgaataagttgttttgttttatagcccggtagaggagttaaccccaaaggtgatatggttttatttcctgttatgtttaacttgataatcttattttggcattcttttcccattgactatatacatctctatttctcaaatgttcatggaactagctcttttattttcctgctggtttcttcagtaatgagttaaataaaacattgacacataca

SEQ ID NO: 56462 - DNA, 4823 bp, Homo Sapiens
agcgagtcctctcgcggccgcggcggcagcagcagcgccagccccagcaacactgaggccgccgccgccgcctggcgctcccgccgcccggcccgacatgagtgaggcggttcgggtaccctcgcccgccactccgctggtggtggcggcggccgcgcctgaggagaggaaagggaaggagtcagagcgcgagaagctgccgcccatcgtatcggcgggcgccggcgcgaccgcgggtttggacagaggagccaaaggccaaatttccactttcagcagttttatttcagctgttagcccgaagaaagaagctgctgaaaacagaagttcacctgcacatcttgttttccttaacatcaagaatgtgagagaaccaccaccaatttgccttgatgttagacaaaaacagcgtacatctatggatgcatcatcatccgaaatgaaggccccagtccttccagaacctattcttcctatccagcccaaaactgtgaaagactttcaggaagatgtagaaaaagttaagtcatcaggagattggaaagcagtacatgatttttatctaacaacgtttgattctttcccagaattaaatgctgcatttaagaaagatgccactgcctcatttaacaccattgaagactctgggattaatgctaaatttgtgaatgctgtgtatgataccttacttaatactcctcaagacgttcagaagacagtattaaagggaatcattaacagcctgttacgagaatggaaaggtccacgaacaaaagatgatcttagagcatattttatacttttacagaatcctcagtttaataacacatctacgtatgtcatctatgctcacttgctacgacagatagctaccttagtggaagctgaccatcatttcctagttcactggtttaaaaaattgtcccagaagaggttcaaacaattggtagagagattgctgcaatttatttctttacgcctgtttcctgcaaagcctgaagaatttccacctataacaaagtgttcctggtggattccatcagccgctaaagtgttggctttacttaatactgcaaacaatttagttcaccctccccttattccttatactgatttctataattctacattggatcacattgatctcatggaagaatatcatacttggcaaaactttggaaactctcacaggttttccttctgtcagtacccattcgttatttctgtagctgcaaaaaaaatcattattcagagagactcagagcaacagatgataaacatcgcaaggcaaagtctggtggataaagtatctcgaagacagagacctgatatgaatatattatttctaaatatgaaagtaagacggacacatctggttagcgattcacttgatgagctaacccggaaaagagccgatttgaaaaagaagttaaaagttacatttgtaggggaagctggtttggatatgggtggtttgactaaagaatggttccttcttctaattcgccaaatttttcatccagattatggcatgtttacatatcacaaggattcacactgccattggtttagcagctttaaatgtgataactattctgaattccgattggttggaattcttatgggactagctgtttataacagcatcaccttcgatattcgtttccctccctgctgttacaagaaattattgagccctcccatcattcctagtggtcaaaatataccagtaggcatctgcaatgttaccgtggacgacttatgtcaaattatgcctgagttggcccatggattaagtgaactcttatcacatgaaggcaatgttgaagaagatttctattcaacatttcaggtttttcaagaagaatttggaataatcaagtcctataatttaaagcccggtggtgataaaatttcagttaccaatcaaaatagaaaagaatatgtacagctttatactgacttccttctgaacaaatccatctataagcagtttgctgcattttattatggatttcatagtgtgtgtgcttcaaatgccctaatgctgcttcgtccagaagaggttgaaattttggtctgtggaagtcctgacctggatatgcatgctctgcagagaagtactcagtatgatggctatgcaaaaacggacttaactataaaatacttttgggatgttgtgcttggatttcctcttgatcttcaaaagaagttgctacattttactacagggagtgacagagtacctgtaggagggatggctgatttgaactttaaaatctcaaagaatgaaacttctactaactgcttacctgtggcccatacctgcttcaatcaactttgccttcccccctacaagagcaaaaaggatctgaaacagaaattgatcattggaatttcaaattcagaaggttttggacttgagtaacctagaagacttgaaatataatcttttatatgtagcattcacttccctcttactgtgcctttagccttttcatgtttctgtctcaaaacactttgacaaagctcaccaactttaaaatattaagtttttaaaaaatcaaatatgaagtatgttcagcaaaggcataattttctaaaaacacacacagaaatcgcttgagtgaggaaaagtccacatggcagagacaggtatggtccagttcctcttttatatagcactttatcattctccacaagtagtttgtcacaggcattccactgggaaagcaaagtacagtgaagaatgaatttatggtatagttgaacccagtggcagattgtacactgctagcactgctagcacacagtagcaaagcaaacagctacattatctttaacataaggcatgtagccatattttcatatagtggtatacaacacagtatcattgcaaatgcagtttacagggatttttgatatactggcttgggacctataagattcttctcagcagttgctgaaaagcatgtaaataactacataatagcctgagaataatgggattttgatagtgccatttattgttaaagatttatttttacaaagtaaattcagggttttagatgtgtacacagcttttacaaatcaataaagatgattgtacaagagtattttcagactaattggattcaaggttatattcttttaagtgttgttagtctgcatgcacattggcagtaaactagttacttgtgtactctgtaatatttgtataatgatcatttcttcttaaggctcaagatattagaaaagaaatcagacctaaataatcattgatgaagtatgtcagttacaagcacaaaagaatataactgcttttataaatcttttgaatcatgtacaagacttatatctacattttttgatcaccagttgtaccaaaacactaatttttgaaaaagataggttaaagtatttgacaaaagtgaatacaataataacacttgtgtcaaaatgatatagcttagtataaaaataaaattcaacgttttggccaaaatgtttgtttttcactggattctgaatataataaattcaaagtaccctttttttagagtttctaataaagtagtatgtaaaaagaaactgcattttaagtcagacagtaaatgttttttttaatttacagcaaatgaagcagttttattagcatgttacaaatattgccaaaccaagacttctctaccatactttaacagctttccttcagaaaactctgaagttatatttgcaataataatgaaaccagcatttagtaccagcatatggttcatatgcaaataatactttccccaaaatctttctgggctaggctattttcttgctatgcttcctgcacccaaccagcagaattcttccagggtggaggaactaatcagcttgttctccaacagttctgaagccaacccacaaatctttgaggaaaaggggtcactttgtttactattctcttggagatggaagtgattctgctcttccatttgggtatattatttcaagggtatttcttcttaaaaatcttggaaagcctaagagagttaaaggcatcctggttttgtttcattttgctctgttttaaatccatatgcaaataaaactgcttctctcttacactgcttgaactagaaaatcagctttttaatgtaggttaccacttataagcacaaaagaaacatgtataagaaaccagatttaagtgttttaaataaaatgtaaacagtttttatttggtagagatgactcatggaaaaattgtgttggcttggtctgcatgtttaatgatgtgcttgtatatcgattagctgtgtcacttttaaataagaagtccacacaagcaagccaaatttttagatgacgaagtccataaataactagagaatttttgttatctgttgttaagttgaaatgtataatcatttatcactaaattgcacattgcctttatttatttgtgctctgtttttggtttacagtgtaataatacctcatttaaaaaataaaaaccactactgttacattttattaatttaaaaagctagaaaattcatgtagttactttttttacatatataatctgttaatgaattattgatttttgtatctgccacagtaaattaaagcattacacagtatttatcagtattttttaaacatcctgtccttttttaaaatctttgcttagtcagtcatatttttgtctgtatgattagaagtttttacgtccttccttttttgtacaaatctgtattgtattaatttctggatgcaatttttcaaatattaaaattatacagtcagtcagaaaaaaaaaaaaaaaa

SEQ ID NO: 56463 - DNA, 3480 bp, Homo Sapiens
atagagaagaacggaggtacggcctgtggtcatggcgctgttcccagcctttgcggggcttagtgaggctcccgatggcgggagctccaggaaagtcaaggaaataatgctgcagctgatactggacatcgctttgtttggcttgaggacattcaggctgtgacgggagaaaccttcagaacagataagaaaccagatcctgcgaactgggagtacaagtctctctaccgaggggatatagcaagatacaagaggaaaggagactcctgccttggcattaaccctaagaagcagtgcatatcttgggaagggacttccacagagaagaagcattcacgcaagcaggttgaacgctattttactaagaagagtgtgggattaatgaacatcgatggagttgccattagcagtaaaactgaacctccctcatctgagcccatctcctttataccagtgaaggacttggaagatgcggctcctgttacaacctggttgaatcctctggggatttatgatcagtcaaccacacattggctacaaggacagggtcctccagagcaggaatcaaagcagccagacgcacagccagacagcgagagtgcggctctcaaggccaaggtggaggagtttaacaggagggtgcgggagaatcctcgggatacgcagctgtggatggcatttgttgcttttcaggacgaggtcatgaaaagtcctggcctgtatgccatcgaggaaggagagcaggaaaagcgaaagaggtccctgaagctcattctggagaagaagctggccattctggagcgggccattgagagcaaccagagcagtgtggatctgaaactggccaagctgaagctctgcacagagttctgggagccctccactctggtcaaagagtggcagaaactgatatttttgcatcccaataatacagccctttggcagaaataccttttattttgccagagccagtttagtaccttttcgatatcaaaaattcacagtctttatggaaaatgcttgagcactttgtctgctgttaaggacggcagcatcttatctcaccctgcgttgcctggcacggaagaggccatgtttgcactctttcttcagcagtgccactttctgcggcaggctggccactctgagaaggccatctcattgttccaggccatggtggacttcaccttcttcaaacccgacagcgtgaaagatctgcctaccaaaggacaggtggaattctttgaacccttttgggacagtggagagccccgggctggggagaagggagcccgaggctggaaggcgtggatgcaccagcaggaacgaggtggctgggtggtcatcaacccagatgaggatgacgatgaaccagaagaggatgaccaggaaataaaagataagactctgcccaggtggcagatctggcttgctgctgagcgttcccgtgaccagaggcactggcggccctggcgccctgataagaccaagaagcaaaccgaggaagactgtgaggatcccgagagacaggtgttgtttgatgatattgggcaatctttgatcagactttccagccatgatcttcagttccagctggtggaggccttcctgcagttcttgggtgtgccttctggctttactcctccagcctcctgtctttatctggccatggatgagaacagcatctttgataatggactttatgatgaaaagcccttgacttttttcaaccctttgttttctggggctagctgtgttggccgcatggataggttgggctatcctcgctggaccaggggtcagaaccgagagggcgaggagttcatccgcaatgtcttccaccttgtcatgcctttattttcaggcaaagagaagtcccagctctgcttctcctggttacagtatgagattgcaaaggtcatttggtgcctgcacactaaaaacaagaagagattaaagtctcaagggaagaactgcaaaaaactagccaagaatctccttaaggagccagaaaactgcaacaacttttgcctgtggaagcagtatgcacatctggagtggttgcttggcaacacggaggatgccagaaaagtttttgacacagcacttggcatggcaggaagcagagaactgaaagactctgacctctgtgagctcagtctgctctatgctgagctggaggtggagctgtcgccagaagtgagaagggctgccacagctcgagctgttcacatattaaccaagctgactgagagcagcccctatgggccctacactggacaggtgttggctgttcacattttgaaagcgcgaaaggcttatgagcacgcactgcaggactgtttgggtgacagctgtgtctccaatccagctcccaccgattcctgtagccgcctaattagcctggctaaatgcttcatgctcttccagtatttgaccatagggattgatgctgctgtgcagatatacgaacaggtgtttgcaaaactgaacagttctgttttcccagaaggctctggcgagggggacagtgccagctcccagagttggaccagtgttctcgaagccatcacactgatgcacacgagcctgctgagattccacatgaaagtgagtgtttacccgctggcccctctgcgagaggcactctcacaggctttaaagttgtatccaggcaaccaggttctttggaggtcctatgtacagattcagaataagtcccacagtgccagcaaaaccaggagattttttgacacaatcaccaggtctgccaaacccttggagccttggttgtttgcaattgaagctgagaaactgaggaagagactggtggaaactgtccagaggttagacggtagagagatccacgccacaattcctgagaccggcttaatgcatcggatccaagccctgtttgaaaatgccatgcgcagcgacagtggcagccagtgccccttgctgtggaggatgtatttgaactttctggtttccttaggaaataaagaaagaagcaaaggtgtattctacaaagcacttcagaattgcccttgggcaaaggtgttgtacctggacgccgtggagtatttccccgatgagatgcaggagatcctggacctgatgactgagaaggagctccgggtgcgcctgccgctggaggagctggagctgctgctggaggattagagagcagcgggaaaacgggctgtgcctgcgaggccaagttgcccaccctgcggagctaggaggcgcgagcagagaacgtgtgtgttaggagaactcggcttttgaaatgttctttctcgatagtaataatgtgggctgccagcctctcacatcttgcacactttttgggtgtgtaaatgacacaaaagttatttacatattatatatgtgaatatgtgtatatatgtacatagccagagagtcatgccacgtggtcattaaaccgatgatgattgaggcgtgaaaaaaaaaaaaaaa

SEQ ID NO: 56464 - DNA, 5099 bp, Homo Sapiens
ggagctcggttggccttgggtgggtctagacagccgcggcggctgcggcgccgatagtgacagtgagtgcgtgagacccggagagaaatggcgatggcgatgtcggacagtggggcgagccgcctgcgtcggcagctggagtcagggggttttgaggcgcggctgtacgtgaagcagctctcgcagcagtcggatggggaccgggacctccaggagcaccggcagcgcatccaggcgctggcggaggagacggcgcagaacctgaagcgcaacgtctaccagaactaccggcagttcatagagacggcccgcgagatctcctacctggagagcgagatgtaccagctcagccatttgctgaccgagcagaaaagcagcctggagagcatcccgcttacgttgctgcctgccgctgctgccgccggagccgccgccgcctctggaggggaggagggagtcggtggggcggggggccgagaccacctccgaggccaggccggctttttctccacccccgggggtgcctcccgcgacggctccggtccaggcgaggaaggaaagcagcgcactctcaccaccctgcttgagaaggtggaaggctgcaggcatctgctggagacgccgggacagtacttggtgtacaatggggacctagtggaatacgatgcggaccacatggcccaactgcagcgggtgcacggctttctcatgaacgattgcttgttggtggctacctggctgcctcagcggcgtgggatgtatcgctacaacgctctctattccctagatggtttggccgtagtcaatgtcaaggacaacccgcccatgaaggacatgttcaagctgcttatgttccccgagagccgtattttccaggccgaaaatgctaaaatcaaacgagagtggctggaagtgctggaggacaccaagagggccctcagtgagaaaaggcgaagggagcaggaggaggcagcggcccctcgagggccaccccaagtgacttccaaggccactaacccatttgaggatgacgaagaagaagaaccagctgttcctgaggtagaggaagagaaggtggacctctccatggaatggatccaggagttacctgaagacctggatgtctgcattgcgcagagagactttgaaggggcggttgacctgctggataaattgaaccattacctggaagataaacctagcccacctcctgtaaaagaactaagggccaaagtggaggagcgagttcgacagctcactgaggtgctagttttcgaactctccccagatcgttccctgagaggtggtccgaaggctactcgcagagcagtttcgcaactgatccggctgggccagtgcacgaaggcctgtgagctatttttgagaaacagggcagccgctgttcatactgcaattcgtcagcttcgcatcgaaggtgccactttactctatattcataagctgtgccatgtcttctttaccagccttctcgagactgcaagagaatttgagatcgattttgcaggcactgacagcggctgctactctgcctttgtggtctgggcaagatcagccatgggcatgttcgtggatgcttttagcaagcaggtgtttgatagtaaggagagcctctctacagcagctgagtgtgtaaaagtggctaaggagcattgccagcaactgggtgatatcggactggatctcaccttcatcatccatgcccttctggtgaaagacatccaaggggccttgcacagttacaaagaaatcatcattgaagccactaaacatcgcaactctgaagagatgtggaggaggatgaacttgatgacgccagaagccctgggtaagctcaaagaagagatgaaaagttgtggggtaagtaactttgagcagtacacaggggatgactgctgggtgaacctaagttacacagtggttgctttcaccaaacagaccatgggcttcttggaagaggccctgaagctgtatttcccagagctgcacatggtacttttggagagcctggtggaaatcattttggttgctgttcagcatgtggattatagtcttcgatgtgagcaggatccagagaagaaagcttttatcagacagaatgcatcctttttatatgaaacagtcctccctgtggtggagaaaaggtttgaagaaggtgtggggaaacctgccaagcaactccaagatctgaggaatgcatctagacttattcgtgtgaatcctgaaagtacaacatcagtggtctaatgcttgggtctgtttatatgtgtatatatgcagagagagagcttatatattatttatatttatattaagttgtattagcatactctatagtttcaaacacaacttgaaaattaaaagtgccctcttaaaaatacaaaaatcaaaaagaggaaaataagttaaattaagcccaagtaacaaaaatactggaattattaaaacgtatagtatgctagctatccttttaaattatgctaattctcttcttctgaaattatggtcacactatatactatagcatttcggttttatcctttgataaaacttttcttttttcttttttttttttgagacagggtctcaccccgtcgcacaggctggagtgcagtggcaaagtctcgactcactgcagccttgacctcccgggcccaggtagtcctcccacctcagcctcccatgtagcaggaaccacaggcaggcaccaccatacccagctaatttttgtattttttgtagagatggggtttcgccatgttgcccaggctagtcttttctttcttctctttttttttccccacagtatatattatacagcagtcataatatctataaatacatagagtttatgttgtgaagtttcccagttcactgaaatgttaggtttcctaaagggtacagtgccgtgtaaaacaacctgcctcatatatttctcctcaaaacgttggactatttgggaaaaggaaaagagttgggaaaattggttttaaggtaagttttagtcaaaagaattctttcttgaaactagctggtttgtggattcagatactctgatccttacagaatccaagaggaagctttcataaaaacaattcagcaaatatttccaatataatttgaatggctaattttcagttgctaattaattagcagctttgtaatacttgatttgggagcatttacttggaaatcctaaggactataataaaagttttcaacatatttctaaattgtgtgagtttccagctgtagcttttgtctttgtcacattttaaaaaataataagcaagacacattggggacactggcagcagttgccaggttttagctgccaccgcttcagtatgagatatagctgtcccatcttcccccattcagggtaggagatatagtgacccagacttcatgcaaatggaaaaaaagttttaactgaaatatttatttagatttcagggtctagatggatgggaaagtagaaaaacatatgcaaatctcagtgttctcactatgaccactctgagcagagatttggttttgtttccttttgtaacaaagtgaaaacaggtgagacaatgtgcccaaaacaaagggaagaagagaaccttctgtgactcctaaaatgttccatgctgcatttttgtttcattttttatttttccttgctttgtttttaaacatgaatataatgcttacttcaaattgtttagtaaaacaaaataactaaagaaatgtgagcttcccaaggtttctaaactatcgctgttgtatattctatagcgttccttattctttgagggaaactgtgcttgctgtgatccattttgtctctagcttctagttgtgattcttgtccataagcaccaaatttgatgcccatgatttcaaaaggtcatttcttttatctgaatgaaaatggtggtactaagactgtgaaaattatgtgaaacctaaagtagttgccaaagtggctcagggttgtaaaattcattgacttaattattcatgtgccagatcaacccctttattttctctttagctgtgcatatttaaaatattggaaagtatcagatttacagattttctttgactaatttttttcacataactttaggattttcgaaagttgtaaccataactggatatcttagctgagcaaaggcggttataatttgtctttttaagatcactggaaattgataaaattttgtgataattatgattattctgtgccatttacagtttctaatactatactgtatgaaatatgtataaatatatgatgctgagtctgtggaatgatacttctgaaatcaaaattcctcataaggcatgaagttgtaaaaacttgaatgtgtatagttagatatttaaatggttgcttcttcatagaattgtctgctttttaaaactggaagtacaggattttcttcaggtaaaatctgtgtgttccaattacagttgtagctgaaggaagtatgctttggtgagtcaattagtatgggaacttgactaaagacccccagtgttgtaacgtacctttgtacccagacaaaacaattatgttacattcctcaaagtggcatgggctttcttctctaattcttctgttttattagacccaagacaagttctaaaaattgaatgcaatgagagattgtccagaaatgtaatatatactaaaatataccacttaagcattgattgccttttcttgtttgcttcaagaatataaaacttgttacttgagcttggaatcatgggcttgattgaattaattactcttggggaaaaaagacaccttgtggcattaagtcttgctttggttaaagccttatttcacataattgctaaaaactcatttttgtttaatatactacctatagtttaattatcggcacttgtattttgtaacttgatatcttacctaggattgggaatttgggacatgacatgtactataaaagtcagtctatgtacatactgcttattgatgtgctgtgatatgagggaatctgaaatgtttcataaaaataaagcttaaaaattgtcttacactggataaaagtgatattaagaaa

SEQ ID NO: 56465 - DNA, 2348 bp, Homo Sapiens
aggtggagccttttttgctcacggcagcaagttcccttctcctttctctcccccggcggcgtgtgcattggctcttcaagctgcctgtgctgctccgtggagtgaaaaaggcagggtgtgctcgcagactgtgctataaactgcaatttctatttggggtcctcacggagaagaacaccaggaaagacagacaggaccagtgccatgggccagctttgctgctttcctttctcaagagatgaaggaaaaatcagtgagttggaaagctcgtcctctgcagtcctacagagatacagcaaggatatacccagttggtcaagtggtgaaaagaacggaggggagcccgatgacgctgaactagtaaggctcagtaagaggctggtggagaacgcggtgctcaaggctgtccagcagtatctggaggaaacacagaataaaaacaagccgggggaggggagctctgtgaaaaccgaagcagctgatcagaatggcaatgacaatgagaacaacaggaaatgagcccggaacgcaggcccccatgtctctgtgcaaagcctccctgcttccctctgctgagtctagggactgacttgcagcgtgctgtttaagttaagtttctctggtgcaatctgtgaagattgcctaatacttttcatgatcgatgtgttcgcattgctgaaacacaacagaagaaaaatggagtgctgggactggcagaggaaattaattgatgaaagaagaatggcccaagtttcattcgccctcagccacgcacaagggaaagggaactttgggttatgcctcctggacgcaaattaaaggccgagaaagaggccttgccatcaatggaatactgccatttatattgcttagcagggcatttgactactttatctgaggccagaactctcacacacagctatcaagtgctaagtttaaaataatcactgttggaattgtcatctgtacaattagtccataatgtttcatgtttgtcctaagtgtgctgttgctatgcagtgtgatctttatttatagtaaattatgtttcatgtaaatgatatatttttggtgaaatgcaaccttttctataaaatgtgggcaacattttaaagtttttttaaaatcctattttgataagtcagtatgccatatttaatgaaatgttattatataatttttttttcttaggcaagaaacctattggaattcgagacttaattaatgaagctttgcatcgagaaacgatgggtctgaagtccaaagtgaaacagataaaggaacttttattaaagcctgagactcaggccagaattaggagggagctttttgaaggaagacttattaacaacagtaattcagcaaatgacgttgatttcagcacaactttgacataagctctacattgcgattgtgacaacatagcttatgaaatcttttcagcttattaagtagctctttggtaaacaccaaagaagtttctgatagtgtctgcacaacagcaaaccaacatttggtgaggaattagcaatttcttgccaaagaaaattgattctgcccaattattttttgagctacacttgtgttttagaatatctgtttctgtaatattgagagttattttatagaaatgatttcttaattagctgttgtgagatatttctcgggtccttgcagaaaaaaacatacagactgtgaacaaatcattcacaaacagaataaaacagagccaacaacagtattttaagggtcacttgcctcctgttgacacaattgttgctaaatcaaaagaagcgttgtccaggtgtgtctacatctagtgttacttttaatgagaatttgaatgtttattgaacaatagtacttgaatgaacatttataaatgtaattattgcgatcactggttaagaatgttttatatatccttataatatttttcactgatcaaaatgttgttctgctttttcatttcttaaggaatacatgtttgggatttttattttttacgtgtccgaagataagctccaggtcttatcgtatcccttgccatctgaacttgtttgcactgcttctgtttgaaagagcatcttgaaaaacttccccggtatgatgattgttggtaacaactttttctatagtcattgatggagtagatcatgatggaggggaaatcactggagatcaaatatgtaaaatcatttcaaatataaaatccagtttactcatggattttagctattttttcactgggtaaattatactacatttatttacaaatgagtttatgcattttcatggctcttaataaacatattgttttcccttgaaaaaaaaaaaaaaaaaaaaaa

SEQ ID NO: 56466 - DNA, 2326 bp, Homo Sapiens; identical to SEQ ID NO: 32791

SEQ ID NO: 56467 - DNA, 963 bp, Homo Sapiens
gacacgaagcctcccgggtggcttacagacgctgccagcatcgccgccgccagaggagaaatgtctgaagtaagacccctctccagagacatcttgatggagaccctcctgtatgagcagctcctggaacccccgaccatggaggttcttggcatgactgactctgaagaggacctggaccctatggaggacttcgattctttggaatgcatggagggcagtgacgcattggccctgcggctggcctgcatcggggacgagatggacgtgagcctcagggccccgcgcctggcccagctctccgaggtggccatgcacagcctgggtctggctttcatctacgaccagactgaggacatcagggatgttcttagaagtttcatggacggtttcaccacacttaaggagaacataatgaggttctggagatccccgaaccccgggtcctgggtgtcctgcgaacaggtgctgctggcgctgctgctgctgctggcgctgctgctgccgctgctcagcgggggcctgcacctgctgctcaagtgaggccccggcggctcagggcggggctggccccacccccatgaccactgccctggaggtggcggcctgctgctgttatctttttaactgttttctcatgatgcctttttatatttaaaccccgagatagtgctggaacactgctgaggttttatactcaggttttttgttttttttttattccagttttcgttttttctaaaagatgaattcctatggctctgcaattgtcaccggttaactgtggcctgtgcccaggaagagccattcactcctgcccctgcccacacggcaggtagcagggggagtgctggtcacacccctgtgtgatatgtgatgccctcggcaaagaatctactggaatagattccgaggagcaggagtgctcaataaaatgttggtttccagcaaaaaaaaaaaaaa

SEQ ID NO: 56468 - DNA, 4740 bp, Homo Sapiens
tggcttccttgtggttcctcagtggtgcctgcaacccctggttcacctccttccaggttctggctccttccagccatggctctcagagtccttctgttaacagccttgaccttatgtcatgggttcaacttggacactgaaaacgcaatgaccttccaagagaacgcaaggggcttcgggcagagcgtggtccagcttcagggatccagggtggtggttggagccccccaggagatagtggctgccaaccaaaggggcagcctctaccagtgcgactacagcacaggctcatgcgagcccatccgcctgcaggtccccgtggaggccgtgaacatgtccctgggcctgtccctggcagccaccaccagcccccctcagctgctggcctgtggtcccaccgtgcaccagacttgcagtgagaacacgtatgtgaaagggctctgcttcctgtttggatccaacctacggcagcagccccagaagttcccagaggccctccgagggtgtcctcaagaggatagtgacattgccttcttgattgatggctctggtagcatcatcccacatgactttcggcggatgaaggagtttgtctcaactgtgatggagcaattaaaaaagtccaaaaccttgttctctttgatgcagtactctgaagaattccggattcactttaccttcaaagagttccagaacaaccctaacccaagatcactggtgaagccaataacgcagctgcttgggcggacacacacggccacgggcatccgcaaagtggtacgagagctgtttaacatcaccaacggagcccgaaagaatgcctttaagatcctagttgtcatcacggatggagaaaagtttggcgatcccttgggatatgaggatgtcatccctgaggcagacagagagggagtcattcgctacgtcattggggtgggagatgccttccgcagtgagaaatcccgccaagagcttaataccatcgcatccaagccgcctcgtgatcacgtgttccaggtgaataactttgaggctctgaagaccattcagaaccagcttcgggagaagatctttgcgatcgagggtactcagacaggaagtagcagctcctttgagcatgagatgtctcaggaaggcttcagcgctgccatcacctctaatggccccttgctgagcactgtggggagctatgactgggctggtggagtctttctatatacatcaaaggagaaaagcaccttcatcaacatgaccagagtggattcagacatgaatgatgcttacttgggttatgctgccgccatcatcttacggaaccgggtgcaaagcctggttctgggggcacctcgatatcagcacatcggcctggtagcgatgttcaggcagaacactggcatgtgggagtccaacgctaatgtcaagggcacccagatcggcgcctacttcggggcctccctctgctccgtggacgtggacagcaacggcagcaccgacctggtcctcatcggggccccccattactacgagcagacccgagggggccaggtgtccgtgtgccccttgcccagggggagggctcggtggcagtgtgatgctgttctctacggggagcagggccaaccctggggccgctttggggcagccctaacagtgctgggggacgtaaatggggacaagctgacggacgtggccattggggccccaggagaggaggacaaccggggtgctgtttacctgtttcacggaacctcaggatctggcatcagcccctcccatagccagcggatagcaggctccaagctctctcccaggctccagtattttggtcagtcactgagtgggggccaggacctcacaatggatggactggtagacctgactgtaggagcccaggggcacgtgctgctgctcaggtcccagccagtactgagagtcaaggcaatcatggagttcaatcccagggaagtggcaaggaatgtatttgagtgtaatgatcaggtggtgaaaggcaaggaagccggagaggtcagagtctgcctccatgtccagaagagcacacgggatcggctaagagaaggacagatccagagtgttgtgacttatgacctggctctggactccggccgcccacattcccgcgccgtcttcaatgagacaaagaacagcacacgcagacagacacaggtcttggggctgacccagacttgtgagaccctgaaactacagttgccgaattgcatcgaggacccagtgagccccattgtgctgcgcctgaacttctctctggtgggaacgccattgtctgctttcgggaacctccggccagtgctggcggaggatgctcagagactcttcacagccttgtttccctttgagaagaattgtggcaatgacaacatctgccaggatgacctcagcatcaccttcagtttcatgagcctggactgcctcgtggtgggtgggccccgggagttcaacgtgacagtgactgtgagaaatgatggtgaggactcctacaggacacaggtcaccttcttcttcccgcttgacctgtcctaccggaaggtgtccacactccagaaccagcgctcacagcgatcctggcgcctggcctgtgagtctgcctcctccaccgaagtgtctggggccttgaagagcaccagctgcagcataaaccaccccatcttcccggaaaactcagaggtcacctttaatatcacgtttgatgtagactctaaggcttcccttggaaacaaactgctcctcaaggccaatgtgaccagtgagaacaacatgcccagaaccaacaaaaccgaattccaactggagctgccggtgaaatatgctgtctacatggtggtcaccagccatggggtctccactaaatatctcaacttcacggcctcagagaataccagtcgggtcatgcagcatcaatatcaggtcagcaacctggggcagaggagcccccccatcagcctggtgttcttggtgcccgtccggctgaaccagactgtcatatgggaccgcccccaggtcaccttctccgagaacctctcgagtacgtgccacaccaaggagcgcttgccctctcactccgactttctggctgagcttcggaaggcccccgtggtgaactgctccatcgctgtctgccagagaatccagtgtgacatcccgttctttggcatccaggaagaattcaatgctaccctcaaaggcaacctctcgtttgactggtacatcaagacctcgcataaccacctcctgatcgtgagcacagctgagatcttgtttaacgattccgtgttcaccctgctgccgggacagggggcgtttgtgaggtcccagacggagaccaaagtggagccgttcgaggtccccaaccccctgccgctcatcgtgggcagctctgtcgggggactgctgctcctggccctcatcaccgccgcgctgtacaagctcggcttcttcaagcggcaatacaaggacatgatgagtgaagggggtcccccgggggccgaaccccagtagcggctccttcccgacagagctgcctctcggtggccagcaggactctgcccagaccacacgagcccccaggctgctggacacgtcggacagcgaagtatccccgacaggacgggcttgggcttccatttgtgtgtgtgcaagtgtgtatgtgcgtgtgtgcgagtgtgtgcaagtgtctgtgtgcaagtgtgtgcacgtgtgcgtgtgcgtgcatgtgcactcgcacgcccatgtgtgagtgtgtgcaagtatgtgagtgtgtccagtgtgtgtgcgtgtgtccatgtgtgtgcagtgtgtgcatgtgtgcgagtgtgtgcatgtgtgtgctcaggggctgtggctcacgtgtgtgactcagagtgtctctggcgtgtgggtaggtgacggcagcgtagcctctccggcagaagggaactgcctgggctcccttgtgcgtgggtaagccgctgctgggttttcctccgggagaggggacggtcaatcctgtgggtgaagagagagggaaacacagcagcatctctccactgaaagaagtgggacttcccgtcgcctgcgagcctgcggcctgctggagcctgcgcagcttggatggatactccatgagaaaagccgtgggtggaaccaggagcctcctccacaccagcgctgatgcccaataaagatgcccactgaggaatcatgaagcttcctttctggattcatttattatttcaatgtgactttaattttttggatggataagcctgtctatggtacaaaaatcacaaggcattcaagtgtacagtgaaaagtctccctttccagatattcaagtcacctccttaaaggtagtcaagattgtgttttgaggtttccttcagacagattccaggcgatgtgcaagtgtatgcacgtgtgcacacaccacacacatacacacacacaagcttttttacacaaatggtagcatactttatattggtctgtatcttgctttttttcaccaatatttctcagacatcggttcatattaagacataaattactttttcattcttttataccgctgcatagtattccattgtgtgagtgtaccataatgtatttaaccagtcttcttttgatatactattttcatctcttgttattgcatctgctgagttaataaatcaaatatatgtcaaaaaaaaaaaaaaaaaaaaaaaaaaaaaaaaaaaaaaaaat

SEQ ID NO: 56469 - DNA, 2329 bp, Homo Sapiens; identical to SEQ ID NO: 29207

SEQ ID NO: 56470 - DNA, 2771 bp, Homo Sapiens
gagtcgccgcttccgccttgaccaggtggagctggagacctggtctctctagggcctgccctgagctcaccatctgaaggagagtgccatcatccttaggaactccttctccagacatgcttcccgaggctggctccctgtggctactgaagctgctccgggacatccagttggcccagttttactggcccatcctagaggagcttaatgtcacccggccagggcacttcgactttgtaaagcctgaggacctggacggcattggcatgggccggcctgcccaacgcagactgtccgaagctctgaaaagcctacgttctgggcctaagtctaagaactgggtctacaagatccttggaggttttgcccctgagcacaaggagcccaccctgcccacggacagcccacggcacctccctgagccagaggggggcctcaagtgtctgatcccagagggtgctgtttgcagaggggagctgctgggttcaggctgcttcggtgtggtgcaccgagggctgtggacgctgcccagtggcaagagtgtcccagtggctgtcaagtccctccgggtaggtcccgaaggcccgatgggcacagaactgggggacttcctgcgagaggtatcggtcatgatgaacttggagcacccacacgtgctgcgtctgcacggccttgtactgggccagcctctgcagatggtgatggagctggcgccactgggctccctgcacgcgcgcttaacggccccggccccgacacccccgctgctcgtggccctgctctgcctcttcctgcggcagctggcgggagccatggcgtacctgggggcccgcgggctggtgcaccgagacctcgctacgcgcaacctacagctggcgtcgccgcgcaccatcaaggtggctgacttcgggctggtgcggcctctgggcggtgcccggggccgctacgtcatgggcgggccccgccctatcccctacacctggtgtgccccagagagcctgcgccacggagccttctcgtctgcctcggacgtgtggatgtttggggtgacgctgtgggagatgttctccgggggcgaggaaccctggcccggggtcccaccgtacctcatcctgcagcggctggaggacagagcccggctgcctaggcctcccccctcctccagggccctctactccctcgccttgcgctgctgggccccccaccctgccgaccggcctagcttttcccacctggaggggctgctgcaagaggccgggccttcggaagcatgttgtgtgagggatgccacagaaccaggcgccctgaggatggagactggtgaccccatcacagtcatcgagggcagctcctctttccacagccccgactccacaatctggaaggaccagaatggtcgcaccttcaaagtgggcagcttcccagcctcggcagtgacgctgacagatgcggggggcttgccagccacccgtccagtccacagaggcacccctgcccggggagatcaacacccaggaagcatagatggagacagaaagaaggcaaatctttgggatgcgcccccagcacggggccagaggaggaacatgcccctggagaggatgaaaggcatttccaggagtctggagtcagttctgtccctcggtcctcgtcccacagggggtggttcaagcccccctgaaattcgacaagccagagctgtgccccagggacctccaggcctgcctccacgcccacctttatcctctagctctcctcagcccagccagccctctagggagaggcttccctggcccgaaagaaaacccccacacaatcaccccatgggaatgcctggagcccgtaaagccgctgccctctctggaggcctcttgtccgatcctgagttgcagaggaagattatggaaatggagctgagtgtgcattgggtcacccaccaggagtgccagacagcactaggagccactgggggagatgtggcttctgccatccggaacctcaaggtagatcagctcttcctcctgagtagccggtccagagctgactgctggcgcatcctggagcattaccagtgggacctctcagctgccagccgttatgtcctggccaggccctgagcccagcttctgcgggcacagacaccagcatgaaaagcctaggtccctgagggcctggccacatgggaccaagtggaaccagaacaaggccccgacaggggtagacgttccacttgtggagatcccacctgccgctaggcacgtggaggaggagcccagagttgggcactggcaaatgtctcctccctcccatgctccttggcttctgaaggctgaagcccctttggctgggccaagaaggatctagtctgcccactacattctcaaacaagaggacttggaggaaaagagctactatacatcatatgcagaggaagcttctacgcgctagagaggatcaaggggccacactggaccatgtgaacagccatccggaactgccatcagctaccacactggactctgcagggcagccatcctggatgatggaagccaccatattgacctggggtataggcccaaactgccttcgtttggtccagggccatcgtgggtgatgacgattgctctcttgcactcatggacatttgatgctggtagtatggattatgagatggactagcccctgctccagcccagttctcacattcccctttgttttttcccataccaactgcttctaccctcccctattacatacatctttcaatgtcc

SEQ ID NO: 56471 - DNA, 3358 bp, Homo Sapiens
gagctggagcagccgccaccgccgccgccgagggagccccgggacggcagcccctgggcgcagggtgcgctgttctcggagtccgacccagggcgactcacgcccactggtgcgacccggacagcctgggactgacccgccggcccaggcgaggctgcagccagagggctgggaagggatcgcgctcgcggcatccagaggcggccaggcggaggcgagggagcaggttagagggacaaagagctttgcagacgtccccggcgtcctgcgagcgccagcggccgggacgaggcggccgggagcccgggaagagcccgtggatgttctgcgcgcggcctgggagccgccgccgccgccgcctcagcgagaggaggaatgcaccggccgcgccgccgcgggacgcgcccgccgctcctggcgctgctggccgcgctgctgctggccgcacgcggggctgctgcccaagaaacagagctgtcagtcagtgctgaattagtgcctacctcatcatggaacatctcaagtgaactcaacaaagattcttacctgacccttgatgaaccaatgaataacatcaccacgtctctgggccagacagcagaactgcactgcaaagtctctgggaatccacctcccaccatccgctggttcaaaaatgatgctcctgtggtccaggagccccggaggctctcctttcggtccaccatctatggctctcggctgcggattagaaacctcgacaccacagacacaggctacttccagtgcgtggcaacaaacggcaaggaggtggtttcttccactggagtcttgtttgtcaagtttggcccccctcccactgcaagtccaggatactcagatgagtatgaagaagatggattctgtcagccatacagagggattgcatgtgcaagatttattggcaaccgcaccgtctatatggagtctttgcacatgcaaggggaaatagaaaatcagatcacagctgccttcactatgattggcacttccagtcacttatctgataagtgttctcagttcgccattccttccctgtgccactatgccttcccgtactgcgatgaaacttcatccgtcccaaagccccgtgacttgtgtcgcgatgaatgtgaaatcctggagaatgtcctgtgtcaaacagagtacatttttgcaagatcaaatcccatgattctgatgaggctgaaactgccaaactgtgaagatctcccccagccagagagcccagaagctgcgaactgtatccggattggaattcccatggcagatcctataaataaaaatcacaagtgttataacagcacaggtgtggactaccgggggaccgtcagtgtgaccaaatcagggcgccagtgccagccatggaattcccagtatccccacacacacactttcaccgcccttcgtttcccagagctgaatggaggccattcctactgccgcaacccagggaatcaaaaggaagctccctggtgcttcaccttggatgaaaactttaagtctgatctgtgtgacatcccagcttgcgattcaaaggattccaaggagaagaataaaatggaaatcctgtacatactagtgccaagtgtggccattcccctggccattgctttactcttcttcttcatttgcgtctgtcggaataaccagaagtcatcgtcggcaccagtccagaggcaaccaaaacacgtcagaggtcaaaatgtggagatgtcaatgctgaatgcatataaacccaagagcaaggctaaagagctacctctttctgctgtacgctttatggaagaattgggtgagtgtgcctttggaaaaatctataaaggccatctctatctcccaggcatggaccatgctcagctggttgctatcaagaccttgaaagactataacaacccccagcaatggatggaatttcaacaagaagcctccctaatggcagaactgcaccaccccaatattgtctgccttctaggtgccgtcactcaggaacaacctgtgtgcatgctttttgagtatattaatcagggggatctccatgagttcctcatcatgagatccccacactctgatgttggctgcagcagtgatgaagatgggactgtgaaatccagcctggaccacggagattttctgcacattgcaattcagattgcagctggcatggaatacctgtctagtcacttctttgtccacaaggaccttgcagctcgcaatattttaatcggagagcaacttcatgtaaagatttcagacttggggctttccagagaaatttactccgctgattactacagggtccagagtaagtccttgctgcccattcgctggatgccccctgaagccatcatgtatggcaaattctcttctgattcagatatctggtcctttggggttgtcttgtgggagattttcagttttggactccagccatattatggattcagtaaccaggaagtgattgagatggtgagaaaacggcagctcttaccatgctctgaagactgcccacccagaatgtacagcctcatgacagagtgctggaatgagattccttctaggagaccaagatttaaagatattcacgtccggcttcggtcctgggagggactctcaagtcacacaagctctactactccttcagggggaaatgccaccacacagacaacctccctcagtgccagcccagtgagtaatctcagtaaccccagatatcctaattacatgttcccgagccagggtattacaccacagggccagattgctggtttcattggcccgccaatacctcagaaccagcgattcattcccatcaatggatacccaatacctcctggatatgcagcgtttccagctgcccactaccagccaacaggtcctcccagagtgattcagcactgcccacctcccaagagtcggtccccaagcagtgccagtgggtcgactagcactggccatgtgactagcttgccctcatcaggatccaatcaggaagcaaatattcctttactaccacacatgtcaattccaaatcatcctggtggaatgggtatcaccgtttttggcaacaaatctcaaaaaccctacaaaattgactcaaagcaagcatctttactaggagacgccaatattcatggacacaccgaatctatgatttctgcagaactgtaaaatgcacaacttttgtaaatgtggtatacaggacaaactagacggccgtagaaaagatttatattcaaatgtttttattaaagtaaggttctcatttagcagacatcgcaacaagtaccttctgtgaagtttcactgtgtcttaccaagcaggacagacactcggccag

SEQ ID NO: 56472 - DNA, 2108 bp, Homo Sapiens
gattactcacacagtcttgaagatgcaatgtcagctatttaggacagaaacatccaaggccgtgtcagaactcaattacgactacatatgcattaaggcaggaactggcaggcctcagggtacgccaactataggactcgtgcttctcgtacgctgggctataatctatgaaactgagctccagagccagccaatcacttagctcctcataacaagtctaactggctctggaaagctgaaagggctgcactggaacaacacagatgagatattctacacattaatctacttatctggaatcactttgcctctaaaggccagagaaaaatcacagcttccttgtcggaggggaaaaggacaggtgatctggggaaaacgcagctacacctggagcaaggtctcttcccggcttggcaatctcagctgtgccggcgctacgggacccgagccgtcccagaaaccaaagggcaggcacggcagcaaacgcctgagtgctgctgccttcggtgactatatgagaatggaaacttctaaggaagccaggttgttagaattgttaccccctttactcagagataacatagattatccaggctgagatggaaaacaagccctttattgaattttcaacacagactccctgcttctcatctccttaataaaatttcattaaaatccccttgaactcccatgttcaaatctccatttgttgacagacaaagccaacaatactctaaactgaggcctgcaagtcatttcatttgtatttttgtccagaaatttcccataggaagacttcacctcctacaactccgaagaaaacccttactgtccaagaccgtcaccagcaaccatccgcagtcattcaagtggaagctttcacagcttttgtacattctctgtgtcaatatacaactgagttacagactgtcccctggctccctgacccttacaaacactaaaagttttgtttgactcaacttcaagctgctcatctgttagtaagtgatgttcactccagaacacattcatgatgagaactttctaaaagaccagcactgctcttcccctcctataatcataataatcatgataacctgaaacatgttactgggactcgacatttttctggggattgaaatctttagtccttggagctgtcacatagcaggggcaacctcacactgaaacaaaggaagtgatgtcccattattatccaccctgagccaccataatatgctgtttacatttattttcttcagcctgtgcaaaacaaagcaatggaaaaggaaactaaaaaatatacatactagtaccattatcttcttttgcctaaaattactaatgcaccacgtcagtctgcttccttcaggcatcattctcaattcatcaggacttgtattagcaggttctggctagagagactatctcctgtcatcacgatcaattaatgttttctggtgatcacatcaggccctatctaagaagctcatggtatacaagggtcacccaaatagctgagtgcagtccttgctcatatttccttcatcttaaccccgcaaacaagaattaagatgatcccaataaaagaaaaattgctcaggaaactgaacctttttctgaaccaagcactgtcagcaaatctcaggtattagagcaactatggttgattgaaaagtgtctcaaaatctgggccaagaatgattgctaggtccataagctaatttgtctggccttgccatttacgtaagccaaagaaagtcactcatgagtaaactatagaaaacgttcagacccatcctgttagtatgtcaaatcaactaagactggcagggtattaactccattccaggtgacatggataaagagccccattattttcacagtgccagcctctacctaaggaaaccctagaccttggaaccagtttcctggtagggaactgctgacagtttcaatgctgacagttggagccaatgcctcatagtgtaaactgaaagaaaaatagttgctttttaaaatgtcagcaagaaggcctgcctcatcttaacaaagcaaaaaaaaatgctttaattcaaattaaaaatcatgatactaaaaaaaaaaaa

SEQ ID NO: 56473 - DNA, 3109 bp, Homo Sapiens; identical to SEQ ID NO: 23903

SEQ ID NO: 56474 - DNA, 8079 bp, Homo Sapiens
cgaggccgccgccgtcgcctccgccgggcgagccggagccggagtcgagccgcggccgggagccgggcgggctggggacgcgggccgggggcggaggcgctgggggccggggccggggccgggggcggaggcgctgggggccggggccggggccgggcgccgagcggggtccgcggtgaccgcgccgcccgggcgatgcccgcggggacgccgccggccagcagagcgaggtgctgccggccgccaccatgaccgagggcgcacgggccgccgacgaggtccgggtgcccctgggcgcgccgccccctggccctgcggcgttggtgggggcgtccccggagagccccggggcgccgggacgcgaggcggagcgggggtccgagctcggcgtgtcaccctccgagagcccggcggccgagcgcggcgcggagctgggtgccgacgaggagcagcgcgtcccgtacccggccttggcggccacggtcttcttctgcctcggtcagaccacgcggccgcgcagctggtgcctccggctggtctgcaacccatggttcgagcacgtgagcatgctggtaatcatgctcaactgcgtgaccctgggcatgttccggccctgtgaggacgttgagtgcggctccgagcgctgcaacatcctggaggcctttgacgccttcattttcgccttttttgcggtggagatggtcatcaagatggtggccttggggctgttcgggcagaagtgttacctgggtgacacgtggaacaggctggatttcttcatcgtcgtggcgggcatgatggagtactcgttggacggacacaacgtgagcctctcggctatcaggaccgtgcgggtgctgcggcccctccgcgccatcaaccgcgtgcctagcatgcggatcctggtcactctgctgctggatacgctgcccatgctcgggaacgtccttctgctgtgcttcttcgtcttcttcattttcggcatcgttggcgtccagctctgggctggcctcctgcggaaccgctgcttcctggacagtgcctttgtcaggaacaacaacctgaccttcctgcggccgtactaccagacggaggagggcgaggagaacccgttcatctgctcctcacgccgagacaacggcatgcagaagtgctcgcacatccccggccgccgcgagctgcgcatgccctgcaccctgggctgggaggcctacacgcagccgcaggccgagggggtgggcgctgcacgcaacgcctgcatcaactggaaccagtactacaacgtgtgccgctcgggtgactccaacccccacaacggtgccatcaacttcgacaacatcggctacgcctggattgccatcttccaggtgatcacgctggaaggctgggtggacatcatgtactacgtcatggacgcccactcattctacaacttcatctatttcatcctgctcatcatcgtgggctccttcttcatgatcaacctgtgcctggtggtgattgccacgcagttctcggagacgaagcagcgggagagtcagctgatgcgggagcagcgggcacgccacctgtccaacgacagcacgctggccagcttctccgagcctggcagctgctacgaagagctgctgaagtacgtgggccacatattccgcaaggtcaagcggcgcagcttgcgcctctacgcccgctggcagagccgctggcgcaagaaggtggaccccagtgctgtgcaaggccagggtcccgggcaccgccagcgccgggcaggcaggcacacagcctcggtgcaccacctggtctaccaccaccatcaccaccaccaccaccactaccatttcagccatggcagcccccgcaggcccggccccgagccaggcgcctgcgacaccaggctggtccgagctggcgcgcccccctcgccaccttccccaggccgcggaccccccgacgcagagtctgtgcacagcatctaccatgccgactgccacatagaggggccgcaggagagggcccgggtggcacatgccgcagccactgccgctgccagcctcagactggccacagggctgggcaccatgaactaccccacgatcctgccctcaggggtgggcagcggcaaaggcagcaccagccccggacccaaggggaagtgggccggtggaccgccaggcaccggggggcacggcccgttgagcttgaacagccctgatccctacgagaagatcccgcatgtggtcggggagcatggactgggccaggcccctggccatctgtcgggcctcagtgtgccctgccccctgcccagccccccagcgggcacactgacctgtgagctgaagagctgcccgtactgcacccgtgccctggaggacccggagggtgagctcagcggctcggaaagtggagactcagatggccgtggcgtctatgaattcacgcaggacgtccggcacggtgaccgctgggaccccacgcgaccaccccgtgcgacggacacaccaggcccaggcccaggcagcccccagcggcgggcacagcagagggcagccccgggcgagccaggctggatgggccgcctctgggttaccttcagcggcaagctgcgccgcatcgtggacagcaagtacttcagccgtggcatcatgatggccatccttgtcaacacgctgagcatgggcgtggagtaccatgagcagcccgaggagctgactaatgctctggagatcagcaacatcgtgttcaccagcatgtttgccctggagatgctgctgaagctgctggcctgcggccctctgggctacatccggaacccgtacaacatcttcgacggcatcatcgtggtcatcagcgtctgggagatcgtggggcaggcggacggtggcttgtctgtgctgcgcaccttccggctgctgcgtgtgctgaagctggtgcgctttctgccagccctgcggcgccagctcgtggtgctggtgaagaccatggacaacgtggctaccttctgcacgctgctcatgctcttcattttcatcttcagcatcctgggcatgcaccttttcggctgcaagttcagcctgaagacagacaccggagacaccgtgcctgacaggaagaacttcgactccctgctgtgggccatcgtcaccgtgttccagatcctgacccaggaggactggaacgtggtcctgtacaacggcatggcctccacctcctcctgggccgccctctacttcgtggccctcatgaccttcggcaactatgtgctcttcaacctgctggtggccatcctcgtggagggcttccaggcggagggcgatgccaacagatccgacacggacgaggacaagacgtcggtccacttcgaggaggacttccacaagctcagagaactccagaccacagagctgaagatgtgttccctggccgtgacccccaacgggcacctggagggacgaggcagcctgtcccctcccctcatcatgtgcacagctgccacgcccatgcctacccccaagagctcaccattcctggatgcagcccccagcctcccagactctcggcgtggcagcagcagctccggggacccgccactgggagaccagaagcctccggccagcctccgaagttctccctgtgccccctggggccccagtggcgcctggagcagccggcgctccagctggagcagcctgggccgtgcccccagcctcaagcgccgcggccagtgtggggaacgtgagtccctgctgtctggcgagggcaagggcagcaccgacgacgaagctgaggacggcagggccgcgcccgggccccgtgccaccccactgcggcgggccgagtccctggacccacggcccctgcggccggccgccctcccgcctaccaagtgccgcgatcgcgacgggcaggtggtggccctgcccagcgacttcttcctgcgcatcgacagccaccgtgaggatgcagccgagcttgacgacgactcggaggacagctgctgcctccgcctgcataaagtgctggagccctacaagccccagtggtgccggagccgcgaggcctgggccctctacctcttctccccacagaaccggttccgcgtctcctgccagaaggtcatcacacacaagatgtttgatcacgtggtcctcgtcttcatcttcctcaactgcgtcaccatcgccctggagaggcctgacattgatcccggcagcaccgagcgggtcttcctcagcgtctccaattacatcttcacggccatcttcgtggcggagatgatggtgaaggtggtggccctggggctgctgtccggcgagcacgcctacctgcagagcagctggaacctgctggatgggctgctggtgctggtgtccctggtggacattgtcgtggccatggcctcggctggtggcgccaagatcctgggtgttctgcgcgtgctgcgtctgctgcggaccctgcggcctctgagggtcatcagccgggccccgggcctcaagctggtggtggagacgctgatatcatcactcaggcccattgggaacatcgtcctcatctgctgcgccttcttcatcatttttggcattttgggtgtgcagctcttcaaagggaagttctactactgcgagggccccgacaccaggaacatctccaccaaggcacagtgccgggccgcccactaccgctgggtgcgacgcaagtacaacttcgacaacctgggccaggccctgatgtcgctgttcgtgctgtcatccaaggatggatgggtgaacatcatgtacgacgggctggatgccgtgggtgtcgaccagcagcctgtgcagaaccacaacccctggatgctgctgtacttcatctccttcctgctcatcgtcagcttcttcgtgctcaacatgttcgtgggcgtcgtggtcgagaacttccacaagtgccggcagcaccaggaggcggaggaggcgcggcggcgagaggagaagcggctgcggcgcctagagaggaggcgcaggaaggcccagcgccggccctactatgccgactactcgcccacgcgccgctccattcactcgctgtgcaccagccactatctcgacctcttcatcaccttcatcatctgtgtcaacgtcatcaccatgtccatggagcactataaccaacccaagtcgctggacgaggccctcaagtactgcaactacgtcttcaccatcgtgtttgtcttcgaggctgcactgaagctggtagcatttgggttccgtcggttcttcaaggacaggtggaaccagctggacctggccatcgtgctgctgtcactcatgggcatcacgctggaggagatagagatgagcgccgcgctgcccatcaaccccaccatcatccgcatcatgcgcgtgcttcgcattgcccgtgtgctgaagctgctgaagatggctacgggcatgcgcgccctgctggacactgtggtgcaagctctcccccaggtggggaacctgggccttcttttcatgctcctgttttttatctatgctgcgctgggagtggagctgttcgggaggctggagtgcagtgaagacaacccctgcgagggcctgagcaggcacgccaccttcagcaacttcggcatggccttcctcacgctgttccgcgtgtccacgggggacaactggaacgggatcatgaaggacacgctgcgcgagtgctcccgtgaggacaagcactgcctgagctacctgccggccctgtcgcccgtctacttcgtgaccttcgtgctggtggcccagttcgtgctggtgaacgtggtggtggccgtgctcatgaagcacctggaggagagcaacaaggaggcacgggaggatgcggagctggacgccgagatcgagctggagatggcgcagggccccgggagtgcacgccgggtggacgcggacaggcctcccttgccccaggagagtccgggcgccagggacgccccaaacctggttgcacgcaaggtgtccgtgtccaggatgctctcgctgcccaacgacagctacatgttcaggcccgtggtgcctgcctcggcgccccacccccgcccgctgcaggaggtggagatggagacctatggggccggcacccccttgggctccgttgcctctgtgcactctccgcccgcagagtcctgtgcctccctccagatcccattggctgtgtcgtccccagccaggagcggcgagcccctccacgccctgtcccctcggggcacagcccgctcccccagtctcagccggctgctctgcagacaggaggctgtgcacaccgattccttggaagggaagattgacagccctagggacaccctggatcctgcagagcctggtgagaaaaccccggtgaggccggtgacccaggggggctccctgcagtccccaccacgctccccacggcccgccagcgtccgcactcgtaagcataccttcggacagcgctgcgtctccagccggccggcggccccaggcggagaggaggccgaggcctcggacccagccgacgaggaggtcagccacatcaccagctccgcctgcccctggcagcccacagccgagccccatggccccgaagcctctccggtggccggcggcgagcgggacctgcgcaggctctacagcgtggatgctcagggcttcctggacaagccgggccgggcagacgagcagtggcggccctcggcggagctgggcagcggggagcctggggaggcgaaggcctggggccctgaggccgagcccgctctgggtgcgcgcagaaagaagaagatgagccccccctgcatctcggtggaaccccctgcggaggacgagggctctgcgcggccctccgcggcagagggcggcagcaccacactgaggcgcaggaccccgtcctgtgaggccacgcctcacagggactccctggagcccacagagggctcaggcgccgggggggaccctgcagccaagggggagcgctggggccaggcctcctgccgggctgagcacctgaccgtccccagctttgcctttgagccgctggacctcggggtccccagtggagaccctttcttggacggtagccacagtgtgaccccagaatccagagcttcctcttcaggggccatagtgcccctggaacccccagaatcagagcctcccatgcccgtcggtgaccccccagagaagaggcgggggctgtacctcacagtcccccagtgtcctctggagaaaccagggtccccctcagccacccctgccccagggggtggtgcagatgaccccgtgtagctcggggcttggtgccgcccacggctttggccctggggtctgggggccccgctggggtggaggcccaggcagaaccctgcatggaccctgacttgggtcccgtcgtgagcagaaaggcccggggaggatgacggcccaggccctggttctctgcccagcgaagcaggagtagctgccgggccccacgagcctccgtccgttctggttcgggtttctccgagttttgctaccagccgaggctgtgcgggcaactgggtcagcctcccgtcaggagagaagccgcgtctgtgggacgaagaccgggcacccgccagagaggggaaggtaccaggttgcgtcctttcaggccccgcgttgttacaggacactcgctgggggccctgtgcccttgccggcggcaggttgcagccaccgcggcccaatgtcaccttcactcacagtctgagttcttgtccgcctgtcacgccctcaccaccctccccttccagccaccaccctttccgttccgctcgggccttcccagaagcgtcctgtgactctgggagaggtgacacctcactaaggggccgaccccatggagtaacgcgcccggccccgatgcgaatcaggcctcccctacatctgggggcgttggccgcgagattcccattgacacctttgtttcgtgtgcttttaaattcaggttaaatgttgcaataatctgatgcagaagactcagcttctcaagggagagggagggggcggagcggaataaatagtaacttatttaagaaatgcaaaaaaaaaa

SEQ ID NO: 56475 - DNA, 4267 bp, Homo Sapiens
ctccgaggaggggtggggacggtcctgacggtggggacatcaggctgccccgcagtaccagggagcgacttgaagtgcccatgccgcttgctccgggagaagcccaggtgtggcctcactcacatcccactctgagtccaaatgttctctccctggaagatatcaatgtttctgtctgttcgtgaggactccgtgcccaccacggcctctttcagcgccgacatgctcaatgtcaccttgcaagggcccactcttaacgggacctttgcccagagcaaatgcccccaagtggagtggctgggctggctcaacaccatccagccccccttcctctgggtgctgttcgtgctggccaccctagagaacatctttgtcctcagcgtcttctgcctgcacaagagcagctgcacggtggcagagatctacctggggaacctggccgcagcagacctgatcctggcctgcgggctgcccttctgggccatcaccatctccaacaacttcgactggctctttggggagacgctctgccgcgtggtgaatgccattatctccatgaacctgtacagcagcatctgtttcctgatgctggtgagcatcgaccgctacctggccctggtgaaaaccatgtccatgggccggatgcgcggcgtgcgctgggccaagctctacagcttggtgatctgggggtgtacgctgctcctgagctcacccatgctggtgttccggaccatgaaggagtacagcgatgagggccacaacgtcaccgcttgtgtcatcagctacccatccctcatctgggaagtgttcaccaacatgctcctgaatgtcgtgggcttcctgctgcccctgagtgtcatcaccttctgcacgatgcagatcatgcaggtgctgcggaacaacgagatgcagaagttcaaggagatccagacggagaggagggccacggtgctagtcctggttgtgctgctgctattcatcatctgctggctgcccttccagatcagcaccttcctggatacgctgcatcgcctcggcatcctctccagctgccaggacgagcgcatcatcgatgtaatcacacagatcgcctccttcatggcctacagcaacagctgcctcaacccactggtgtacgtgatcgtgggcaagcgcttccgaaagaagtcttgggaggtgtaccagggagtgtgccagaaagggggctgcaggtcagaacccattcagatggagaactccatgggcacactgcggacctccatctccgtggaacgccagattcacaaactgcaggactgggcagggagcagacagtgagcaaacgccagcagggctgctgtgaatttgtgtaaggattgagggacagttgcttttcagcatgggcccaggaatgccaaggagacatctatgcacgaccttgggaaatgagttgatgtctccggtaaaacaccggagactaattcctgccctgcccaattttgcagggagcatggctgtgaggatggggtgaactcacgcacagccaaggactccaaaatcacaacagcattactgttcttatttgctgccacacctgagccagcctgctccttcccaggagtggaggaggcctgggggcagggagaggagtgactgagcttccctcccgtgtgttctccgtccctgccccagcaagacaacttagatctccaggagaactgccatccagctttggtgcaatggctgagtgcacaagtgagttgttgccctgggtttctttaatctattcagctagaactttgaaggacaatttcttgcattaataaaggttaagccctgaggggtccctgataacaacctggagaccaggattttatggctcccctcactgatggacaaggaggtctgtgccaaagaagaatccaataagcacatattgagcacttgctgtatatgcagtattgagcactgtaggcaagagggaagaaagagaaggagccatctccatcttgaaggaactcaaagactcaagtgggaacgactgggcactgccaccaccagaaagctgttcgacgagacggtcgagcagggtgctgtgggtgatatggacagcagaagggggagaccaaggttccagctcaaccaataactattgcacaaccacctgtccctgcctcagttccctcttctgtaacatgaagtcgttgtgagggttaaaggcagtaacaggtataaagtacttagaaaagcaaagggtgctacgtacatgtgaggcatcattacgcagacgtaactgggatatgtttactataaggaaaagacactgaggtctagaaatagctccgtggagcagaatcagtattgggagccggtggcggtgtgaagcaccagtgtctggcacacagtaggtgctcattggctcccttccacctgtcattcccaccaccctgaggccccaaccgccacacacacaggagcatttggagagaaggccatgtcttcaaagtctgatttgtgatgaggcagaggaagatatttctaatcggtcttgcccagaggatcacagtgctgagaccccccaccaccagccggtacctgggaagggggagagtgcaggcctgctcagggactgttcctgtctcagcaaccaagggattgttcctgtcaatcaatggtttattggaaggtggcccagtatgagccctagaagagtgtgaaaaggaatggcaatggtgttcaccatcggcagtgccagggcagcactcattcacttgataaatgaatatttattagctggttggagagctagaacctggagaggctagaacctggagaactagaacctggagggctagaacctggagaggctagaaccaagaagggctagaacctggaggggctagaacctagagaagctaaaacctgagctagaagctggaggactagaacctggagggctggaatctggagagctagaacctggagggctagaacctggagggctagaatctggagagctagaacctggagggctagaatctggagagctagaacctggagggctagaacctggagagctagaacctagaagggctagaacctggagggctggaatctggagagctagaacctggagggctagaacctggagggctagaacctagaagggctagaacctggagggctggaatctggagagctagaacctggagggctagaacctggagggctagaacctagaagggctagaacctggagggctagaacctggcaggttagaacctagaagggctagaacctggagagccagaacctggagggctagaacctggaagggctagaacctgtagagctagaacatggagagctagaacccggcaggctagaacctggcaagctagaacctggagggaatgaacctggagggctagaacctggagaatgagaaaaatttacatggcaaagagcccataaatcctgaccaatccaactctgaattttaaagcaaaagcgtcaaaaaaaagattccctccttacccccaacccactcttttttcccaccacccactctcctctgcctcagtaagtatctggaggaagaaaacaggtgaaagaagaagtaaaaaccatttagtattagtattagaatgaagtcaaactgtgccacacatggtgaatgaaaaaaaaaaaaagaggctgtgttttgtcacacagggcagtcattcagcaccagagcacgtgatggtctgagactctcttaggagcagagctctgccgcaatggccatgtggggatccacacctggtctgaggggcaactgagtctgcgggagaagagcggccctatgcatggtgtagatgccctgataaagaacatctgtcctgtgaaagactcaatgagctgttatgttgtaaacaggaagcatttcacatccaaacgagaaaatcatgtaaacatgtgtcttttctgtagagcataataaatggatgaggtttttgcatagctctagcatttgttacaactcccgaaacccccgagtttggtccctggggtaccgccttgcacactcagaagcctttgggaaggggtgctattcatttctgctcaatctgttaacaggcttctggcatgtagatcagtggtctccaagcttttgtgattgtatattcctataggaaaaaaagaattgattatgcatacccagtatgtatacttattaatctgtatgaagatgtacattctaaaatataatcaaccagtagaaatttaagaaagaagatgtaaaaaa

SEQ ID NO: 56476 - DNA, 1123 bp, Homo Sapiens
ccatcatggaagcaatgtggctcctgtgtgtggcgttggcggtcttggcatggggcttcctctgggtttgggactcctcagaacgaatgaagagtcgggagcagggaggacggctgggagccgaaagccggaccctgctggtcatagcgcaccctgacgatgaagccatgttttttgctcccacagtgctaggcttggcccgcctaaggcactgggtgtacctgctttgcttctctgcaggaaattactacaatcaaggagagactcgtaagaaagaacttttgcagagctgtgatgttttggggattccactctccagtgtaatgattattgacaacagggatttcccagatgacccaggcatgcagtgggacacagagcacgtggccagagtcctccttcagcacatagaagtgaatggcatcaatctggtggtgactttcgatgcagggggagtaagtggccacagcaatcacattgctctgtatgcagctgtgagggccctgcactcagaagggaagttacctaaagggtgctctgtgctcacgcttcagtctgtgaatgtgctgcgcaagtacatctcccttctggatctgcccttgtctctgcttcatacgcaggatgtcctcttcgtgctcaacagcaaagaagtggcacaggccaagaaagccatgtcctgccaccgcagccagctcctctggttccgccgcctctacattatcttctcccggtacatgagaatcaactcactgagcttcctctgaagccttgaagggttttcagatccaaggaacaaaggggaaaatagacaaaggagtgcagaggacctggcctggcactggcttatttacctgagctcaaggagatccccgctggagcagcctctgcaaaagggagcccatgtaggccaggggctgtccaaactccagcttcttcccctgggaaaaaacccaaagaaccaaaaacaaaccaccccaaggataataatagctacactgctagcttctcaagttcttgtgaaaaacaatttacataatgacacagtagatgtggaacacctagcccagtgcctgggcaggtccctattatcataaatgaacataaaagtgctctaaaaacactc

SEQ ID NO: 56477 - DNA, 3742 bp, Homo Sapiens
gaattccttctctcctcctcctcgcccttctcctcgccctcctcctcctcctcgccctcccctcccgatcctcatccccttgccctcccccagcccagggacttttccggaaagtttttattttccgtctgggctctcggagaaagaagctcctggctcagcggctgcaaaactttcctgctgccgcgccgccagcccccgccctccgctgcccggccctgcgccccgccgagcgatgagcgcccctccggtcctgcggccgcccagtccgctgctgcccgtggcggcggcagctgccgcagcggccgccgcactggtcccagggtccgggcccgggcccgcgccgttcttggctcctgtcgcggccccggtcgggggcatctcgttccatctgcagatcggcctgagccgtgagccggtgctgctgctgcaggactcgtccggggactacagcctggcgcacgtccgcgagatggcttgctccattgtcgaccagaagttccctgaatgtggtttctacggaatgtatgataagatcctgctttttcgccatgaccctacctctgaaaacatccttcagctggtgaaagcggccagtgatatccaggaaggcgatcttattgaagtggtcttgtcacgttccgccacctttgaagactttcagattcgtccccacgctctctttgttcattcatacagagctccagctttctgtgatcactgtggagaaatgctgtgggggctggtacgtcaaggtcttaaatgtgaagggtgtggtctgaattaccataagagatgtgcatttaaaatacccaacaattgcagcggtgtgaggcggagaaggctctcaaacgtttccctcactggggtcagcaccatccgcacatcatctgctgaactctctacaagtgcccctgatgagccccttctgcaaaaatcaccatcagagtcgtttattggtcgagagaagaggtcaaattctcaatcatacattggacgaccaattcaccttgacaagattttgatgtctaaagttaaagtgccgcacacatttgtcatccactcctacacccggcccacagtgtgccagtactgcaagaagcttctgaaggggcttttcaggcagggcttgcagtgcaaagattgcagattcaactgccataaacgttgtgcaccgaaagtaccaaacaactgccttggcgaagtgaccattaatggagatttgcttagccctggggcagagtctgatgtggtcatggaagaagggagtgatgacaatgatagtgaaaggaacagtgggctcatggatgatatggaagaagcaatggtccaagatgcagagatggcaatggcagagtgccagaacgacagtggcgagatgcaagatccagacccagaccacgaggacgccaacagaaccatcagtccatcaacaagcaacaatatcccactcatgagggtagtgcagtctgtcaaacacacgaagaggaaaagcagcacagtcatgaaagaaggatggatggtccactacaccagcaaggacacgctgcggaaacggcactattggagattggatagcaaatgtattaccctctttcagaatgacacaggaagcaggtactacaaggaaattcctttatctgaaattttgtctctggaaccagtaaaaacttcagctttaattcctaatggggccaatcctcattgtttcgaaatcactacggcaaatgtagtgtattatgtgggagaaaatgtggtcaatccttccagcccatcaccaaataacagtgttctcaccagtggcgttggtgcagatgtggccaggatgtgggagatagccatccagcatgcccttatgcccgtcattcccaagggctcctccgtgggtacaggaaccaacttgcacagagatatctctgtgagtatttcagtatcaaattgccagattcaagaaaatgtggacatcagcacagtatatcagatttttcctgatgaagtactgggttctggacagtttggaattgtttatggaggaaaacatcgtaaaacaggaagagatgtagctattaaaatcattgacaaattacgatttccaacaaaacaagaaagccagcttcgtaatgaggttgcaattctacagaaccttcatcaccctggtgttgtaaatttggagtgtatgtttgagacgcctgaaagagtgtttgttgttatggaaaaactccatggagacatgctggaaatgatcttgtcaagtgaaaagggcaggttgccagagcacataacgaagtttttaattactcagatactcgtggctttgcggcaccttcattttaaaaatatcgttcactgtgacctcaaaccagaaaatgtgttgctagcctcagctgatccttttcctcaggtgaaactttgtgattttggttttgcccggatcattggagagaagtctttccggaggtcagtggtgggtacccccgcttacctggctcctgaggtcctaaggaacaagggctacaatcgctctctagacatgtggtctgttggggtcatcatctatgtaagcctaagcggcacattcccatttaatgaagatgaagacatacacgaccaaattcagaatgcagctttcatgtatccaccaaatccctggaaggaaatatctcatgaagccattgatcttatcaacaatttgctgcaagtaaaaatgagaaagcgctacagtgtggataagaccttgagccacccttggctacaggactatcagacctggttagatttgcgagagctggaatgcaaaatcggggagcgctacatcacccatgaaagtgatgacctgaggtgggagaagtatgcaggcgagcagcggctgcagtaccccacacacctgatcaatccaagtgctagccacagtgacactcctgagactgaagaaacagaaatgaaagccctcggtgagcgtgtcagcatcctctgagttccatctcctataatctgtcaaaacactgtggaactaataaatacatacggtcaggtttaacatttgccttgcagaactgccattattttctgtcagatgagaacaaagctgttaaactgttagcactgttgatgtatctgagttgccaagacaaatcaacagaagcatttgtattttgtgtgaccaactgtgttgtattaacaaaagttccctgaaacacgaaacttgttattgtgaatgattcatgttatatttaatgcattaaacctgtctccactgtgcctttgcaaatcagtgtttttcttactggagcttcattttggtaagagacagaatgtatctgtgaagtagttctgtttggtgtgtcccattggtgttgtcattgtaaacaaactcttgaagagtcgattatttccagtgttctatgaacaactccaaaacccatgtgggaaaaaaatgaatgaggagggtagggaataaaatcctaagacacaaatgcatgaacaagttttaatgtatagttttgaatcctttgcctgcctggtgtgcctcagtatatttaaactcaagacaatgcacctagctgtgcaagacctagtgctcttaagcctaaatgccttagaaatgtaaactgccatatataacagatacatttccctctttcttataatactctgttgtactatggaaaatcagctgctcagcaacctttcacctttgtgtatttttcaataataaaaaatattcttgtcaaaaaaaaaaaaa

SEQ ID NO: 56478 - DNA, 2382 bp, Homo Sapiens
caaaagcagttgggccgaacgaagcgtgcgcgctttggtaaccggctagaaatcccgcacgcgcgcctgcctcctctccccaggcctgagctgcccctcccactgcctttccttcttcccgcgagtcagaagcttcgcgagggcccagagaggcggtggggtgggcgaccctacgccagctccgggcgggagaaagcccaccctctcccgcgccccaggaaaccgccggcgttcggcgctgcgcagagccatggaattctcctggctggagacgcgctgggcgcggcccttttacctggcgttcgtgttctgcctggccctggggctgctgcaggccattaagctgtacctgcggaggcagcggctgctgcgggacctgcgccccttcccagcgccccccacccactggttccttgggcaccagaagtttattcaggatgataacatggagaagcttgaggaaattattgaaaaataccctcgtgccttccctttctggattgggccctttcaggcatttttctgtatctatgacccagactatgcaaagacacttctgagcagaacagatcccaagtcccagtacctgcagaaattctcacctccacttcttggaaaaggactagcggctctagacggacccaagtggttccagcatcgtcgcctactaactcctggattccattttaacatcctgaaagcatacattgaggtgatggctcattctgtgaaaatgatgctggataagtgggagaagatttgcagcactcaggacacaagcgtggaggtctatgagcacatcaactcgatgtctctggatataatcatgaaatgcgctttcagcaaggagaccaactgccagacaaacagcacccatgatccttatgcaaaagccatatttgaactcagcaaaatcatatttcaccgcttgtacagtttgttgtatcacagtgacataattttcaaactcagccctcagggctaccgcttccagaagttaagccgagtgttgaatcagtacacagatacaataatccaggaaagaaagaaatccctccaggctggggtaaagcaggataacactccgaagaggaagtaccaggattttctggatattgtcctttctgccaaggatgaaagtggtagcagcttctcagatattgatgtacactctgaagtgagcacattcctgttggcaggacatgacaccttggcagcaagcatctcctggatcctttactgcctggctctgaaccctgagcatcaagagagatgccgggaggaggtcaggggcatcctgggggatgggtcttctatcacttgggaccagctgggtgagatgtcgtacaccacaatgtgcatcaaggagacgtgccgattgattcctgcagtcccgtccatttccagagatctcagcaagccacttaccttcccagatggatgcacattgcctgcagggatcaccgtggttcttagtatttggggtcttcaccacaaccctgctgtctggaaaaacccaaaggtctttgaccccttgaggttctctcaggagaattctgatcagagacacccctatgcctacttaccattctcagctggatcaaggaactgcattgggcaggagtttgccatgattgagttaaaggtaaccattgccttgattctgctccacttcagagtgactccagaccccaccaggcctcttactttccccaaccattttatcctcaagcccaagaatgggatgtatttgcacctgaagaaactctctgaatgttagatctcagggtacaatgattaaacgtactttgtttttcgaagttaaatttacagctaatgatccaagcagatagaaagggatcaatgtatggtgggaggattggaggttggtgggataggggtctctgtgaagagatccaaaatcatttctaggtacacagtgtgtcagctagatctgtttctatataactttgggagattttcagatcttttctgttaaactttcactactattaatgctgtatacaccaatagactttcatatattttctgttgtttttaaaatagttttcagaattatgcaagtaataagtgcatgtatgctcactgtcaaaaattcccaacactagaaaatcatgtagaataaaaattttaaatctcacttcacttagccgacattccatgccctgaccaatcctactgcttttcctaaaaacagaataatttggtgtgcattctttcagactttttcctatacattttatatgtagaaatgtagcaatgtatttgtatagatgtgatcattcctatattgttattgatttttttcacttaataaaaattcaccttattccttaaaaaaaaaaaaaaaaaaaaaaaaaa

SEQ ID NO: 56479 - DNA, 3249 bp, Homo Sapiens
cgcggctgcatggacgcgggtccggcgcgcgggaggcgatgacggccccgccatggcccgggcgggcagctgcggcggcgccgcggcgggcgcagggcggccggagccctgggagctgtccctggaggaggtgctgaaggcctacgagcagccgctcaacgaggagcaggcgtgggccgtgtgcttccagggctgccgcgggctgcggggctcgccgggccggcgcctgcgggataccggggacctcctgctgcgcggggacggctcggtcggggcgcgggagcccgaggccgcggaacctgcaaccatggtcgtgccactagccagctcggaagcccagaccgtgcagtccctcggcttcgccatctaccgcgcgctggactgggggctggacgagagcgaggagcgcgaactcagccctcagctggagcggctcatcgacctcatggccaacaacgacagcgaggacagcggctgcggtgccgccgatgagggctacgggggtcccgaggaggaggaggaggccgagggcgtcccccgcagcgtgcgcacctttgcccaggccatgcggctgtgcgcggcgcggctgaccgacccccggggcgcacaggcgcattaccaggccgtgtgccgcgcgctcttcgtggagacgctggagctgcgggccttcctggccagggtccgggaggccaaggagatgctgcagaagcttcgggaggacgagccgcatctggagacgcctcgggcagagctggacagcctgggtcacacagactgggcccgactgtgggttcagctcatgcgggagctccgccgcggagtgaagctgaagaaggtgcaagagcaggagttcaaccccctccccaccgagttccagctcacgcccttcgagatgctgatgcaggacatccgggcccggaactacaagctgcgcaaggtcatggtggatggggacatcccgccccgggtgaagaaggacgctcacgagctcatcctggactttatccgctcacggcctccactgaagcaggtctctgagaggcggctgcgcccgttgccaccaaagcaaaggtccctgcatgagaagatcctggaggagatcaagcaggagcggaggctgcgcccggtgcggggcgagggctgggctgcccgcgggtttggctctctgccctgcatcctcaacgcctgctccggagatgccaagtccacctcctgcatcaacctgtcagtcacagatgctgggggcagcgcccagcgcccgcggccccgcgtgctgctcaaggcgcctaccttggctgaaatggaagagatgaatacatctgaggaagaagagtctccgtgtggggaggtgacgctgaaacgggaccgctccttctcagagcatgacctggcccagctccgaagtgaggtggcctctggcctgcagtcggccacccaccccccaggagggacggagccaccacggccccgagctggcagtgcgcatgtgtggaggcccggctcccgagaccagggtacctgtcccgcgagtgtctctgaccccagccaccccctactcagcaaccggggctcctcgggggacagacccgaggcctccatgacccccgatgccaaacacctgtggctggagttcagccaccccgtggagagcctggcgctgactgtggaagaggtgatggacgtgcgccgtgtgctggtgaaggccgagatggaaaagtttttgcagaacaaggagctcttcagcagtctgaagaaggggaagatttgctgctgctgccgggccaagttcccgctgttctcgtggccgcccagctgtctcttctgcaagagagccgtctgcacttcctgtagcataaagatgaagatgccttctaagaaatttggacacatccctgtctacacactgggctttgagagtcctcagagggtatcagctgccaaaaccgcgccaatccagagaagagacatctttcagtctctgcaagggccacagtggcagagcgtggaggaggcgttcccccacatctactcccacggctgtgtcctgaaggatgtctgcagtgagtgcaccagctttgtggcagacgtggtgcgttccagccgcaagagcgtggacgtcctcaacactacgccacgacgcagtcgccagacccaatccctctacatccctaacaccaggactcttgacttcaagtgacagccccaggtggccaggcctccaggaggcaccaggcaggccctgtatcaggctaggacgctctgagctgtgcatgtacatatatacatatatagatacatttataatatatacacacagtctatatatttatatacactgtttcctggccccagagctcatttgggttcaggcgcacttcaaaaccctccctgggggaggctgtttcttctcaggattccttgccagggaggaaggggagggaacagggtgggttttctcactgaagagagaaagcagaaggttctagatcctggcacagactgcatcccatgttcccatgctcttctccgtccccaggaatgcgaacggcagtttcccttccccagtggacgtctaggtggggacagggtatcttggctcccagctggaccagagtgccctgcttgcctctgctctccctttgtggggactcaggcagcagaggcatctgggaagtctctgagtaggcagggtcctcctgggaggcacccccacctgtttgaaaggtctggccaggcgtggtggttcaggcctgtaattccagcactttgggaggccgaggagggaggatcacctgaggtcaggagtttgagaccagcctggccaacatgatgaaatgttgtctctactgaaaatgcaaaaattagccaggtatagtggcaggaacctgtaatcccagctacaggggaggctgaggcaggagaatcgcttgaacccgggaggtgtaggttgcagtgagccgagattgcaccactgcactccagcctgggcgacagagcgagactctgtctcgaaaaaaaaaaaggtccgtgccaagctgctccctgcccttgccctttccctttccctggggtccaaaccacatgtgtcctgcctctcctggccctaccacattctggtgctgtcctcactcgcccctggcccagaggctcctgaagatgctgggcggtcctggcacagggaggagcagctctgtaaatctgtgcacatggccactcttggcctaataaaggaggtctcacagtcaaaaa

SEQ ID NO: 56480 - DNA, 2922 bp, Homo Sapiens
agcctgggctctgtgagactgaggtggcggtcagccggagtgagtgttggggtcctggggcacctgccttacatggcttgtttatgaacattaaagggaagaagttgaagcttgaggagcgaggatggcagtcaacaaaggcctcaccttgctggatggagacctccctgagcaggagaatgtgctgcagcgggtcctgcagctgccggtggtgagtggcacctgcgaatgcttccagaagacctacaccagcactaaggaagcccaccccctggtggcctctgtgtgcaatgcctatgagaagggcgtgcagagcgccagtagcttggctgcctggagcatggagccggtggtccgcaggctgtccacccagttcacagctgccaatgagctggcctgccgaggcttggaccacctggaggaaaagatccccgccctccagtacccccctgaaaagattgcttctgagctgaaggacaccatctccacccgcctccgcagtgccagaaacagcatcagcgttcccatcgcgagcacttcagacaaggtcctgggggccgctttggccgggtgcgagcttgcctggggggtggccagagacactgcggaatttgctgccaacactcgagctggccgactggcttctggaggggccgacttggccttgggcagcattgagaaggtggtggagtacctcctccctgcagacaaggaagagtcagcccctgctcctggacaccagcaagcccagaagtctcccaaggccaagccaagcctcttgagcagggttggggctctgaccaacaccctctctcgatacaccgtgcagaccatggcccgggccctggagcagggccacaccgtggccatgtggatcccaggcgtggtgcccctgagcagcctggcccagtggggtgcctcagtggccatgcaggcggtgtcccggcggaggagcgaagtgcgggtaccctggctgcacagcctcgcagccgcccaggaggaggatcatgaggaccagacagacacggagggagaggacacggaggaggaggaagaattggagactgaggagaacaagttcagtgaggtagcagccctgccaggccctcgaggcctcctgggtggtgtggcacataccctgcagaagaccctccagaccaccatctcggctgtgacatgggcacctgcagctgtgctgggcatggcagggagggtgctgcacctcacaccagcccctgctgtctcctcaaccaaggggagggccatgtccctatcagatgccctgaagggcgttactgacaacgtggtggacacagtggtgcattacgtgccgctccccaggctgtcgctgatggagcccgagagcgaattccgggacatcgacaacccaccagccgaggtcgagcgccgggaggcggagcgcagagcgtctggggcgccgtccgccggcccggagcccgccccgcgtctcgcacagccccgccgcagcctgcgcagcgcgcagagccccggcgcgccccccggcccgggcctggaggacgaagtcgccacgcccgcagcgccgcgcccgggcttcccggccgtgccccgcgagaagccaaagcgcagggtcagcgacagcttcttccggcccagcgtcatggagcccatcctgggccgcacgcattacagccagctgcgcaagaagagctgagtcgccgcaccagccgccgcgccccgggccggcgggtttctctaacaaataaacagaacccgcactgcccaggcgagcgttgccactttcaaagtggtcccctggggagctcagcctcatcctgatgatgctgccaaggcgcactttttatttttattttatttttattttttttttagcatccttttggggcttcactctcagagccagtttttaagggacaccagagccgcagcctgctctgattctatggcttggttgttactataagagtaattgcctaacttgatttttcatctctttaaccaaacttgtggccaaaagatatttgaccgtttccaaaattcagattctgcctctgcggataaatatttgccacgaatgagtaactcctgtcaccactctgaaggtccagacagaaggttttgacacattcttagcactgaactcctctgtgatctaggatgatctgttccccctctgatgaacatcctctgatgatctaggctcccagcaggctactttgaagggaacaatcagatgcaaaagctcttgggtgtttatttaaaatactagtgtcactttctgagtacccgccgcttcacaggctgagtccaggcctgtgtgctttgtagagccagctgcttgctcacagccacatttccatttgcatcattactgccttcacctgcatagtcactcttttgatgctggggaaccaaaatggtgatgatatatagactttatgtatagccacagttcatccccaaccctagtcttcgaaatgttaatatttgataaatctagaaaatgcattcatacaattacagaattcaaatattgcaaaaggatgtgtgtctttctccccgagctcccctgttccccttcattgaaaaccaccacggtgccatctcttgtgtatgcagggctatgcacctgcaggcacgtgtgtatgcactccccgcttgtgtttacacaagctgtggggtgttacgcatgcctgcttttttcacttaataatacagcttggagagatttttgtatcacattataaatcccactcgctctttttgatggccacataataactactgcataatatggatacgccttatttgatttaactagttccctaatgatggacttttaagttgtttcctttttttttcttttttgctactgcaaacgatgctataataaatgtccttatcaaaaaaaaaaaaaaaaaa

SEQ ID NO: 56481 - DNA, 2793 bp, Homo Sapiens
ctacccctttgtgagcagtctaggactttgtacacctgttaagtagggagaaggcaggggaggtggctggtttaaggggaacttgagggaagtagggaagactcctcttgggacctttggagtaggtgacacatgagcccagccccagctcacctgccaatccagctgaggagctcacctgccaatccagctgaggctgggcagaggtgggtgagaagagggaaaattgcagggacctccagttgggccaggccagaagctgctgtagctttaaccagacagctcagacctgtctggaggctgccagtgacaggttaggtttagggcagagaagaagcaagaccatggtggggaagatgtggcctgtgttgtggacactctgtgcagtcagggtgaccgtcgatgccatctctgtggaaactccgcaggacgttcttcgggcttcgcagggaaagagtgtcaccctgccctgcacctaccacacttccacctccagtcgagagggacttattcaatgggataagctcctcctcactcatacggaaagggtggtcatctggccgttttcaaacaaaaactacatccatggtgagctttataagaatcgcgtcagcatatccaacaatgctgagcagtccgatgcctccatcaccattgatcagctgaccatggctgacaacggcacctacgagtgttctgtctcgctgatgtcagacctggagggcaacaccaagtcacgtgtccgcctgttggtcctcgtgccaccctccaaaccagaatgcggcatcgagggagagaccataattgggaacaacatccagctgacctgccaatcaaaggagggctcaccaacccctcagtacagctggaagaggtacaacatcctgaatcaggagcagcccctggcccagccagcctcaggtcagcctgtctccctgaagaatatctccacagacacatcgggttactacatctgtacctccagcaatgaggaggggacgcagttctgcaacatcacggtggccgtcagatctccctccatgaacgtggccctgtatgtgggcatcgcggtgggcgtggttgcagccctcattatcattggcatcatcatctactgctgctgctgccgagggaaggacgacaacactgaagacaaggaggatgcaaggccgaaccgggaagcctatgaggagccaccagagcagctaagagaactttccagagagagggaggaggaggatgactacaggcaagaagagcagaggagcactgggcgtgaatccccggaccacctcgaccagtgacaggccagcagcagagggcggcggaggaagggttaggggttcattctcccgcttcctggcctcccttctcctttctaagccctgttctcctgtccctccatcccagacattgatggggacatttcttccccagtgtcagctgtggggaacatggctggcctggtaagggggtccctgtgctgatcctgctgacctcactgtcctgtgaagtaacccctcctggctgtgacacctggtgcgggcctggccctcactcaagaccaggctgcagcctccacttccctcgtagttggcaggagctcctggaagcacagcgctgagcatggggcgctcccactcagaactctccagggaggcgatgccagccttggggggtgggggctgtcctgctcacctgtgtgcccagcacctggaggggcaccaggtggagggtttgcactccacacatctttcttgaatgaatgaaagaataagtgagtatgcttgggccctgcattggcctggcctccagctcccactccctttccaacctcacttcccgtagctgccagtatgttccaaaccctcctgggaaggccacctcccactcctgctgcacaggccctggggagcttttgcccacacactttccatctctgcctgtcaatatcgtacctgtccctccaggcccatctcaaatcacaaggatttctctaaccctatcctaattgtccacatacgtggaaacaatcctgttactctgtcccacgtccaatcatgggccacaaggcacagtcttctgagcgagtgctctcactgtattagagcgccagctccttggggcagggcctgggcctcatggcttttgctttccctgaagccctagtagctggcgcccatcctagtgggcacttaagcttaattggggaaactgctttgattggttgtgccttcccttctctggtctccttgagatgatcgtagacacagggatgattcccacccaaacccacgtattcattcagtgagttaaacacgaattgatttaaagtgaacacacacaagggagcttgcttgcagatggtctgagttcttgtgtcctggtaattcctctccaggccagaataattggcatgtctcctcaacccacatggggttcctggttgttcctgcatcccgatacctcagccctggccctgcccagcccatttgggctctggttttctggtggggctgtcctgctgccctcccacagcctccttctgtttgtcgagcatttcttctactcttgagagctcaggcagcgttagggctgcttaggtctcatggaccagtggctggtctcacccaactgcagtttactattgctatcttttctggatgatcagaaaaataattccataaatctattgtctacttgcgattttttaaaaaatgtatatttttatatatattgttaaatcctttgcttcattccaaatgctttcagtaataataaaattgtgggtgg

SEQ ID NO: 56482 - DNA, 2901 bp, Homo Sapiens
gccgggagtcggtgaggcggctgcaggtccctccctgcggagccgctggtccggctggcggagatgtgaccgcgggcccggccggcctgcctcaggcgtcgcgtcagctcccgtgtccgtgcccttaacccacaccgatggcgggatccggctgcgcctggggcgcggagccgccgcgttttctggaggccttcgggcggctgtggcaggtacagagccgtctgggtagcggctcctccgcctcggtgtatcgggttcgctgctgcggcaaccctggctcgccccccggcgccctcaagcagttcttgccgccaggaaccaccggggctgcggcctctgccgccgagtatggtttccgcaaagagagggcggcgctggaacagttgcagggtcacagaaacatcgtgactttgtatggagtgtttacaatccacttttctccaaatgtgccatcacgctgtctgttgcttgaactcctggatgtcagtgtttcggaattgctcttatattccagtcaccagggttgttccatgtggatgatacagcattgtgcccgagatgttttggaggcccttgcttttcttcatcatgagggctatgtccatgcggacctcaaaccacgtaacatattgtggagtgcagagaatgaatgttttaaactcattgactttggacttagcttcaaagaaggcaatcaggatgtaaagtatattcagacagacgggtatcgggctccagaagcagaattgcaaaattgcttggcccaggctggcctgcagagtgatacagaatgtacctcagctgttgatctgtggagcctaggaatcattttactggaaatgttctcaggaatgaaactgaaacatacagtcagatctcaggaatggaaggcaaacagttctgctattattgatcacatatttgccagtaaagcagtggtgaatgccgcaattccagcctatcacctaagagaccttatcaaaagcatgcttcatgatgatccaagcagaagaattcctgctgaaatggcattgtgcagcccattctttagcattccttttgcccctcatattgaagatctggtcatgcttcccactccagtgctaagactgctgaatgtgctggatgatgattatcttgagaatgaagaggaatatgaagatgttgtagaagatgtaaaagaggagtgtcaaaaatatggaccagtggtatctctacttgttccaaaggaaaatcctggcagaggacaagtctttgttgagtatgcaaatgctggtgattccaaagctgcgcagaaattactgactggaaggatgtttgatgggaagtttgttgtggctacattctacccgctgagtgcctacaagaggggatatctgtatcaaaccttgctttaatcagtaacctaaggactgtttcctttttctcctcttccatttcttgggttattccacatatgaatgcaggactacccccttaccattttaagaaggtactttatacatttatttaatcctactaatgtgcagccattgcccaagcagtgactgcgttgcatacatttggcactgagtaggacaagacctctcagctatacattgaggggttttagagcatccatgtgggcaacccttttttgtgcgggagagcaggtgttgctcttcagtatgtagcctaaaaaaatcttaattatttcatggatcatgaagcaaggatgaataatatcatgtcttggtaaatactaacaaatttgttaggtttggtgacatcatttacagattatttctttatgttgtccagtggttcttccttattgttgatatccataagctggcactggatgctctcagtaatgttaagtaattgtcaagcagcagttacctactgtgttcttaacactgagttgtgaattttttcttaaagcagtactgtagtactgaatattcctttaaaggaactgcagtgagcctatctaagtttttttaaattaaggcttttaaaatagaaagctgatgcttgatcttgcacaatttttatgtctagtatgtatgcttgagtgaatgtgtgagtatgaatgattagagaaaatttgagtcagtgtactttatagtgtgaatcctgtgagctaatacagtctatacttatttcttccctacctgtttcacatccgtaagatttaggatatacattttttgagaggtagtctgtctgatacaatgtaaatgacaaaacataattcctgagaggcccagaacaaactggagtctagcctggagttaaattgagacttctaaaatgattggaacaaagactaagttgtgccagatgtaaatcaacccctcttttagtttactttagactttgtattagctcatcttttttgtagtaaatctatagttttaaggtttctcaagatgtggctctacctactatgatgaaaattgaagtgggtcaaaagaattagatgtacagtgaagggaaaagaaaaaaaatgggcgaagagagggtggaaaataaaaggattcttttttcttcctttctgtttctcgtatccctgctccctttttcctccccttccctcattctttgcctctatccttagctgaagacaaactagaggagcagcatcccaggtagtttggcttttgactgcaaggtagttaagaaaggtgtagatataatgaggtagaagtagaaaggaagaaaaactcaaagaattctgaaaaggattcatagcaacataatgtgtccctgagtagaggatgctgctatgcgtgagttcatggacacaagttgattacatggtttttagaattataattatggattcttcttatttcatggtaggttgtctttaaagatataaaaattaggatgcctttatgaagcactgattatacc

SEQ ID NO: 56483 - DNA, 1207 bp, Homo Sapiens; identical to SEQ ID NO: 29206

SEQ ID NO: 56484 - DNA, 2880 bp, Homo Sapiens
cactgcatgtgtattcgtgagttcgcggttgaacaactgttcctttactctgctccctgtctttgtgctgactgggttacttttttaaacactaggaatggtaatttctactcttctggacttcaaactaagaagttaaagagacttctctgtaaataaacaaatctcttctgctgtccttttgcatttggagacagctttatttcaccatatccaaggagtataactagtgctgtcattatgaatgtgacaagtttattttcctttacaagtccagctgtgaagagacttcttgggtggaaacagggcgatgaagaagaaaaatgggcagagaaagctgttgatgctttggtgaaaaaactgaagaaaaagaaaggtgccatggaggaactggaaaaggccttgagctgcccagggcaaccgagtaactgtgtcaccattccccgctctctggatggcaggctgcaagtctcccaccggaagggactgcctcatgtcatttactgccgtgtgtggcgctggcccgatcttcagagccaccatgaactaaaaccactggaatgctgtgagtttccttttggttccaagcagaaggaggtctgcatcaatccctaccactataagagagtagaaagccctgtacttcctcctgtgctggttccaagacacagcgaatataatcctcagcacagcctcttagctcagttccgtaacttaggacaaaatgagcctcacatgccactcaacgccacttttccagattctttccagcaacccaacagccacccgtttcctcactctcccaatagcagttacccaaactctcctgggagcagcagcagcacctaccctcactctcccaccagctcagacccaggaagccctttccagatgccagctgatacgcccccacctgcttacctgcctcctgaagaccccatgacccaggatggctctcagccgatggacacaaacatgatggcgcctcccctgccctcagaaatcaacagaggagatgttcaggcggttgcttatgaggaaccaaaacactggtgctctattgtctactatgagctcaacaatcgtgtgggtgaagcgttccatgcctcctccacaagtgtgttggtggatggtttcactgatccttccaacaataagaaccgtttctgccttgggctgctctccaatgttaaccggaattccactattgaaaacaccaggcggcatattggaaaaggagttcatctttattatgttggaggggaggtgtatgccgaatgccttagtgacagtagcatctttgtgcaaagtcggaactgcaactaccatcatggatttcatcctactactgtttgcaagatccctagtgggtgtagtctgaaaatttttaacaaccaagaatttgctcagttattggcacagtctgtgaaccatggatttgagacagtctatgagcttacaaaaatgtgtactatacgtatgagctttgtgaagggctggggagcagaataccaccgccaggatgttactagcaccccctgctggattgagatacatctgcacggccccctccagtggctggataaagttcttactcaaatgggttcacctcataatcctatttcatctgtatcttaaatggccccaggcatctgcctctggaaaactattgagccttgcatgtacttgaaggatggatgagtcagacacgattgagaactgacaaaggagccttgataatacttgacctctgtgaccaactgttggattcagaaatttaaacaaaaaaaaaaaaaaacacacacaccttggtaacatactgttgatatcaagaacctgtttagtttacattgtaacattctattgtaaaatcaactaaaattcagacttttagcaggactttgtgtacagttaaaggagagatggccaagccagggacaaattgtctattagaaaacggtcctaagagattctttggtgtttggcactttaaggtcatcgttgggcagaagtttagcattaatagttgttctgaaacgtgttttatcaggtttagagcccatgttgagtcttcttttcatgggttttcataatattttaaaactatttgtttagcgatggttttgttcgtttaagtaaaggttaatcttgatgatatacataataatctttctaaaattgtatgctgaccatacttgctgtcagaataatgctaggcatatgctttttgctaaatatgtatgtacagagtatttggaagttaagaattgattagactagtgaatttaggagtatttgaggtgggtggggggaagagggaaatgacaactgcaaatgtagactatactgtaaaaattcagtttgttgctttaaagaaacaaactgatacctgaattttgctgtgtttccattttttagagatttttatcatttttttctctctcggcattcttttttctcatactcttcaaaaagcagttctgcagctggttaattcatgtaactgtgagagcaaatgaataattcctgctattctgaaattgcctacatgtttcaataccagttatatggagtgcttgaatttaataagcagtttttacggagtttacagtacagaaataggctttaattttcaagtgaattttttgccaaacttagtaactctgttaaatatttggaggatttaaagaacatcccagtttgaattcatttcaaactttttaaatttttttgtactatgtttggttttattttccttctgttaatcttttgtattcacttatgctctcgtacattgagtacttttattccaaaactagtgggttttctctactggaaattttcaataaacctgtcattattgcttactttgattaaaaa

SEQ ID NO: 56485 - DNA, 4071 bp, Homo Sapiens
tgattcgagcgggaagaggggggtgggtgggatcggtgggggagaccatgacctccagctacgggcacgttctggagcggcaaccggcgctgggcggccgcttggacagcccgggcaacctcgacaccctgcaggcgaaaaagaacttctccgtcagtcacctgctagacctggaggaagccggggacatggtggcggcacaggcggatgagaacgtgggcgaggctggccggagcctgctggagtcgccgggactcaccagcggcagcgacaccccgcagcaggacaatgaccagctgaactcagaagaaaaaaagaagagaaagcagcgaaggaataggacaaccttcaatagcagccagctgcaggctttggagcgtgtctttgagcggacacactatcctgatgcttttgtgcgagaagaccttgcccgccgggtgaacctcaccgaggcgagagtgcaggtgtggtttcagaaccgaagagccaagttccgcaggaatgagagagccatgctagccaataaaaacgcttccctcctcaaatcctactcaggagacgtgactgctgtggagcagcccatcgtacctcgtcctgctccgagacccaccgattatctctcctgggggacagcgtctccgtacagatcctcgtccctcccaagatgttgtttacacgaggggcttcataacggattctaacggaagacactgaaaagcgccatggctacttattctgccacatgtgccaacaatagccctgcacagggcatcaacatggccaacagcattgccaacctgagactgaaggccaaggaatatagtttacagaggaaccaggtgccaacagtcaactgaggaaaaaaaataattaaacaggcctaagaagaaatcaaaaaccataagacacctatcctgctctgttatttcttcatctgctggggggaaaaagtaaattacaaacaaacaaacaaagcagaactaaaatattgggaccatggcagagaaaagcaggagaggagcaaaatgaaaattagttaacaaatgttcctcctccctctgggataccaccaccacttgtttctgtgtgtgtttattttgtttttctttcattcatgctttgcttaatgtactccaggcttcttcagataggttcagcccacccacccccatgattgtatgaagttttaaaaaaaactacagcagccaaagaaactatatatatatatatatatatatatatccagaatgattgcctctactgtcctcattgacttgtttgaaccttagtgccttaccctgtcctcttcccagttctctttatagaagctctaggagctttcgaaaagccaaagtctttctgaagaatctgtgctggacagacataattccctttctcattgtctccatctttgttggtcatggtaaggtttttccatcagcctctgaaaaaatagttgtgcacaacatctgctcactggactgtctgatccaatgtaattggctgcgtctggctaattctaagcactaaagtctacatctaagctatagatttaagcttgaagctacagattatatcactatcaccaccacccctcaccctatgcaatcaatcaatcaatcatcttaagttaaagatatttgttgtctttgaatgatttgctgtcacagactatttggtagaagaaatatttttcacctgagagaggaagagaaatttctctagtaacacaaagagtgagttctaaaaggcatgcccacatctctttcgtgccttaaggatagtgagatgcacacttatatatatactgtatatatttatatatttatatatatatttcatatatatatataatattgcaagcttaagtttgcaatttcccaaacaatacaaaaagcaaattacacaccctcaccactgttcttatctctatagtgatgaaacattaattagggatcttgctgcttttctttttctacacgaagttttcattaaagccacagaataattgatagggcagctgtttgagaacaggtcccattttcacattagggctttaaatgaattagaaactatttgaggctataaaaatgtccttgagtttggagcctgagctctggtgaaatgctgatacatctgatctatcatgggaattgcagttagagagagtaaggaataccatttagtcatctatccgttcttcacttagcaggaatatgaaagaaaggcacatgtttaagaggaatacctaaaggtttttctaaattccaacatttaaaaggcaattgtgggctatttttattttttaatattttgaaataaagtttagtgtctagggctgggagccaggactgatcttccatttctttttctttgttcccagccatgcttttgtaacttgccaggtggacttgaccaactacattaccatgctgtgcctcagtttacccatttgtaaaatgggattaataatacttacctacctcacaggggtgttgtgaggctctattcatttgctcctttattctttcctgtattctctgtatgtccagcactttgtagccatgggaggaaagggactataaaagtgtacaatgttaatggaatgatacggtacctgaaagccttgttttctagtaagaaaatgctaccttgctgtacatacttataaccttgtatttggaaatgagaaataggtttatattttcagatctctcaaaaatcacatcatttgaccaaagaataatttaagacacatagaacagatttttttaatttatattttcatcctgaccagcttagttctaataatttttagttgtgagtgattaaaaaactttggatcaattttggtcaaacatgccaactttgtagtctgagtgacaggcaaggatttttgggtttaagatgcacttttagcacacatttgtatttcccttggcatatcagattgagctaatggtgatgttatttcaatctaacagccaccaatctgaaattgtatttcaaatgttgattctgtagttctttaaataataatgaagctcatcttatacattttgctttcaccaattgattccttcttcttttagcccactattaaaacatttcttactgaatggttcatgtaggcttgctgaacagcacgcattacttgcttcctgaagagttcccccattcatccatttgtcccattagttgctgtggattatcaagttttgaaggaactgtacatcccaacagactgaaacattctaagtgaaatgagtataatccaagtaactggtgaactttggaggtttggagcttgaagagaatggctaagaagatttgaattatagggagggaacagaaatcatacatgaaaaggttttactgagaaggggaaaaccttagatagagggacatgtgaaacaaaatcatttgaaattttgattcagacatccatttccagtggcaaacagcaaagcctgaacccataaacccaaatgataggtgaagttgggtggttttatccaatgtctcaagcaagcaatgtctgggaatatcatagagtaacaagtgctggtcagccaaagaaacattcactgctggtgaaccaataccataagcatgtattatctaagcacttgatcaagaaatatacatgttgtacaagctctcaattttgttcatttattatcaaatttttaaaatacaagtttggtatgtgatttggaaaagatgccttctggatcttaagccagttgtcagtggaggtcctcagggctgcaaatgtcaagacataaccctgttcctcaccatcatgataccagatacaggtgaatacataggaactatctgcctgtgtcctcaatctcccttcaaacaagatgctgatttgtagggtacttggcaggttaaattaaaccagaagaggtgacttaataaaaaagggaatgacatttagggtataaagatctcataagaaatgtaatatgtaaattatatcttgctttatgttgtaaaatatacattgtttgcgctagaatagaaatgatttcttttcaataaaaagaaagaaggactcta

SEQ ID NO: 56486 - DNA, 2768 bp, Homo Sapiens
cactgctgtgcagggcaggaaagctccatgcacatagcccagcaaagagcaacacagagctgaaaggaagactcagaggagagagataagtaaggaaagtagtgatggctctcatcccagacttggccatggaaacctggcttctcctggctgtcagcctggtgctcctctatctatatggaacccattcacatggactttttaagaagcttggaattccagggcccacacctctgccttttttgggaaatattttgtcctaccataagggcttttgtatgtttgacatggaatgtcataaaaagtatggaaaagtgtggggcttttatgatggtcaacagcctgtgctggctatcacagatcctgacatgatcaaaacagtgctagtgaaagaatgttattctgtcttcacaaaccggaggccttttggtccagtgggatttatgaaaagtgccatctctatagctgaggatgaagaatggaagagattacgatcattgctgtctccaaccttcaccagtggaaaactcaaggagatggtccctatcattgcccagtatggagatgtgttggtgagaaatctgaggcgggaagcagagacaggcaagcctgtcaccttgaaagacgtctttggggcctacagcatggatgtgatcactagcacatcatttggagtgaacatcgactctctcaacaatccacaagacccctttgtggaaaacaccaagaagcttttaagatttgattttttggatccattctttctctcaataacagtctttccattcctcatcccaattcttgaagtattaaatatctgtgtgtttccaagagaagttacaaattttttaagaaaatctgtaaaaaggatgaaagaaagtcgcctcgaagatacacaaaagcaccgagtggatttccttcagctgatgattgactctcagaattcaaaagaaactgagtcccacaaagctctgtccgatctggagctcgtggcccaatcaattatctttatttttgctggctatgaaaccacgagcagtgttctctccttcattatgtatgaactggccactcaccctgatgtccagcagaaactgcaggaggaaattgatgcagttttacccaataaggcaccacccacctatgatactgtgctacagatggagtatcttgacatggtggtgaatgaaacgctcagattattcccaattgctatgagacttgagagggtctgcaaaaaagatgttgagatcaatgggatgttcattcccaaaggggtggtggtgatgattccaagctatgctcttcaccgtgacccaaagtactggacagagcctgagaagttcctccctgaaagattcagcaagaagaacaaggacaacatagatccttacatatacacaccctttggaagtggacccagaaactgcattggcatgaggtttgctctcatgaacatgaaacttgctctaatcagagtccttcagaacttctccttcaaaccttgtaaagaaacacagatccccctgaaattaagcttaggaggacttcttcaaccagaaaaacccgttgttctaaaggttgagtcaagggatggcaccgtaagtggagcctgaattttcctaaggacttctgctttgctcttcaagaaatctgtgcctgagaacaccagagacctcaaattactttgtgaatagaactctgaaatgaagatgggcttcatccaatggactgcataaataaccggggattctgtacatgcattgagctctctcattgtctgtgtagagtgttatacttgggaatataaaggaggtgaccaaatcagtgtgaggaggtagatttggctcctctgcttctcacgggactatttccaccacccccagttagcaccattaactcctcctgagctctgataagagaatcaacatttctcaataatttcctccacaaattattaatgaaaataagaattattttgatggctctaacaatgacatttatatcacatgttttctctggagtattctataagttttatgttaaatcaataaagaccactttacaaaagtattatcagatgctttcctgcacattaaggagaaatctatagaactgaatgagaaccaacaagtaaatatttttggtcattgtaatcactgttggcgtggggcctttgtcagaactagaatttgattattaacataggtgaaagttaatccactgtgactttgcccattgtttagaaagaatattcatagtttaattatgccttttttgatcaggcacagtggctcacgcctgtaatcctagcagtttgggaggctgagccgggtggatcgcctgaggtcaggagttcaagacaagcctggcctacatggttgaaaccccatctctactaaaaatacacaaattagctaggcatggtggactcgcctgtaatctcactacacaggaggctgaggcaggagaatcacttgaacctgggaggcggatgttgaagtgagctgagattgcaccactgcactccagtctgggtgagagtgagactcagtcttaaaaaaatatgcctttttgaagcacgtacattttgtaacaaagaactgaagctcttattatattattagttttgatttaatgttttcagcccatctcctttcatatttctgggagacagaaaacatgtttccctacacctcttgcattccatcctcaacacccaactgtctcgatgcaatgaacacttaataaaaaacagtcgattggtc

SEQ ID NO: 56487 - DNA, 3962 bp, Homo Sapiens
cgcgctcggcgccctgctcgccgggcagaggggaaggcggcggccggctggggatgggcggcccggctgcgccgaggggcgccgggaggctccgcgcgctgctgctggcgctggtggtcgcggggatccccgcgggcgcctacaacctcgacccgcagcgccccgtgcacttccagggccccgctgactcgttcttcggctacgcagttctggagcatttccacgacaacacgcgctgggtccttgtgggcgcaccaaaggcagattccaaatacagcccttcagtgaagtctcctggggctgtgtttaagtgccgtgttcacaccaaccctgaccggagatgcaccgaactggacatggctcgagggaagaatcggggcacgtcctgcggaaagacctgccgggaagaccgcgatgatgagtggatgggggtgagcctggcccgacagcccaaggctgatggccgtgtgttggcctgtgctcatcgctggaagaacatctactatgaagccgaccacatcctaccccatggcttctgctacatcatcccctccaacctccaggccaaaggcaggacgctgatcccttgctatgaagagtataagaagaagtacggagaggaacacggctcctgccaggctgggatagcgggcttcttcaccgaggagctggtggtgatgggtgctccagggtcattttattgggctggaaccatcaaagtgctgaaccttacggacaacacctatttaaaactgaacgacgaagtgatcatgaacaggcggtacacctacctgggctacgcagtgaccgctggccacttctctcacccgtccaccattgatgtggtaggaggtgccccacaggacaaaggcatcggcaaggtttatattttcagagctgaccgaagatcaggcaccttaattaagatctttcaagcatcaggtaaaaagatgggctcttacttcggctcctccttgtgcgcagttgacctgaatggggacggcctctctgacctgctggtgggggcccccatgttttctgagatcagggatgagggacaggtcactgtctacatcaacagaggaaatggagccctcgaggagcagctggctctgactggggatggtgcctacaatgcgcactttggagagagcattgccagcctggacgatctggacaatgatgggttcccagatgtggccattggtgcacccaaggaggatgacttcgcaggggcggtctatatctatcatggtgatgccggtgggatagtccctcagtactcaatgaaactgtctgggcagaagataaatccagtgctccggatgtttggtcagtccatatcgggaggcattgatatggatggaaatggctatcctgatgtcactgttggagccttcatgtccgacagcgtggttcttctcagagcaaggcctgtcattacggtggatgtctccatcttcctcccgggctccatcaacatcacagcgcctcagtgtcacgacggacagcagcctgtgaactgcctgaacgtcaccacctgcttcagcttccatggcaaacacgttccaggagagattggcctgaattatgttctgatggctgacgtggccaaaaaggagaagggccagatgcccagggtctactttgtgctgctgggagagaccatgggtcaggtcacagagaagctgcagctgacttacatggaggagacgtgtcgtcactatgtggcccatgtgaagcggagggtgcaggacgtcatcagcccgatcgtgtttgaagcagcctacagcctcagtgagcatgtgactggagaggaggagagggaactgccgcctctgacaccagttctccgctggaaaaagggacaaaagattgcccaaaagaatcagactgtttttgaaaggaattgccgttcagaggactgtgccgcagacctgcagcttcagggtaaactgctgctctccagtatggatgagaaaaccctgtatctagctttgggggctgtgaagaacatctccctaaacatctctatctccaacctcggagatgatgcctatgatgccaacgtgtccttcaatgtttcccgggagctcttcttcatcaacatgtggcagaaggaggagatgggcatctcctgtgagctgctggaatcggacttcctcaaatgcagcgtgggatttcctttcatgaggtcaaagtcaaagtatgaattcagcgtgatctttgatacaagccacctgtctggggaagaggaagttctcagcttcattgttactgctcagagtggcaacacggagcgctctgaatccctgcatgacaacaccctcgtgctgatggtgccactgatgcacgaggtggacacgtccatcaccggaatcatgtctccaacctcctttgtatatggcgagtccgtggacgcagccaacttcattcagctggatgacctggagtgtcactttcagcccatcaatatcacccttcaggtctacaacactggcccaagcacccttccagggtcatctgtcagcatctctttccctaatcgactctcatctggtggtgcagagatgtttcatgtccaggaaatggtggtgggccaagagaagggaaactgctctttccagaaaaacccaactccctgcatcatccctcaagaacaagaaaatatcttccacacaatatttgcttttttcacaaagtctggaagaaaagtcttggactgtgaaaaaccaggaatttcttgcctaacagcacactgtaactttagtgctcttgctaaagaagaaagtcgtactatagacatttacatgctgctgaacacagaaatactgaaaaaggacagttcgtctgtcatccagttcatgtcccgcgccaaggtgaaggtggatcctgccctaagggtggtggaaatagctcatgggaacccagaagaggtgacggtggtcttcgaggccctgcacaatctggagccccgtggctacgtcgtggggtggatcatcgccatcagtttgttggtgggaatcctcatcttcctgctgctggccgtgctgctctggaagatgggcttctttcgccgaaggtacaaagaaattatcgaagctgagaagaaccggaaagagaatgaagacagttgggactgggtccagaaaaaccagtgagctgccacaccagtcacatgacctgatcactagcctgtcatccttggtctttgtatcttccatatttggaagaaaaaaatcttctccagatttttcggaggccccactgatgctgttctcttcttcattctatcaagcccaggtgccagcctgaggcagccacttcggccaggtcacacgaccggggccagcaccacttcctttaaagatgaactctgaactttggagagtgagctacagagccgagcaatatttatggatgcaacacgcatggtcaaccctcaggggaaaactgttacctaaagtatttttataaatataagccttttatactgattatgtcttttatatttgtatcgatgttttattatttctattaaatagttatataattcactcaagcactgatatctggcctaaaatcttggaagtacatgtccatgaatacaaattttaaaggatgaaaatcttaccgtactttggaacttgctgtttaaaaagacagatgaaataagttgaagaaacctcatgtaatgaatccaccaggctggcagtggtgcatataaactgtgggtgtggcaagaccccgaagacatttcacatctttatcgcctcgatcaagtgtggagtcacatgctaatgtgtgctaaagaactgtaagtgttttttcatatgtacttttcattggaagattcccaacaagaatttggatggaaaacctgatccctagcaagaagtctgctctgtatcacctttatatagcagacatgtcaccctgcttctacacagatgatggatgaa

SEQ ID NO: 56488 - DNA, 5920 bp, Homo Sapiens
ggcaggtctcgctctcggcaccctcccggcgcccgcgttctcctggccctgcccggcatcccgatggccgccgctgggccccggcgctccgtgcgcggagccgtctgcctgcatctgctgctgaccctcgtgatcttcagtcgtgatggtgaagcctgcaaaaaggtgatacttaatgtaccttctaaactagaggcagacaaaataattggcagagttaatttggaagagtgcttcaggtctgcagacctcatccggtcaagtgatcctgatttcagagttctaaatgatgggtcagtgtacacagccagggctgttgcgctgtctgataagaaaagatcatttaccatatggctttctgacaaaaggaaacagacacagaaagaggttactgtgctgctagaacatcagaagaaggtatcgaagacaagacacactagagaaactgttctcaggcgtgccaagaggagatgggcacctattccttgctctatgcaagagaattccttgggccctttcccattgtttcttcaacaagttgaatctgatgcagcacagaactatactgtcttctactcaataagtggacgtggagttgataaagaacctttaaatttgttttatatagaaagagacactggaaatctattttgcactcggcctgtggatcgtgaagaatatgatgtttttgatttgattgcttatgcgtcaactgcagatggatattcagcagatctgcccctcccactacccatcagggtagaggatgaaaatgacaaccaccctgttttcacagaagcaatttataattttgaagttttggaaagtagtagacctggtactacagtgggggtggtttgtgccacagacagagatgaaccggacacaatgcatacgcgcctgaaatacagcattttgcagcagacaccaaggtcacctgggctcttttctgtgcatcccagcacaggcgtaatcaccacagtctctcattatttggacagagaggttgtagacaagtactcattgataatgaaagtacaagacatggatggccagttttttggattgataggcacatcaacttgtatcataacagtaacagattcaaatgataatgcacccactttcagacaaaatgcttatgaagcatttgtagaggaaaatgcattcaatgtggaaatcttacgaatacctatagaagataaggatttaattaacactgccaattggagagtcaattttaccattttaaagggaaatgaaaatggacatttcaaaatcagcacagacaaagaaactaatgaaggtgttctttctgttgtaaagccactgaattatgaagaaaaccgtcaagtgaacctggaaattggagtaaacaatgaagcgccatttgctagagatattcccagagtgacagccttgaacagagccttggttacagttcatgtgagggatctggatgaggggcctgaatgcactcctgcagcccaatatgtgcggattaaagaaaacttagcagtggggtcaaagatcaacggctataaggcatatgaccccgaaaatagaaatggcaatggtttaaggtacaaaaaattgcatgatcctaaaggttggatcaccattgatgaaatttcagggtcaatcataacttccaaaatcctggatagggaggttgaaactcccaaaaatgagttgtataatattacagtcctggcaatagacaaagatgatagatcatgtactggaacacttgctgtgaacattgaagatgtaaatgataatccaccagaaatacttcaagaatatgtagtcatttgcaaaccaaaaatggggtataccgacattttagctgttgatcctgatgaacctgtccatggagctccattttatttcagtttgcccaatacttctccagaaatcagtagactgtggagcctcaccaaagttaatgatacagctgcccgtctttcatatcagaaaaatgctggatttcaagaatataccattcctattactgtaaaagacagggccggccaagctgcaacaaaattattgagagttaatctgtgtgaatgtactcatccaactcagtgtcgtgcgacttcaaggagtacaggagtaatacttggaaaatgggcaatccttgcaatattactgggtatagcactgctcttttctgtattgctaactttagtatgtggagtttttggtgcaactaaagggaaacgttttcctgaagatttagcacagcaaaacttaattatatcaaacacagaagcacctggagacgatagagtgtgctctgccaatggatttatgacccaaactaccaacaactctagccaaggtttttgtggtactatgggatcaggaatgaaaaatggagggcaggaaaccattgaaatgatgaaaggaggaaaccagaccttggaatcctgccggggggctgggcatcatcataccctggactcctgcaggggaggacacacggaggtggacaactgcagatacacttactcggagtggcacagttttactcaaccccgtctcggtgaagaatccattagaggacacactggttaaaaattaaacataaaagaaattgcatcgatgtaatcagaatgaagaccgcatgccatcccaagattatgtcctcacttataactatgagggaagaggatctccagctggttctgtgggctgctgcagtgaaaagcaggaagaagatggccttgactttttaaataatttggaacccaaatttattacattagcagaagcatgcacaaagagataatgtcacagtgctacaattaggtctttgtcagacattctggaggtttccaaaaataatattgtaaagttcaatttcaacatgtatgtatatgatgatttttttctcaattttgaattatgctactcaccaatttatatttttaaagccagttgttgcttatcttttccaaaaagtgaaaaatgttaaaacagacaactggtaaatctcaaactccagcactggaattaaggtctctaaagcatctgctcttttttttttttacggatattttagtaataaatatgctggataaatattagtccaacaatagctaagttatgctaatatcacattattatgtattcactttaagtgatagtttaaaaaataaacaagaaatattgagtatcactatgtgaagaaagttttggaaaagaaacaatgaagactgaattaaattaaaaatgttgcagctcataaagaattgggactcacccctactgcactaccaaattcatttgactttggaggcaaaatgtgttgaagtgccctatgaagtagcaattttctataggaatatagttggaaataaatgtgtgtgtgtatattattattaatcaatgcaatatttaaaatgaaatgagaacaaagaggaaaatggtaaaaacttgaaatgaggctggggtatagtttgtcctacaatagaaaaaagagagagcttcctaggcctgggctcttaaatgctgcattataactgagtctatgaggaaatagttcctgtccaatttgtgtaatttgtttaaaattgtaaataaattaaacttttctggtttctgtgggaaggaaatagggaatccaatggaacagtagctttgctttgcagtctgtttcaagatttctgcatccacaagttagtagcaaactggggaatactcgctgcagctggggttccctgctttttggtagcaagggtccagagatgaggtgtttttttcggggagctaataacaaaaacattttaaaacttacctttactgaagttaaatcctctattgctgtttctattctctcttatagtgaccaacatctttttaatttagatccaaataaccatgtcctcctagagtttagaggctagagggagctgaggggaggatcttactgaaagcaccctggggagattgattgtccttaaacctaagccccacaaacttgacacctgatcaggtctgggagctacaaaatttcatttttctcctcactgcccttcttctgagtggcattggcctgaatcaaggaaagccaggccttgtgggcccccttctttcggctttctgctaaagcaacacctccagcagagattcccttaagtgactccaggttttccaccatccttcagcgtgaattaatttttaatcagtttgctttctccagagaaattttaaaataatagaagaaatagaaattttgaatgtataaaagaaaaagatcaagttgtcattttagaacagagggaactttgggagaaagcagcccaagtaggttatttgtacagtcagagggcaacaggaagatgcaggccttcaagggcaaggagaggccacaaggaatatgggtgggagtaaaagcaacatcgtctgcttcatactttttcctaggcttggcactgccttttcctttctcaggccaatggcaactgccatttgagtccggtgagggatcagccaacctcttctctatggctcaccttatttggagtgagaaatcaaggagacagagctgactgcatgatgagtctgaaggcatttgcaggatgagcctgaactggttgtgcagaacaaacaaggcattcatgggaattgttgtattccttctgcagccctccttctgggcactaagaaggtctatgaattaaatgcctatctaaaattctgatttattcctacattttctgttttctaatttgaccctaaaatctatgtgttttagacttagactttttattgccccccccccctttttttttgagacggagtctcgctctgacgcacaggctggagtgcagtggctccgatctctgctcactgaaagctccgcctcccgggttcatgccattctcctgcctcagcctcctgagtagctgggactacaggcgcccaccaccacgcccggctaattttttgtatttttaatagagacggggtttcactgtgttagccaggatggtctcgatctcctgacctcgtgatccgcctgcctcggcctcccaaagtgctgggattacaggcatgacccaccgctcccggccttgttttccgtttaaagtcgtcttcttttaatgtaatcattttgaacatgtgtgaaagttgatcatacgaattggatcaatcttgaaatactcaaccaaaagacagtcgagaagccagggggagaaagaactcagggcacaaaatattggtctgagaatggaattctctgtaagcctagttgctgaaatttcctgctgtaaccagaagccagttttatctaacggctactgaaacacccactgtgttttgctcactcccactcaccgatcaaaacctgctacctccccaagactttactagtgccgataaactttctcaaagagcaaccagtatcacttccctgtttataaaacctctaaccatctctttgttctttgaacatgctgaaaaccacctggtctgcatgtatgcccgaatttgtaattcttttctctcaaatgaaaatttaattttagggattcatttctatattttcacatatgtagtattattatttccttatatgtgtaaggtgaaatttatggtatttgagtgtgcaagaaaatatatttttaaagctttcatttttcccccagtgaatgatttagaattttttatgtaaatatacagaatgttttttcttacttttataaggaagcagctgtctaaaatgcagtggggtttgttttgcaatgttttaaacagagttttagtattgctattaaaagaagttactttgcttttaaagaaacttggctgcttaaaataagcaaaaattggatgcataaagtaatatttacagatgtggggagatgtaataaaacaatattaacttggaaaaaaaaaaaaaaaaaaa

SEQ ID NO: 56489 - DNA, 2152 bp, Homo Sapiens
ttctagcggcgctttctcccgctctcgcctccgcgctagcgccctgctgcttcggggcggaagtagcggagccgggctcggcccccttaaagggacagggactgctgcaacctacggggtgtacttgggaacgaggggtgaagcggcccaggtgaggctcgccatggccaaacagctgcaggcccgaaggctagacgggatcgactacaacccctgggtggagtttgtgaaactggccagtgagcatgacgtcgtgaacttgggccagggcttcccggatttcccaccaccagactttgccgtggaagcctttcagcacgctgtcagtggagacttcatgcttaaccagtacaccaagacatttggttacccaccactgacgaagatcctggcaagtttctttggggagctgctgggtcaggagatagacccgctcaggaatgtgctggtgactgttggtggctatggggccctgttcacagccttccaggccctggtggacgaaggagacgaggtcatcatcatcgaacccttttttgactgctacgagcccatgacaatgatggcagggggtcgtcctgtgtttgtgtccctgaagccgggtcccatccagaatggagaactgggttccagcagcaactggcagctggaccccatggagctggccggcaaattcacatcacgcaccaaagccctggtcctcaacacccccaacaaccccctgggcaaggtgttctccagggaagagctggagctggtggccagcctttgccagcagcatgacgtggtgtgtatcactgatgaagtctaccagtggatggtctacgacgggcaccagcacatcagcattgtctcagcagctgttctgttcggccttgggcagccagcctccctggcatgtgggaacggaccctgaccatcggcagcgccggcaagaccttcagcgccactggctggaaggtgggctgggtcctgggtccagatcacatcatgaagcacctgcggaccgtgcaccagaactccgtcttccactgccccacgcagagccaggctgcagtagccgagagctttgaacgggagcagctgctcttccgccaacccagcagctactttgtgcagttcccgcaggccatgcagcgctgccgtgaccacatgatacgtagcctacagtcagtgggcctgaagcccatcatccctcagggcagctacttcctcatcacagacatctcagacttcaagaggaagatgcctgacttgcctggagctgtggatgagccctatgacagacgcttcgtcaagtggatgatcaagaacaagggcttggtggccatccctgtctccatcttctatagtgtgccacatcagaagcactttgaccactatatccgcttctgttttgtgaaggatgaagccacgctccaggccatggacgagaagctgcggaagtggaaggtggaactctagccctgaagtcacgccttggccctgacatccccacatgcccgcagagatcctctttgagtgtctgtctttgtccaggtttcagacatttctaggttggggaagatgctattgggaaacctcttctccgtgacacagaatgttctgggtgggagccgcccttcttcatcttagagaaccaagtgcctcctgtctgaaaggtgagggtggcctgacctgggcctctccctgcccctccataggtgggtttgtagggtcttgtgttgcttctggtctctccaggcttggctgagacggacggtagacttccaccatgtaccgatcacatcccagctctgcatggcccctgctaaggctcaggtataacctcaccttccctggctcatcttggccttggggagttgcctttaggcttgagtcctcaagcctctccttttcgtccataataaaatgtttaagttattaagatccttattgacggcttctctctgcttcacactcatgctgatggctgatctaacttgtgaagaatgcccagaagaacctcagacacccccacaactttgtacaaatggttactgtagtcacatagtggcacaaccaggcctagcacccaaggccctcaaatgaattcctcactattaaaaaaaaaaaaaaaaaaaaaaaaaaaaaaaaaaaaaaaaaaaaaaaa

SEQ ID NO: 56490 - DNA, 3600 bp, Homo Sapiens
gaatcaacagaatttgtctttttgtgactggtttatttcacttaacttcatcctcaaggttcaacttaaaggtgtatccatgttgtagcacgtgtcagcattttctttcgttctcaggctaaatagtatttcattgtgtgtgtacaccatgtttcatgcattcattcatcccttgaaagattggtgggttgtttcctcctttttgcttttgtgaacagtgctacgaacatggttgtacaaacatctcttggagccccactagcagttcctttgggtatataccccaaagtggaattgctggatctggtagctccctttttaattttttgaggaatcgccacacagtttccataacagctgcaccattttacattcccaagaccttttttttttttttttttttaagaagaaaagatgtgtttctgcatttctggaagtctatgctgcatttccatttgttgaaatttaagaccagagtcatcttttctgctgtaattataatggtcactggcttgtgccttttcctcctctctctgccccatctgcacggggtctttgaacaagtcccagcaccttggtggacaagcctgtgtccctggcccatcatggaagccgctgcctttcagagtgggagtctgtaccctgttgcctcattccttgctgcgcccatgagtgagcttgtgcctgacctctccttccaggtggacttacacactgggctgtcggagttctcggtgacgcagcgccggctggcccatggctggaatgagtttgttgctgacaacagcgaacctgtgtggaagaaatacctggatcagtttaagaaccccctgatcctgctgctgctgggctctgccctggtgagtgtcctcaccaaggagtatgaggacgccgtcagcatcgccacggcagtgcttgtcgtggtcactgtcgccttcatccaggagtacaggtcggagaaatctctggaagagctgaccaagctggttcctccagaatgtaactgcctaagagaaggaaaactccagcacctgcttgctcgagaactggttcctggtgatgtcgtatctctctcgatcggagaccggatccctgcagacatccgactcactgaggtcacggacctcttggtggatgaatccagtttcaccggggaagccgagccatgtagtaaaacagacagccccttgacaggcggtggggacctcaccaccctcagcaacatcgtcttcatggggaccctggtgcagtatgggaggggccagggggtcgtgattggaacaggggaaagctctcagttcggagaagtgtttaagatgatgcaggctgaagagacacctaaaactcctttgcagaaaagcatggacaggctaggaaagcaactgacactcttctcctttggcataatcggtctcatcatgctcattggctggtcgcaagggaaacaactcctgagtatgttcacgatcggggtcagcctggctgtggcggctattccagagggtctgcccatcgtcgtcatggtgacgctggtcctgggagtgctgcggatggccaagaagcgggtcatcgtgaagaagttacccatcgtggagactttaggttgctgcagcgttctctgttctgacaagacggggactctgactgccaatgaaatgacagtgacccagcttgtaacgtcagatgggcttcgtgccgaggtcagcggagttgggtatgacggtcaagggactgtgtgtcttctaccatccaaggaagtcattaaggaattttccaatgtctcagtgggaaagttagtggaggcgggctgtgttgccaacaatgcggtcatcagaaagaacgccgtgatggggcagcccaccgagggtgcattgatggccctggcgatgaagatggacttaagtgatattaaaaattcatatataagaaaaaaagagattccattcagttcagagcagaagtggatggcggtgaaatgcagtctgaagactgaggatcaggaagacatttacttcatgaaaggggccttggaagaggtgatccgctactgcaccatgtacaacaacgggggcatccccctgccgctgacgccccagcagaggtcattctgcctgcaggaagagaagaggatggggtcgctcggtttgcgggtgctggccctggcttctgggcccgagctggggcggctgacgtttctaggtcttgtgggcatcattgaccccccgagagttggcgtgaaggaagcagtccaggttctctccgagtctggtgtgtctgtgaagatgataacgggggatgccctggagacggccttggccataggaagaaacatcggcctgtgcaacgggaagctgcaagccatgtccggggaggaggtggacagcgtggagaagggcgagctggccgaccgcgtggggaaggtgtccgtgttcttcaggaccagcccaaagcacaagctcaaaatcatcaaggctctgcaggagtcaggggcgatcgtggccatgactggggatggggtgaacgacgcagtggccctgaagtctgcagacattgggatcgccatggggcagacagggacggacgtcagcaaagaggccgccaacatgatcctggtggatgatgacttctcagccatcatgaatgcagtggaggaaggcaagggtattttttacaacatcaaaaactttgtccgattccagctgagcacgagcatctccgccctgagtctcatcactctgtccaccgtgttcaacctgcccagccccctcaacgccatgcagatcctatggatcaacatcatcatggatgggccaccggcgcagagcttgggggtagagcccgttgacaaagacgccttcaggcagccaccacggagtgtgcgggacaccatcctcagcagagccctcatcctgaagatcctcatgtccgcggccatcatcatcagcgggaccctctttatcttctggaaggagatgcctgaagacagagcaagcactccccgcaccacgacgatgacgttcacttgttttgtgtttttcgatctcttcaacgccttgacctgccgctctcagaccaagctgatatttgagatcggctttctcaggaaccacatgttcctctactccgtcctggggtccatcctggggcagctggcggtcatttacatccccccgctgcagagggtcttccagacggagaacctgggagcgcttgatttgctgtttttaactggattggcctcatccgtcttcattttgtcagagctcctcaaactatgtgaaaaatactgttgcagccccaagagagtccagatgcaccctgaagatgtgtagtggaccgcactccgcggcaccttccctaatcatctcgatctggttgtgactgtggcccctgccgtgtctcctcgtcaggggagacttttaggaggccgcagccttccatcaccggatcagtttttcctcttaggaaagctgcaggaacctcgtgggctccagggacccaggcccacatccatccagcgttcccgctggctgtgggacagacagggaggggcctgtacagaaacaccacactgtttattaaatcacaatgatttttatt

SEQ ID NO: 56491 - DNA, 1591 bp, Homo Sapiens
tagaatcgggggtttcagctcactgctccttttcttttttttctttctctcccccgcccacccccccaaaaataattgatttgctttacaatcatccacactgtgttttgtggatctttaattatatataacaatagtagtcattttaaatatatattctgaaatctttgcaaattttaacagaagagtcgaagctctgcgagacccaatatttgccaataagaatggttatgataattagcaccatggagcctcaggtgtcaaatggtccgacatccaatacaagcaatggaccctccagcaacaacagaaactgtccttctcccatgcaaacaggggcaaccacagatgacagcaaaaccaacctcatcgtcaactatttaccccagaatatgacccaagaagaattcaggagtctcttcgggagcattggtgaaatagaatcctgcaaacttgtgagagacaaaattacaggacagagtttagggtatggatttgttaactatattgatccaaaggatgcagagaaagccatcaacactttaaatggactcagactccagaccaaaaccataaaggtctcatatgcccgtccgagctctgcctcaatcagggatgctaacctctatgttagcggccttcccaaaaccatgacccagaaggaactggagcaacttttctcgcaatacggccgtatcatcacctcacgaatcctggttgatcaagtcacaggagtgtccagaggggtgggattcatccgctttgataagaggattgaggcagaagaagccatcaaagggctgaatggccagaagcccagcggtgctacggaaccgattactgtgaagtttgccaacaaccccagccagaagtccagccaggccctgctctcccagctctaccagtcccctaaccggcgctacccaggtccacttcaccaccaggctcagaggttcaggctggacaatttgcttaatatggcctatggcgtaaagagactgatgtctggaccagtccccccttctgcttgttcccccaggttctccccaattaccattgatggaatgacaagccttgtgggaatgaacatccctggtcacacaggaactgggtggtgcatctttgtctacaacctgtcccccgattccgatgagagtgtcctctggcagctctttggcccctttggagcagtgaacaacgtaaaggtgattcgtgacttcaacaccaacaagtgcaagggattcggctttgtcaccatgaccaactatgatgaggcggccatggccatcgccagcctcaacgggtaccgcctgggagacagagtgttgcaagtttcctttaaaaccaacaaagcccacaagtcctgaatttcccattcttacttactaaaatatatatagaaatatatacgaacaaaacacacgcgcgcacacacacacatacacgaaagagagagaaacaaacttttcaaggcttatattcaaccatggactttataagccagtgttgcctaagtattaaaacattggattatcctgaggtgtaccaggaaaggattttataatgcttagaaaaaaaaaaaaaaaaaaaa

SEQ ID NO: 56492 - DNA, 3143 bp, Homo Sapiens
tcttagttggtagtctgttatggaaacgctctttactgttattgtagtaccgtggtgacaacatgccattgaaatggaaaacgagctctcctgctatctggaaattcccagttcctgtgcttaaaacatccaggtcaactccactttctccagcatacatatctctcgtggaagaggaagaccaacacatgaaattgtcccttggaggcagcgaaatgggcctctcatcccatttgcagtcttccaaggcaggacctacacgcatctttaccagcaatacccacagttctgtggtgttacagggctttgaccagcttcgacttgaaggattgctttgtgatgtgaccctgatgccaggtgacacagatgatgctttccctgtgcatagagtcatgatggcatctgctagtgattacttcaaggctatgttcacaggtggaatgaaagaacaagatttaatgtgcattaaacttcatggtgtgagcaaagtcggtctaaggaaaattattgatttcatttatactgcaaagctttctcttaatatggacaaccttcaagacacgctggaagctgccagtttcctacagattctgccagttttggacttctgtaaagtgtttctcatatctggggtcactttagacaactgtgttgaagttggacggattgccaacacctacaatctaaccgaagtggataaatacgttaacagtttcgtcttgaagaattttcctgcattgctgagcacaggggagttcttgaaactcccttttgagcgtcttgccttcgtgctttccagtaatagccttaagcactgtactgaacttgagctctttaaggctacctgtcgttggcttcgcctggaagagcctcggatggactttgctgcaaaattaatgaagaacatacgatttccactgatgacaccacaggagctcattaattacgtgcaaacggtggatttcatgagaactgacaatacttgtgtgaatttgcttttggaagccagcaattaccaaatgatgccatatatgcagccagttatgcagtcagacaggactgccattaggtctgacaccactcacttggttacactaggaggagtgctgaggcagcagctggttgtcagtaaggaattgcgcatgtatgatgaaaaggcccatgagtggaaatcgttagcccccatggatgccccaaggtaccagcatggcatcgccgtcattggaaattttctctatgtggttggcggacagagtaattatgatacaaaaggaaaaacggcagttgatacagtcttcagatttgatcctcgatacaataaatggatgcaagttgcatctttaaatgaaaagcgcaccttcttccacctaagtgccctcaaaggatatctgtatgcagttggtgggcgaaatgcagcaggtgaactgcccacagtagaatgttacaatccaagaacaaatgaatggacctatgttgccaaaatgagtgagccccactatggccatgctggaactgtgtatggaggagtgatgtatatttcaggaggaattactcatgatactttccaaaaggagctcatgtgctttgaccctgatactgacaaatggatccagaaggcgccaatgaccactgtcagaggtctgcattgcatgtgtacagtgggagaaaggctctatgtcattggtggcaatcacttcagaggaacaagtgattatgatgatgtcctaagctgtgaatactattcacctatccttgaccagtggaccccaattgctgccatgttaagagggcagagtgatgttggggtcgctgtcttcgaaaataaaatctatgtggttggggggtattcttggaataatcgttgtatggtagagatagtgcagaaatatgatccagataaagatgaatggcataaggtttttgatctgccagaatcccttggtggcattcgtgcttgcacactcacagtttttccaccagaagaaaccacaccatcaccttctagagagtcccctctttctgcaccttaagatcatctctacaactaagatgctgtagttctatctttgcaatgtgtcataaattctcttctttttcccccttaagtagtatatatgttaggattaccctctggtaattgatacagatattggaaaaaagacaacattgatgttatttgtgctctttgtttggcctagaatgtttataaagtggtaacacaaccattctggaaatgtatcccatagaagctgatgtttaacatatgaaaaaaaaagtattgtctataaaatgtttcttcagtactttttaaatgctgtgtattgggtgtaaggtatttgtcatcttacattagtaaacccaataagccaagttgaaggtggattatagtaaatgtacaactgtgctcactaggcttcaagtaaaaagttttcctttcatctttgactgtaagatgtcaaagggaggcagcctgcttgaacaggaaacaatacacaaaaggttgccaactcgcatgagctacctccctcttttcataaagtatttttgacatatctgtcaacccacttgactgtgtgggtgcattgagaacacaaagtttcctagacacacaggagaagtagcttaaattcactaatattaatttaaaaagcagcatgaaccctctacttataaacaagggtttggtgtttttaaagtgtgtatacatacatacacatacacacatgcacatatgtcaaatataatttttttaaaaattgagtggcacatcaaagaaatgtgaaattaaaaagaattcttccaaaaagcagcttccattaaaatgggaattcagtatgcacatactgaatgcatatatgtagaaccatacagaatttaggtggataagggctagaaattttgagcaacaaaatttgtcacttgaccagattttatcttcaaaaactgtattctactccttctcctttgctgttgaggtaacttgcatattatatgtattctgtatactcagttcataaggttatttagcacaaagtatagcagcttcacctggagagctgcttttgctcagtaaattcaacttccatgttttatctttttttgttcaataaaaacatttaatgtcaaaaaaaaaaaaaaaaaaa

SEQ ID NO: 56493 - DNA, 5826 bp, Homo Sapiens
cccgctctgcttcagcgcacgctgaagacggcactaggacccagggaagtccccgagcggggttcgcggaaaggcagccagactcctccttatctccagtgtcaaacttgacatcagcctgcgagcggagcatggtaacttctccagcaatcagagcgctccccctcacatcagtggcatgcttcatggagatatgctcctctcactgccctctgcaccagcaacatggattgtcagctctccatcctcctccttctcagctgctctgttctcgacagcttcggggaactgattccgcagccttccaatgaagtcaatctactggattcaaaaacaattcaaggggagctgggctggatctcttatccatcacatgggtgggaagagatcagtggtgtggatgaacattacacacccatcaggacttaccaggtgtgcaatgtcatggaccacagtcaaaacaattggctgagaacaaactgggtccccaggaactcagctcagaagatttatgtggagctcaagttcactctacgagactgcaatagcattccattggttttaggaacttgcaaggagacattcaacctgtactacatggagtctgatgatgatcatggggtgaaatttcgagagcatcagtttacaaagattgacaccattgcagctgatgaaagtttcactcaaatggatcttggggaccgtattctgaagctcaacactgagattagagaagtaggtcctgtcaacaagaagggattttatttggcatttcaagatgttggtgcttgtgttgccttggtgtctgtgagagtatacttcaaaaagtgcccatttacagtgaagaatctggctatgtttccagacacggtacccatggactcccagtccctggtggaggttagagggtcttgtgtcaacaattctaaggaggaagatcctccaaggatgtactgcagtacagaaggcgaatggcttgtacccattggcaagtgttcctgcaatgctggctatgaagaaagaggttttatgtgccaagcttgtcgaccaggtttctacaaggcattggatggtaatatgaagtgtgctaagtgcccgcctcacagttctactcaggaagatggttcaatgaactgcaggtgtgagaataattacttccgggcagacaaagaccctccatccatggcttgtacccgacctccatcttcaccaagaaatgttatctctaatataaacgagacctcagttatcctggactggagttggcccctggacacaggaggccggaaagatgttaccttcaacatcatatgtaaaaaatgtgggtggaatataaaacagtgtgagccatgcagcccaaatgtccgcttcctccctcgacagtttggactcaccaacaccacggtgacagtgacagaccttctggcacatactaactacacctttgagattgatgccgttaatggggtgtcagagctgagctccccaccaagacagtttgctgcggtcagcatcacaactaatcaggctgctccatcacctgtcctgacgattaagaaagatcggacctccagaaatagcatctctttgtcctggcaagaacctgaacatcctaatgggatcatattggactacgaggtcaaatactatgaaaagcaggaacaagaaacaagttataccattctgagggcaagaggcacaaatgttaccatcagtagcctcaagcctgacactatatacgtattccaaatccgagcccgaacagccgctggatatgggacgaacagccgcaagtttgagtttgaaactagtccagactctttctccatctctggtgaaagtagccaagtggtcatgatcgccatttcagcggcagtagcaattattctcctcactgttgtcatctatgttttgattgggaggttctgtggctataagtcaaaacatggggcagatgaaaaaagacttcattttggcaatgggcatttaaaacttccaggtctcaggacttatgttgacccacatacatatgaagaccctacccaagctgttcatgagtttgccaaggaattggatgccaccaacatatccattgataaagttgttggagcaggtgaatttggagaggtgtgcagtggtcgcttaaaacttccttcaaaaaaagagatttcagtggccattaagaccctgaaagttggctacacagaaaagcagaggagagacttcctgggagaagcaagcattatgggacagtttgaccaccccaatatcattcgactggaaggagttgttaccaaaagtaagccagttatgattgtcacagaatacatggagaatggttccttggatagtttcctacgtaaacacgatgcccagtttactgtcattcagctagtggggatgcttcgagggatagcatctggcatgaagtacctgtcagacatgggctatgttcaccgagacctcgctgctcggaacatcttgatcaacagtaacttggtgtgtaaggtttctgatttcggactttcgcgtgtcctggaggatgacccagaagctgcttatacaacaagaggagggaagatcccaatcaggtggacatcaccagaagctatagcctaccgcaagttcacgtcagccagcgatgtatggagttatgggattgttctctgggaggtgatgtcttatggagagagaccatactgggagatgtccaatcaggatgtaattaaagctgtagatgagggctatcgactgccaccccccatggactgcccagctgccttgtatcagctgatgctggactgctggcagaaagacaggaacaacagacccaagtttgagcagattgttagtattctggacaagcttatccggaatcccggcagcctgaagatcatcaccagtgcagccgcaaggccatcaaaccttcttctggaccaaagcaatgtggatatcactaccttccgcacaacaggtgactggcttaatggtgtctggacagcacactgcaaggaaatcttcacgggtgtggagtacagttcttgtgacacaatagccaagatttccacagatgacatgaaaaaggttggtgtcaccgtggttgggccacagaagaagatcatcagtagcattaaagctctagaaacgcaatcaaagaatggcccagttcccgtgtaaagcacgggacggaagtgcttctggacggaagtggtggctgtggaaggcgtagcatcatcctgcagacagacaataattctggagatactggtggaagttccaagtccaataagacactcaaatatgagtacaaatgccttaaaatggaattgaaaaactctttattttcccctatcatttattggatgggtgggtggggtatttttttgtaattgcttttttaaatattagttaatggattaaatttaattcttcagcgtaaaatggtgaagaactagcatatagccattgatcataaactgactatcataaaatcaaaacaagtgaaataacaaaatggacatggtggctttgtttaggtagagccacaaaagaaaagacttgtaatatttttatatacagaggaaatctgtaacaggtattttgtttcttttaaagcaagcaacacagaggaatttatacctcaaactatctggccatatttactaccttatcactgcattattctcttttatctgtttaaagcatatagagatgaagtttgtagttgttttaagtactacacatttttaaattgttagcttccttaagtatatcatgtaaagaaatgtcttaatttttgaaaaaagtacatatttattttcttttgaattgtttttattgttttctatttatgccttgatgatttaatatggatttgttacagccaagtgccaaatgctctctcaaattgtcagcaatttaactagacacagataataatgggtttctttcagattttttgaaccatccacttacatatatttttaaaaaatgaaatccttttcctgttcatacactaaccaaatctctcaaatctgttatcccaatcattgttgcctctccgtttattataaactgtatgctcacaacttagtgtaatataccagcttgtatgcaatggattttcaaccagataacatacctttcctgctctggtgcttagagactatcaactccctcctttagtgaaggagccgtgttagagcttccgagaatagctccactggagagaagtggaatcctatatagaatgctgcactaattgacaacacagcctataggccaatgcatgagtaaaaaaaaaaacaattactggctcactggctttgaaaagtcacttactattgttgctgaaacttgctgagctgtttatagagaatgatgataacagaacttttcctctgtatcactggtgtttaggtgaattaattaaacattgtgatcattagtaccaggtattattatctttaagagtcttccacttcaatgcacatggtgcagttttggtgtgtaacttagaaggattgaacttctttgaatttactggacataacattttcagaatagttggtcatctagcaaccgcctcaaaatgtgtaagcaggagagaaatttctcatcacagggatttagacttactattacataaaggctaactatgagcttgctcattaattttgaaaagatgtacctggtggatatctagctagtaatatattctgaagcaacattttagctctattgatactctttctaatgctgatatgatcttgagtataagaaatgcatatgtcactagaatggataaaataatgctgcaaacttaatgttcttatgcaaaatggaacgctaatgaaacacagcttacaatcgcaaatcaaaactcacaagtgctcatctgttgtagatttagtgtaataagacttagattgtgctccttcggatatgattgtttctcaaatcttggcaatattccttagtcaaatcaggctactagaattctgtattggatatataagagcatgaaatttttaaaaatacacttgtgattataaaattaatcacaaatttcacttatacctgctatcagcagctagaaaacattttttttttaaatcaagtattttgtgtttggaatgttagaatgagatctgaatgtggtttcaatctaattttttcccagactactattttcttttttaggtactattctgagcatactcaacaaaacccatgcatttcataaactaatagaagttgaggattgttgaatctatttcacttattttggctgtggtttccatctgaaagtagaggttgtatacaccatatactgttcttcattttattaatatttttctccttgacctctcataaatttactttacacaattcttaccctgtacatatgtaaacataagtgtacgattcttaaccatggagtagaggtactagaatgcttacggccatctctttgtacaggaactgcattgactttcagtaaacataaagccacaactcctacatgatgttatgtaccatatgatctgttttgtatcttaaatttgatttacatatattatttatttctggtaactcactcagtttatgctgtgctaaatatcaatcaagccatgtataaatgtgatatgattggcaatatgtgtttactttaaacttgtcttttcaaaatattactcagtttatgttgtacaatgtagatggcctcttactaatgtaaaatgatttgtagtggaaacatttatatttttataataaacataatgaaaatattttttacagattggaaaaaaaaaaaaaaaaaaa

SEQ ID NO: 56494 - DNA, 2733 bp, Homo Sapiens
ggtagtttccaagagagacgctgagggatgtttagaaagcctgggacctgcagatgccatgtcaggcacgcttgctcctgcataggagactaaataatctcgatatataaggatggcagtctgttgtcttagatcagtttgagaagcagctctggcagcggggggtgtaggtgtgttgcactacactgaatggaataaggctaaaaatatgtttagtgtctgataagaacgccagttttctcaagctctcatttaacgtcggactttctgttttgcttttaaagaaaaatgttttacaagggcagcatgaagcggacaaaatctggagcaaagaaggattttatgctgttgtcatttttctcagcatctttgttattatagtaacgtgtttgatgattctttacagattaaaagaaagatttcagctttccttaagacaagacaaagagaaaaaccaggagatccacctatcgcccatcacattacagccagcactgtccgaggcaaagacagtccacagcatggtccaacctgagcaggccccaaaggtactgaatgttgtcgtggaccctcaaggccgaggtgctcctgagatcagagctaccaccgctacctctgtttgcccttctcctttcaaaatgaagcccataggacttcaagagagaagagggtccaacgtatctcttacattggacatgagtagcttggggaacattgaaccctttgtgtctataccaacaccacgggagaaggtagcaatggagtatctgcagtcagccagccgaattctcacaaggtctcagctgagggacgtcgtggcaagttcacatttactccaaagtgaattcatggaaataccaatgaactttgtggatcccaaagaaattgatattccgcgtcatggaactaaaaatcgctataagaccattttaccaaatcccctcagcagagtgtgtttaagaccaaaaaatgtaaccgattcattgagcacctacattaatgctaattatattaggggctacagtggcaaggagaaagccttcattgccacgcagggccccatgatcaacaccgtggatgatttctggcagatggtttggcaggaagacagccctgtgattgttatgatcacaaaactcaaagaaaaaaatgagaaatgtgtgctatactggccggaaaagagagggatatatggaaaagttgaggttctggttatcagtgtaaatgaatgtgataactacaccattcgaaaccttgtcttaaagcaaggaagccacacccaacatgtgaagcattactggtacacctcatggcctgatcacaagactccagacagtgcccagcccctcctacagctcatgctggatgtagaagaagacagacttgcttcccagggccgagggcctgtggttgtccactgcagtgcaggaataggtagaacagggtgttttattgctacatccattggctgtcaacagctgaaagaagaaggagttgtggatgcactaagcattgtctgccagcttcgtatggatagaggtggaatggtgcaaaccagtgagcagtatgaatttgtgcaccatgctctgtgcctgtatgagagcagactttcagcagagactgtccagtgagtcattgaagacttgtcagaccatcaatctcttggggtgattaatcaaattacccacccaaggcttctagaaggagcttcctgcaatggaaggaaggagaagctctgaagcccatgtatggcatggattgtggaagactgggcaacatatttaagatttccagctccttgtgtatatgaatgcatttgtaagcatcccccaaattattctgaaggttttttgatgatggaggtatgataggtttatcacacagcctaaggcagattttgttttgtctgtactgactctatctgccacacagaatgtatgtatgtaatattcagtaataaatgtcatcaggtgatgactggatgagctgctgaagacattcgtattatgtgttagatgctttaatgtttgcaaaatctgtcttgtgaatggactgtcagctgttaaactgttcctgttttgaagtgctattacctttctcagttaccagaatcttgctgctaaagttgcaagtgattgataatggatttttaacagagaagtctttgtttttgaaaaacaaaaatcaaaaacagtaactattttatatggaaatgtgtcttgataatattacctattaaatgtgtatttatagtccctcctatcaaacaattacagagcacaatgattgtcattgggtatatatgtatttactctctattattgggcataaaggtggcttctgctccagaactctatccactgtatttccacatcgtgagtcattttactttaaaagggaaaaacaaatttgtagcaactctgaagtatcaagagttttaactacttgtctctcttttgctaagaagggatttttgaatatgctatctacctggaatctctctctcaacaaaaggtatatgccttcaggaatgatataatctgtcccattttcgaggctccttataaggacatttccatgtatgtccttacatttctgaaagctttcaatcttcaagagccaaaaaaaattaaaataactaccctcagcaaacactagctgttctgctcatatatgaatttttaatgcagcaatgttgactttgtttcatactgccaataaactcttaatact

SEQ ID NO: 56495 - DNA, 2727 bp, Homo Sapiens
ggggacactggatcacctagtgtttcacaagcaggtaccttctgctgtaggagagagagaactaaagttctgaaagacctgttgcttttcaccaggaagttttactgggcatctcctgagcctaggcaatagctgtagggtgacttctggagccatccccgtttccccgccccccaaaagaagcggagatttaacggggacgtgcggccagagctggggaaatgggcccgcgagccaggccggcgcttctcctcctgatgcttttgcagaccgcggtcctgcaggggcgcttgctgcgttcacactctctgcactacctcttcatgggtgcctcagagcaggaccttggtctttccttgtttgaagctttgggctacgtggatgaccagctgttcgtgttctatgatcatgagagtcgccgtgtggagccccgaactccatgggtttccagtagaatttcaagccagatgtggctgcagctgagtcagagtctgaaagggtgggatcacatgttcactgttgacttctggactattatggaaaatcacaaccacagcaaggagtcccacaccctgcaggtcatcctgggctgtgaaatgcaagaagacaacagtaccgagggctactggaagtacgggtatgatgggcaggaccaccttgaattctgccctgacacactggattggagagcagcagaacccagggcctggcccaccaagctggagtgggaaaggcacaagattcgggccaggcagaacagggcctacctggagagggactgccctgcacagctgcagcagttgctggagctggggagaggtgttttggaccaacaagtgcctcctttggtgaaggtgacacatcatgtgacctcttcagtgaccactctacggtgtcgggccttgaactactacccccagaacatcaccatgaagtggctgaaggataagcagccaatggatgccaaggagttcgaacctaaagacgtattgcccaatggggatgggacctaccagggctggataaccttggctgtaccccctggggaagagcagagatatacgtgccaggtggagcacccaggcctggatcagcccctcattgtgatctgggagccctcaccgtctggcaccctagtcattggagtcatcagtggaattgctgtttttgtcgtcatcttgttcattggaattttgttcataatattaaggaagaggcagggttcaagaggagccatggggcactacgtcttagctgaacgtgagtgacacgcagcctgcagactcactgtgggaaggagacaaaactagagactcaaagagggagtgcatttatgagctcttcatgtttcaggagagagttgaacctaaacatagaaattgcctgacgaactccttgattttagccttctctgttcatttcctcaaaaagatttccccatttaggtttctgagttcctgcatgccggtgatccctagctgtgacctctcccctggaactgtctctcatgaacctcaagctgcatctagaggcttccttcatttcctccgtcacctcagagacatacacctatgtcatttcatttcctatttttggaagaggactccttaaatttgggggacttacatgattcattttaacatctgagaaaagctttgaaccctgggacgtggctagtcataaccttaccagatttttacacatgtatctatgcattttctggacccgttcaacttttcctttgaatcctctctctgtgttacccagtaactcatctgtcaccaagccttggggattcttccatctgattgtgatgtgagttgcacagctatgaaggctgtacactgcacgaatggaagaggcacctgtcccagaaaaagcatcatggctatctgtgggtagtatgatgggtgtttttagcaggtaggaggcaaatatcttgaaaggggttgtgaagaggtgttttttctaattggcatgaaggtgtcatacagatttgcaaagtttaatggtgccttcatttgggatgctactctagtattccagacctgaagaatcacaataattttctacctggtctctccttgttctgataatgaaaattatgataaggatgataaaagcacttacttcgtgtccgactcttctgagcacctacttacatgcattactgcatgcacttcttacaataattctatgagataggtactattatccccatttcttttttaaatgaagaaagtgaagtaggccgggcacggtggctcacgcctgtaatcccagggtgctgagattacaggtgtgagccaccctgcccagccgtcaaaagagtcttaatatatatatccagatggcatgtgtttactttatgttactacatgcacttggctgcataaatgtggtacaagcattctgtcttgaagggcaggtgcttcaggataccatatacagctcagaagtttcttctttaggcattaaattttagcaaagatatctcatctcttcttttaaaccattttctttttttgtggttagaaaagttatgtagaaaaaagtaaatgtgatttacgctcattgtagaaaagctataaaatgaatacaattaaagctgttatttaattagccagtgaaaaactattaacaacttgtctattacctgttagtattattgttgcattaaaaatgcatatactttaataaatgtatattgtattgtaaaaaaaaaaa

SEQ ID NO: 56496 - DNA, 5405 bp, Homo Sapiens
gccattctgtgacagttgcctttagtattcagtacagtaacatacagtacaggtttgtagcctaggagtcctaagccataccgtgtaccctaggtatggtggctacaccacctaggtttgtgtaagtatacgctatgatattagcacaatggtgaaataacctagtgacccatttctcaagctcctcacgtggcaagcaatgcatgactgcatatgaaagctcttaaatagggattgtttctaaattaatctcaaaacagtcattatttactatttatggaattttttttaaaaaaaggagcaaaagtatcatttcagtgggaacttaacttggggctacagtgttttatttaacttttaccccaaagttgcaaagtgttttgaaatttttccctgtaaaataattattttaattcaatttaaataaaacccaccaaggagacttcaagctttaagaagtctagcttcctgtgaaatgtgagaggaagtcagcactcatttcagaaatctgattataataatagctccatccctaaatgaggtgaatcttggaatctcttccattttattttattttatttttttgagatggagtttctctcttgttgcccaggctgaagtgcaatgttgtgatctcggctcactgcaacctctgcctcccaggttcaagcgattctcctgctttggcctcctgagtagctgggattgcaggtatgcaccaccacacctggctaattttgtatttttagtagagacggagtttcaccatgttggtcaggctggtctcgaacttctgacctcagtgatccccccacctcggcctcccaaagttctgggattatgggtgtgagccaccacacccggccccccttcaattttaaagccatcactatgcaccctatgtctatgccaggcactaaaataagatgaagcaccttcttggagtttacatgctggtaattatgccagacagtaataaaataggtaagaacggctgtgggggaagtcagctgggttctagttacagtcgcatttcaggaaatgatttaacatgctgactttaacaacctaagcctcttctccatgtgtgcacacagggtagatctctgaacacaggtgaccctagaagtgctgtaacttctaggggaatggctgtgttgagtcaaggcaggatgacagttcagcctcctcccaggctagtgcaaagggctcttcactcggattaaaaccttctctcccagaccgaattgccaactcccaacacccctcctacagaaaatttggagtcctcgcttattccctggcagcccctacctaatagggtggtgaattaattatcaaacatgcgacagtttagcgaaaatggcaacactttggaataaatgactgtaatgtgcatcctggcgcccattttgcaggtcagttgctctccctggaaggaagagtgttctcggatttcaccttaaaggaggaaggctgccagaactgaactagcacttctgaatatcctgaggcgaggtccggtgacttccttgggaagctctgccgcgcccccatcccaccctaccccaccctaccccaccacagcaggcgctggagtcctgggaccaccaggatctgaggcccaaatccttcctcactaaggggaggagaggggtgctccggcagggcaggatgggaaggcgtgcttgggcgggattgtgacataagagtgccctggtgacatggagcagatctgtggcataaataaaggtgtcataaagacagggcgggactcatgcttacaaggggcacgagcgtctcggagctgccagaatgacttccgctcagtgcccggcactagcgtgtgtcatgtccccgctgcgtttctggggcccatggcccctccttatgtggcaactattgtggctactagtcaaggaggctcagcctctggagtgggtcaaggacccgctccagctgacctctaaccccctggggccgcctgagccctggtcttcccactcctcccatttcccacgggaatctccccatgcgcctactctcccagcagacccgtgggactttgatcacctggggccctctgcttcctcagagatgccagccccaccccaggaatcgactgaaaatttggttccattcctggacacctgggattcagctggagagctgcccctggagccagagcagttcttggcttcacagcaggatttaaaggacaagctgagtccacaggaaaggctccctgtttcgcccaagaagctgaagaaagatccagctcagcgttggagccttgctgagattattggaattatacaccaattatccacacctcagagtcagaaacagactttgcagaatgaatattccagtacagatacaccgtatcccggtagcctgcctccagaactccgggtgaagtcagatgagcctccagggccctctgagcaagttggaccttctcaattccatctagagcccgaaactcaaaatccagagacccttgaagacatccagtcctcttcactccagcaagaagccccagcacagcttccacagctccttgaggaagaaccttcttcaatgcagcaggaggccccagctctgcctccagagtcctctatggagagtctaactctaccgaatcatgaggtgtcagttcaacctccaggtgaggatcaagcttattatcacttgcccaacattacagttaaacctgcagatgtggaggttaccataacttcagagcctaccaatgagacagaatcttcccaagcccagcaggagaccccaattcagtttccagaggaggtggaaccttctgcaacccaacaggaggccccaattgagcctccagttcctcctatggagcatgaactttccatcagtgagcagcagcagccagttcagccttctgagtcttctagggaggtcgaatcttctccgacccagcaggagaccccaggtcagcctccagaacatcatgaagtcacagtttcacctccaggtcaccatcaaactcatcatttagcttcacccagtgtctctgtgaagcctccagacgtgcagctcaccatagcagcagagcctagtgcagaggtgggaacttctctagtccaccaggaggctacaactcggctctcagggtcaggtaatgatgtagaacctcccgccatccagcacgggggcccacctctgcttccagagtcatcagaagaagctggacctttagcagttcaacaggagacttcatttcaatctccggaacctattaataatgagaacccctctccaacccagcaggaggctgcagctgagcatccacagaccgctgaggagggtgagtcttccctaacccatcaggaggccccagctcagactccagagttccctaatgtagttgtagctcaacctccagagcattcacacctgactcaagccacagttcaacctttggatctggggtttaccatcactccagaatccatgacagaggttgaactttctccaaccatgaaggagaccccaactcagcctcctaagaaagttgtaccccaacttcgagtatatcaaggggtaacaaatccaacaccaggtcaggatcaagctcagcatccagtgtcacccagcgttacagttcaacttttggacctgggacttaccatcactccagaacccactacggaggttggacattctacacccccgaagaggactatagtttctccaaagcatcctgaggtgacacttccacatccagaccaggttcagactcagcattcacacctgactcgagccacagttcaacctttggacctggggtttaccatcactccaaaatccatgacagaggttgaaccttctacagccctgatgactacagctcctcctccaggacaccctgaggtgacacttccaccttcagacaagggtcaggctcagcattcacacctgactcaagccaccgttcaacctctggacctggagcttaccataactacaaaacctactacagaggttaaaccatctccaaccacggaggagacctcaactcagcttccagacctgggacttgccatcattccagaacccactacagagactggacattctacagccctggagaagactacagctcctcgtccagaccgggttcagactctgcatcgaagcctgactgaagtcacaggtccacctactgaactagaacctgctcaggattcactggtgcagtctgaaagttacacccaaaataaggctttaactgcaccagaggaacacaaggcctccacaagcaccaacatatgtgagctctgtacctgcggagatgagatgttgtcatgtattgatctcaacccagagcagaggctccgccaagtgcctgtgccagagcccaacacccacaatggcaccttcaccatcttgtaagaatcacttttcctcaattgtcctctgtgtcctgcctgacatggcagccttttcctggaggccttcctgggccttctttatctccccaagccatatggacaactgactttctgctttcacctttgcttgtcaactctcccttctcctcattctcttttaatgttaggccccttctccagtcttttccttttactctggtcttttactcgtttttgtatccatttttatttagccccatcacatcattgcttaaccgctgctctcctcccattttcgcttcaccctctttacagcagcctgtccctctcccgatctcagtgatgatgctctaagtggttaagagttgattccggagccaggctgcctgggtttgaacccagatctatttattagcttggtgacccagagcaagttattctgcctgtgactcaatttcctcacctttaaactggggatcatgctagttagcatttcataggattgttgtgaaatttaggtgagtgaatatatgaaacacttcatcagtgcttagcatatgtaggagagttggctgttcacatgattattcagtcctttagttttgtccagaactcatttttgtccctagctttctatatgtagaactagttttatgtcaaacccagggccaagtatgctactgtctccagaacacaaaaatgataggagggaagaggctgggtgtggtggctcacgcctgtaatcccagcactttgggaggccgaggcgggcggatcacgaggtcaggagatcaagaccatcctggctaacatggtgaaaccccatctctactaaaaatacagaaaaaaattagccaggcatggtggtgggtgcctggagtcccagctacttgggaggctgaggcaggagaatggcgtgaacctgggaggcagagcttgcagtgagccgagattgcaccactgcactccagcctgggcgacagagcaagactccatctc

SEQ ID NO: 56497 - DNA, 2392 bp, Homo Sapiens
atggttactgcatccgcccggggcgggacatccccaggacgcccagcctctaggggtgcgaggtgggaagctctggagcggcccagcgcaggggcgggcaagccaggaggcaaagcggtttcctcacgcctccaccccacccacacagttgtcaaggagacaaagcgcttcccttcagcgctgtctccctcccctttggttagagggcagggtgggctggaagactgtccgaaaggttgggtactggcgcgctcccagcatctctcccatccaagctcgcaacgcctgcgccgagacccggtaccgggtacaacccgaggcacgcgcatgcgcgcgatggagtttttgcgcgtgcgccgttgtggccccaggaagctggggtacccgcgcggcgctaacgttgcggctgcgcagttgcggcctgctggtggggctcggcggagcgcagttctgcgcctgcgctgtgctggggtaggtgggaatgaaaccctggcggccgcagaagcccgagccctgacccaccggcggctgcggcggagccgcgccggcgccccccatgcgccagacggcaggacggcggcgtcggggggcgccatggcctcggcggcggcgggcgaagcggaggaaaccacccggttgcgcaagccgcgcttctcattcgaagagaaccagatcctgatccgcgaggtgcgcgcccactacccgcagctctacggcgcgcagagccgtcgggtgagcgtggcagagcggcggcgcgtgtgggacggcatcgccgccaagatcaacggtatcaccagctggaagcgcacgggccaggaggtgcagaagcgctggaacgacttcaagcgccgcaccaaggagaagctcgctcgcgtgccgcactccacgcagggcgccgggcccgccgcggaggacgctttctccgcggaagaggagaccatttttgccatcctggggccaggtgtggcggcgccgggggcaggtgctggggcggaggagccccctgcggccccctcttcacagccgccgcccccaagcgcctgccctcagcgctacgtgttgtcggaagaccgccgggaggaccgacgtgcagatacatcagcccacagcaaggcgggctccagcagcccggagccatgggcccggccctcctgcactccccaggaagggggctgcccacggcccaaggagcgtgagtcaccacccccttcggccctgcagccggtccagctgcctcgcctggccttgtctccaccacccccagcccctccactgccacccccaccgccactggcccaagtggcaccctcaccccctagccccccaccccctcctcggcctccacccacgctctcggcctcagacccctccctggacttcctgcgggcccagcaggagactgccaacgccatccgggagctggccggcacccttcgacagggactggccaaactgagcgaggccctcagcgctctgctgccccttctgccaggaaccccagttgactccctgcctccacctctgcccccacccccacccccaccgccacctcccaggcctgtcctgcccccaccggcccccaaggtggagatcaccccagagcccgtgtccgtggtggctgctgtggtggacggggcagtggtggcagccaggggagtgatcattgccccaaggagcgaggagggggcaccccggccccccccagccccgctccctccgcacgactcccccccacacaagcggagaaaaggtttccctacacggaaaaggcgcggccgatggaaatctccgtgaaatctactatctatgatcctgcctgcaacccctctccccagcttggcgcagtcgaggggggcgatgctctctgcccatcccagctgcaccctagctccctgctccagggatgtgagcacccactccctgtgctagttagtgcctgattctctggggggggcctcagtaatgggcccccccaacccctttctctggtacagtgctgtctgcctggctgcctcccttaaccctgacttctaagccatcaatttcatgttatttattattgccctatgtggggtggggagggaacctctcgggtctgcacatctccccttccctaacagttcctgttcttgacttgaagagaattgacccgtgggggactccccacctccccaacccagactttggagcgggtgggagttgtaagacaaatcaaaatacggatgacaaagaggatatagccgtgtataccccagggagaggaggcgccgagttctgatgggagaggtacaggttgggttctctgcctaccattgctgtctctgacttccagagctcaaccccctcctttctcccagtggtgacaagatatcaataaacttatttttaatac

SEQ ID NO: 56498 - DNA, 2561 bp, Homo Sapiens; identical to SEQ ID NO: 29395

SEQ ID NO: 56499 - DNA, 4791 bp, Homo Sapiens
cggaatgcaaacaaagctcgcgggcgcctgtgcggggctcgcggggaagcccagaaagtttgttttatgatggcttgagtgcgcgagcgtgtgcaggggagcgaggctgccaagtttctctctcctgttttgtgatttggggagaggtgtttctcccatgaacaagcggaggcttgggggctcgtgctgtggggggcacctgtctctcgttttatttttttggaggaggggtgtaactcatcatgtccaaagtgatccagaagaagaaccactggactagcagggttcacgaatgcaccgtgaagcggggaccccagggcgagctgggggtgacggtgctgggaggcgcggagcacggggagtttccgtacgtcggagcggtggcggcggtcgaggcagcggggcttcccggcggcggcgagggcccgaggctgggcgaaggggagctgcttctggaggtgcagggggtccgggtgtccggcttgccccgctatgacgtgctgggggtcatcgacagctgcaaggaggccgtcaccttcaaggccgtcagacaaggaggaaggctgaacaaggacctgcgacattttctcaatcagcgattccagaaggggtttcctgatcatgagctccagcagaccataagggataacctttaccgccatgctgtgccttgcacaacccgatctcccagagaaggagaagtgcctggcgtggactataactttctgactgtgaaggagttcttggacctcgagcagagtgggactcttctggaagtcggcacctatgaaggaaactattatgggacacccaagcctcctagccagccagtcagtgggaaagtgatcacgacggatgccttgcacagccttcagtctggctctaagcagtcgaccccgaagcgaaccaagtcctacaatgatatgcaaaatgctggcatagtccacgcggagaatgaggaggaggatgacgttcctgaaatgaacagcagctttacagccgattctggtgaacaagaggagcacactctccaagaaacagcattaccacctgtgaatagtagcatcatcgctgctcccatcacggacccttctcagaagttccctcaatacctacctctttctgcagaggataatttaggtcctctacctgaaaactgggagatggcctatactgaaaatggagaagtctattttatagaccataacacgaaaacaacatcttggttagaccctcggtgcctaaacaagcagcagaagccactggaagagtgtgaagatgatgaaggggtacacaccgaggagctggacagtgaactagaactgcctgctggttgggaaaagattgaagaccctgtctatggtatctactatgtagaccacatcaacaggaagacacaatatgagaacccggttctagaagccaaacggaagaagcagcttgagcagcagcagcagcagcaacagcagcagcaacagcagcagcagcagcagcagcagcagcagacagaagaatggacagaagatcactcagcccttgtgcctcctgttattccaaaccaccctccaagcaatccagagccagccagagaagttccacttcagggcaaacccttttttacacgaaacccttctgagttgaaaggcaagttcattcacacaaagctgcggaaaagcagtcgtggctttggcttcacggtggttggaggggatgaacctgatgagtttctccagatcaagagcttggtcctagatggtcctgctgcattggatggcaagatggaaacaggggatgtgattgtaagtgtgaatgacacctgtgttttgggacacacacatgctcaagttgtgaagatcttccagtccatccccattggtgccagcgtggaccttgaactctgccgaggttatccattgccttttgatccagatgaccccaatacaagtttagtgacctcggtagccattttggataaagaaccaattattgtgaatgggcaagagacctatgattcaccagctagccacagtagtaaaacaggcaaagtcaatggcatgaaggatgccaggccaagcagcccagcggacgtggcttcaaatagttctcatggttatcctaatgacactgtttctttggcttcctccatagccactcagccagaactcataactgttcatattgtcaaagggccaatgggctttggttttactatcgcagacagtcctggtgggggtggccaaagagtgaaacagattgttgacagcccaaggtgccgaggcctgaaagaaggggatctcatagtggaagttaataagaagaacgtgcaggccctaactcacaaccaagtggtggatatgctggttgagtgtcctaagggaagtgaggtcacattgttggtgcaacgaggagggctgccagttcccaagaagagcccaaagtcgcaaccactggaaaggaaagacagccagaatagttctcagcacagtgtttccagccaccgaagcctgcacacagcatccccaagccacagcacacaggtgctccccgagttcccacctgcagaggcccaagctccagatcaaactgacagctctggccagaaaaaaccagatccttttaaaatctgggcccagtccaggagcatgtatgaaaaccgacctatgtcaccttcacctgcgtcgggattgagcaagggtgagagagagagagaaatcaattccacgaattttggagaatgtccgattccagattaccaggaacaggacatcttcctctggagaaaagagactggatttggatttaggattctgggtggaaatgaaccaggggaacctatttatattggtcacatcgtaccactgggtgctgctgatactgacggccgcctgaggtctggagatgaattaatctgtgtggatgggacgccagtaattggaaaatcacaccagcttgtggtccagcttatgcaacaagctgccaagcaaggccacgtcaatctcacggtgcggcgtaaagtggtttttgcggtgcccaaaaccgagaacgaggtgccctcgccagcctcctctcatcacagtagcaaccagccggcctcgctgacagaagagaagcgcactccgcagggcagccagaactcgctgaacacggtgagctcgggcagcggcagcaccagcggcatcggcagtggcggcggcgggggcagcggcgtggtcagcaccgtggtgcagccctacgacgtggagatccggcgcggggagaacgagggcttcggcttcgtcatcgtgtcctcggtgagcaggcccgaagcaggcacgacctttgcaggcaatgcatgtgtggctatgcctcacaaaataggtcggattattgaggggagccctgctgaccgctgtggcaagctgaaagtaggagaccggatcttggcagtaaatggatgttccatcaccaacaaatcccattcagacattgtgaacctaatcaaggaagcgggaaacacagttaccctccgcatcattcctggggatgagtcctcgaatgccaccttgctgaccaatgcagagaagattgccaccatcaccaccacacacaccccttctcagcaagggacccaggagacaaggaataccaccaaaccaaagcaggaatctcaatttgagttcaaagcaccccaagcaacacaggagcaagatttttacactgtggaactggaaagaggagccaagggatttggctttagccttcgaggaggccgagagtataacatggacctctatgttctgcgcttagcagaggacggtcctgcggagaggtgtggaaagatgaggattggtgatgaaattttagagatcaatggtgagaccaccaaaaacatgaagcattctcgagctatagaactgattaagaatggtggccgcagagttcgtctgtttctgaagcggggagacggctcagtaccagaatatggtgggtcaaactatgaaaacattccttccttccctggcatgactccatgaatttgtctccagaacggcagcaggaaagtcttttttgtttcccctattcaccagtgtcttaccagcctctcgcaccatgtgattatttgcctcgcttgttctgaaatctctacacatttcatccttttgcttgcttacgtggactggggcatggcctaagacaagatctttatagccccctttctgataatcagagagaacgttttgtctagtccgaccaagagcgaaggaatgtttgtttgtactgtgccaaactgttcctcagatccaattgttagcacaaaatgactatatactccttttaagaagcaggaaagcaggtttcctgagtgatatgttgaggcacaattattttttcctttttggttacttggtgtctttatttaagaggcatgaaattttgagagatttgggggctttgctaacctcccttatgctctgtatacaacacttctccatcccccaactggtgtcttaccccaaatcagaccatctgagcccactactatcaaacaaacaaacaaaaactgttaatatattagccataatgtttttaaatgataaaggatgaaataaattcccagtgctcatcatgagggaaacatgtgactatacctttcctatgaggaaagccaggttatacatagagttcctttgtcatatctttagacttgatttgagtagacagcaatgatctttacatagcttagtgttctgatggcaaaatattgtatatgataataattatgtcctatttatttgagatttgtgtttaaaa

SEQ ID NO: 56500 - DNA, 2396 bp, Homo Sapiens; identical to SEQ ID NO: 23145

SEQ ID NO: 56501 - DNA, 3632 bp, Homo Sapiens; identical to SEQ ID NO: 30666

SEQ ID NO: 56502 - DNA, 2392 bp, Homo Sapiens
ggtcgcgctgccgccgttttatttgaagacatcgtccagttctgaccatggactcgcagccatcggcccttagtttccatcccctctagtgggccttcgggggctctactgacgtccctccttcccttggtaccgggccggggaagtgttctcgggcgcgggaggttccgcatgcccaggcctggccaggggagatgaccgatccgtcgctggggctgacagtccccatggcgccgcctctggccccgctccctccccgggacccaaacggggcgggatccgagtggagaaagcccggggccgtgagcttcgccgacgtggccgtgtacttctcccgggaggagtggggctgcctgcggcccgcgcagagggccctgtaccgggacgtgatgcgggagacctacggccacctgggcgcgctcggtgagagccccacctgcttgcctgggccctgcgcctccacaggccctgccgcgcctctgggagctgcgtgtggagttgggggccccggggccgggcaggcggcctcctcgcagcgtggggtttgcgttcttctcccccaggagtcggaggcagcaagccggcgctcatctcctgggtggaggagaaggccgaactgtgggatccggctgcccaggatccggaggtggcgaagtgtccgacagaagcggacccagcagattccagaaacaaggaagaggaaagacaaagggaagggacgggagccctggagaagcccgaccctgtggccgccgggtctcctgggctgaaggctccccaagccccctttgccgggttggagcagctgtccaaggcccggcgccggagtcgcccccgcttttttgcccacccccctgtcccccgagctgaccagcgtcacggctgctacgtgtgcgggaagagcttcgcctggcgctccacactggtggagcacatttacagccacaggggcgagaagcccttccactgcgcagactgcggcaagggcttcggccacgcttcctccctgagcaaacaccgggccatccatcgtggggagcggccccaccgctgtcccgagtgtggtcgggccttcatgcgccgcacggcgctgacttctcacctgcgcgttcacactggcgagaagccctaccgctgcccgcagtgtggccgctgcttcggcctgaagaccggcatggccaagcaccaatgggtccatcggcccgggggcgaggggcgtaggggccggcgccctggggggctgtctgtgaccctgactcctgtccgcggggacctggacccgcctgtgggcttccagctgtatccagagatattccaggaatgtgggtgacggcctaaaaagtgaccatctagacattgtgggcggcccgagatgggctcaggggcccgaacctctgcagcggcctgcagggaggtcccagaatccaccgcaagagctggcctggggtgcggacagtctgatcttgggctctcagcagcctcttctgccagcaccttgctccccgctgccctgggctctccaaggccccctttgctgaggcagggctgaggtgagaaccccccagacctccatacagggaagcaaaagctgtttctcctcccagagatgctaagaggattgaggtagagaagaaccttgttttctctgttgtctttttctttttacttttttaattttttgagacggagttttgctcttgttgcccaggctggagtgcaatggtgcgatctcgactcactgcaacttccacctcctggagtcaagcgattctcctgcctcagccacccaagtagctggaattacaggcacctgccactatgcccggctaactttttgtatttttagtagagatggggtttcaccatgttggctaggctggtctcgaactcctgccctcaggtgatccacccacctctgcctcccaaagtgctgggattacaggcgtgagccacctcacctggccttttcttttttattctttgaccttcccacaagacaatacccattgtctgttttttttgtttatttatttacttattaagacagcatcttgctcctcacccaggctggaatgcagtggtgtgaactgggctcactgcagcctagacctgctgggctcaaggaatcctcctgccccagcctctcagatggctgtgactacaggtgggcaacactatgcctggttaatttttaaatttttttgcagagatggggttcccactatgttgatcaggctggtctcaaactcctcggttcaagcaattcgcccaccttggcctcccaaagtgctgggattacaggggagccactgcactggccttcattgtctttttgctgcacaacctaaaaaaccagtgaccctgtattggaaaaaaaaaaaaaaaaaaaaaa

SEQ ID NO: 56503 - DNA, 5651 bp, Homo Sapiens
ctacctctgggctttctattctgttccagagacccagtaccagaatatttaaatcactgtggcgttaaatacgttttaatatctgatagggccagtttctgcgcattgcacatttttttttcccctttcaggaacgtgttcaggcccgcggcagggggcgggatcgcgcctcctcctcggctctggttccagccgagcctctcggacgcagagatggaaatcccgaagctgctcccggctcgcgggacactacagggcggcggcggcggcggtatccccgcgggtggcggccgagtccaccgaggccctgactcgccggctggccaggtccccacgcgccgcctcctgctgctccggggcccccaagatggcgggcccgggcggcggcgcgaggaggccagcacggcatcacggggccctggcccaagcctgttggcgccgaggaccgatcaacctagcggcggcggcggcggcggcggcgacgacttcttcctggtgctgcttgacccggtgggtggcgacgtggagaccgcgggctccggtcaggccgcagggcctgtgttgagggaggaggccgaggagggcccggggctccaggggggcgagagcggcgcgaatcccgcggggcccactgcgctaggcccccgctgcctgtccgcggttcccactccggccccgatctccgcccccggccccgccgcggccttcgcgggcacagtcactatccacaaccaggacctgctgttgcgctttgagaacggcgtcctcaccctggccacgcccccaccacacgcctgggagccaggggccgctcctgcccagcagcccgggtgtctgatcgccccgcaagctgggttcccgcatgccgcgcacccgggtgactgcccagagctgccgccagacctcctgctagctgagccggccgaacccgcgccagctccggcgcctgaggaggaggcggagggcccggccgccgccctgggcccccgcggaccgctgggctccggcccaggcgtggtgctgtacttgtgccccgaggcgcagtgcgggcaaaccttcgccaagaagcaccagctgaaggtgcacctgctgacgcacagcagcagccagggccagaggcccttcaaatgccccctgggtggctgcggctggaccttcaccacctcttacaagctcaagaggcacctgcagtcgcacgacaaactgcggccctttggctgcccggcagagggctgtggcaagagcttcaccacagtgtacaacctcaaggcgcacatgaagggccatgagcaggagaactcattcaaatgcgaggtgtgcgaggagagcttccccacgcaggccaaactcagcgcccaccagcgcagccacttcgaaccggagaggccttaccagtgcgcgttttctggctgcaagaagacatttatcacagtgagtgctctgttttcccataaccgcgcccatttcagggaacaggaactgttttcctgctcttttcctggctgcagcaaacaatatgacaaggcttgtaggctgaaaattcacctgcggagtcacaccggcgagagacctttcctttgtgactttgatggctgtggctggaacttcactagcatgtccaaactcttaaggcacaaaagaaagcacgacgatgaccggaggttcatgtgccctgtggaaggctgtgggaaatctttcacgagggcggaacatctgaaaggccacagcataacccacctgggcacaaagcctttcgtgtgtcctgtggcaggctgctgtgccaggttctctgctcgcagtagcctctacattcactccaagaaacacctgcaggatgtggacacttggaaaagccgttgcccgatctcctcttgtaataaactcttcacatccaagcacagcatgaagacgcacatggttaaaaggcataaggtgggccaggatctcttagctcagctagaagcagcaaattctctcacacccagcagtgaacttaccagccagagacagaatgatctcagtgatgcagagatagtgtctctcttctctgatgtacctgacagtacttctgctgcattgctggacacagcattggtgaactctggaatcttgactattgatgtggcttctgtgagctcgactctggcagggcacctccctgctaataataataattccgtagggcaggctgtggaccctccgtccttgatggccaccagcgaccctcctcaaagtctggatacctctctcttttttggaacggcggccactggttttcagcagagctccttaaatatggatgaggtctcaagtgtaagtgtggggccattgggatctctggactctttggccatgaaaaactccagtccagagcctcaggctttgacacccagcagtaagctaacagtggacacagatgctctgactccttcgagcaccctttgtgaaaacagtgtctcagaactactgacaccaaccaaagcggagtggaacgtacatcctgactctgacttctttggacaggagggagaaacccagtttggattccccaatgcagcaggaaaccatggttctcagaaagaaacagatcttatcactgtgactggcagctcatttttggtatgaaccaactctattcattcctcatcatgtggcttacttttattacagtcaattttgaggatattctggactaaatatttaagtgcagtcatttctttttggtttgcaaaaagagcacagccctggactacaagtttggagatttaaattctgatcttgagtttggaactgacaagttgtgtgaccctgagcaagtcagttaacctatctgagccttaatttccttatttataaattgaggtggtttgaatagattgcttttaaggtctttctgctctgtgattccttgataatacatttctttccttgaaaaatatgaggacgtttttcagtgatgtggcatgcgtttttttttaactgcccccccagccctgacatgttctttttttggcaaacatacataatgttacatcatactatgatgaacatccatgtacttttcactcaatttcagcaattatgaatccatgaacaatcttttttaacttagcctcactcactccccatgttctagtattattttgtaacaaatagcagacatctgatcattttatccataaatattctttatatatctctgaaagctatgggatgatatggaaaaaaatgataattccattatcgcaagtgatatttacagtaattctttaatatcagtaaatatccagtgagggttcaaacttccaattgcctcataaatgctacttgttttattatttttaattagtagaatcccgtaaatctcctaagtgtcttcttaatccgtatgtttccctttcatctttctttttttccttgcgattttgtttatgaaatgaggttgtttcacatgtagcatttgccacaatttaagttttgctaattgcatccctatggtaatgtttgctttcctctatcctctgtttctttaatttgctagttatgtctagagacttgatgagattgaaacatggcttttggcatgaatgtttcataggttatgttgtgttcatttagtaggtggcgcataatctgtggttttctctctttttgtggtattagcagctgctgcagataaatgcattaattcatgatgcttctgatatgatgagtcatctttgtagagttactaagcattagcaaaggaggaaatgctatgtaatagaaatattattcaatgccaaaatattttcttaaatagtcatagaactaacaagaaaaaatagatagcaaaaaaatgtgttggctgttctcactgtttatcttcctaacttcttttgatgatggaaggcagttttgtggaaattgccagccaggactttgacatgaaacagacccagggctaaattttggctctgtggtgttggataagtggccttgaataaattagttattaagcttcagttttctagcttttaactgattataacaatgcacacacatacctgacacactgttaaattttcttctcttcctgtttcttatgttaaggaaagatactctgtgttttggcatatgttggtgaatttgtaccatttttatcctctcagtccttccttttataagacaataattggagtagtttaatcttattcatgtgcagataaaagaggtttatgaagtttagggtgaagtaggcaagggaatctgtttactccctcttccctctactgaataattttccctctactgaataattttccctctaagaattgctgtgggtaataccaggagtggggacattgcccacatgcataagagcgtatctctccattcgatcagtttgtcaccatctttgctctgttttgaaagtcaggcttctctgtgactgtgaagcctgctgttccctgaaaatctgataatggagcagtggaggtttttttctttctgtgctctgtagatctcattgtttgcacttgtaatttcccagagttgaaaggaaagattgaactggaatattgtgtaaactatctgtcttacattagtgtagcattttgcaatttggggaacatcttcacaatttgtgtctcgttgttcagaacaaccctgtgaagtagttttggcaatgtctgtgttacatttcatgtaatttagccaactcccattccaactaggctttggctaaatctgacaattttatatatagcttaaaacaaagaatatacattcttttcacccctcccagtctacccatccagccttcatgattcattcctgtgtcaaggttagtcgctgttttccatttgaattggtttcttttatggtcagtttactttcttccctctcccctccctttcctgcacatccccatccttgctatgcctttctgtcctcttttataatggatatatctttttcctgccattatccctcagacattctcctcatggcacattttcttcaaatgctaacatttactgagtgtacattgaagttctgtgcatacaggaagaagttattttctgagcttagataatactatgtgtatatgtgattaaaatgaagattattttctaaagccttcaaattagaagtggatttctgtttcattacttccgttttaaaagtttttgccagagagttttgctaaatactctcttatttgctctagtgtactagtccagtagtgtttgcatgtggatgtctgtggatgacagttattgtagcactttggcagtgcactaaaattttgccactatgaaatgtttctttattgtgtgtgcgtgtgtgttttgaaatacgcacacagccacacccacatatatattaaaagtggttgtattcatttagtgaaaaacaaaaagtagatgtacttctgtaaatcagataaatgcttggaatttgattgtctacccaatcaacagttttccctctttgctctggaaatatttgtactcatatagcatatttcaaaaatgttgtcattcattaaggcctcttaaatagaccactattttttgtgtctggcagatgagtatgtcaaggattgagatgaacacataagtcttggaaattaaataaatttataaacataaagataaaaaaaaaaa

SEQ ID NO: 56504 - DNA, 4087 bp, Homo Sapiens; identical to SEQ ID NO: 31572

SEQ ID NO: 56505 - DNA, 5695 bp, Homo Sapiens; identical to SEQ ID NO: 30045

SEQ ID NO: 56506 - DNA, 2172 bp, Homo Sapiens; identical to SEQ ID NO: 29249

SEQ ID NO: 56507 - DNA, 708 bp, Homo Sapiens
actcaccgcctgtccttcctgacacctcaccatgtgtacgggaaaatgtgcccgctgtgtggggctctccctcattaccctctgcctcgtctgcattgtggccaacgccctcctgctggtacctaatggggagacctcctggaccaacaccaaccatctcagcttgcaagtctggctcatgggcggcttcattggcgggggcctaatggtactgtgtccggggattgcagccgttcgggcagggggcaagggctgctgtggtgctgggtgctgtggaaaccgctgcaggatgctgcgctcggtcttctcctcggcgttcggggtgcttggtgccatctactgcctctcggtgtctggagctgggctccgaaatggacccagatgcttaatgaacggcgagtggggctaccacttcgaagacaccgcgggagcttacttgctcaaccgcactctatgggatcggtgcgaggcgccccctcgcgtggtcccctggaatgtgacgctcttctcgctgctggtggccgcctcctgcctggagatagtactgtgtgggatccagctggtgaacgcgaccattggtgtcttctgcggcgattgcaggaaaaaacaggacacacctcactgaggctccactgaccgccgggttacacctgctccttcctggacgctcactcccttgctcgctagaataaactgctttgcgctctc

SEQ ID NO: 56508 - DNA, 2026 bp, Homo Sapiens
gcgcctggcccgggagctgcggtcgcagaggccgacggagccggagtcgcggacgccgcggggtctccgggacaggaaccctcagtgctgcgtctagattctgcaggggaggtttgctgggaccttggctccacccagccagcgaaatggcagccacactcgatttgaaatcaaaggaggagaaggatgctgagttggacaagaggatcgaggctcttcggcggaagaatgaggccctcatccggcgctaccaggagattgaggaagaccgtaagaaagctgaacttgagggagtcgcagtcacagctccccgaaagggccgctcagtggagaaggagaacgtggcagtggagtcggagaagaacctgggtccttcccggaggtctcctgggacccctcggcccccaggggccagcaaggggggccggactcctccacagcagggaggccgggccggcatgggccgagcatcgcgcagctgggagggcagccccggggagcagcctcgaggaggaggagctgggggccgtggccggaggggccggggccgaggttcacctcacctctctggagctggagacacctcaatctctgaccgtaaatccaaggagtgggaggagcggcgcaggcagaacattgagaagatgaatgaggagatggagaagatcgccgagtatgagcgcaaccagcgggaaggggttcttgaacccaacccagtgcggaacttcctggacgacccccggcgacgcagcgggcccctggaggagtctgagcgggaccgccgggaggagagccgccggcacggccgcaactgggggggccccgacttcgagcgggtgcgctgtggccttgagcacgagcggcagggccgccgagctggcctgggcagtgctggagacatgacgttgtccatgacgggccgggagcggtcggagtacctgcgctggaagcaggagagggagaagatcgaccaggagcggctgcagaggcaccgcaagcccactggccagtggaggcgcgagtgggatgccgagaagaccgatgggatgttcaaggatggcccagtccctgcccatgaaccatcccaccgctatgatgaccaggcctgggcccggcccccgaagccccctacttttggggagttcctgtcccagcacaaagctgaggccagcagccgcagaaggagaaagagcagtcggccccaggccaaggcagcgcccagggcctacagtgaccatgatgaccgctgggagacaaaagaaggggcagcatccccagcccctgagactccacagcctacttcccccgagacttcccccaaggagacacccatgcagccacccgagatcccagctcctgcccaccggcctcctgaagacgagggggaagagaatgagggggaagaggatgaagaatgggaggacataagtgaggatgaggaagaggaggagatcgaggtggaagaaggtgatgaggaggaaccagcccaagaccaccaagccccagaggctgcccccaccgggatcccctgcagtgagcaggcccacggagtccccttcagtccggaggagcccctgctggagccccaggcccctggcacgccttccagccctttctcaccacccagcggccaccagcctgtgtccgattggggtgaagaggtggagctgaattctccccggaccactcacctggctggcgccctctccccgggtgaggcctggccttttgagagtgtatgaagctggctgcctgtgtgtgtgtgtgtgtgtgtgtgtgtgtgtgtgtgtgtgcgcgcgcgcgcgcgcgcgcgcgcgctagaggggtgtggctggtgggggacccttggggctgggccctgggacccagtgtgccccacagccctgtcagctgagggggtagcgcagcccatgctcttctgtactgtcatgcccgtctctggaatgtccactcccagagcctgccccagcccttcgagccccctccccaataaagaattcacatcctccaaaaaaaaaaaaaaaaa

SEQ ID NO: 56509 - DNA, 1242 bp, Homo Sapiens
agacacttttaactcacagtaaaagcaaaagcaacagctcaagcagcctccttggagaaaacctgaaaattcaacttgttcaagagaaggtcttgtacgtgcctaagttctagagcctcctgacgtgagcatggctgagagtgaggaccgctccctgaggatcgttctggtagggaaaactggaagtgggaaaagtgcaacagcgaacaccatccttggagaggaaatctttgattctagaattgctgcccaagctgttaccaagaactgtcaaaaagcatcccgggaatggcaggggagagaccttcttgttgtagacactccagggctctttgacaccaaggagagcctggacaccacctgcaaggaaatcagccgctgcatcatctcctcctgcccagggccccatgctattgtcctagttctgctgctgggccgctacacagaggaggagcagaaaaccgttgcattgatcaaggctgtctttgggaagtcagccatgaagcacatggtcatcttgttcactcgcaaagaagagttggagggccagagcttccatgacttcatagcagatgcggatgtgggcctaaaaagcatcgtcaaggagtgcgggaaccgctgctgtgcctttagcaacagcaagaaaaccagtaaggcagagaaggaaagtcaagtgcaggagttggtggagctgatagagaaaatggtgcagtgcaacgaaggggcttacttttctgatgacatatacaaggacacagaggaaaggctgaaacaacgggaagaggttttgaggaaaatctacactgaccaattaaatgaagaaattaaactagtagaagaggataagcataaatcagaggaagaaaaggagaaagaaattaaattactaaaattaaaatatgatgaaaaaataaaaaatataagggaagaagctgagagaaatatatttaaagatgtttttaataggatttggaagatgctttcagaaatatggcataggtttttgtcgaaatgtaagttttattcttcctaatttactgtgatttgttaatggatgaattgtattttgcaaagatagttagagaaatacctccttccccttagctttattaaggtatcattgataaataaaaataaaatatgtttaatgtatataatgtgatttttaaatatatatatatatatacacacattgtgaaataatgaaataaaggtaattaacacatctaaaaaaaaaaaaaa

SEQ ID NO: 56510 - DNA, 2148 bp, Homo Sapiens
aagacaaacactttccttgactttgagaaataatttaagtcaaagaatctgctctatgctaaccaagagatagagcacagcaaagatctgccagccccaggcctctacctagtggcctggaaattcaagtattcttattggtggaggccatttgtttctgattagaagctgtctaaacctcctactcctcaactcaaaggaaaacacagagcataccatggccaagaaagttgcagtgattggagctggtgtgagtggcctctcctccatcaaatgctgtgtggatgaggacctggagcccacctgctttgagagaagtgatgacattgggggattatggaagtttactgaatcttccaaagatgggatgaccagggtctataagtcattagtgacaaatgtctgtaaggaaatgtcatgttacagtgacttccctttccacgaagattatcctaatttcatgaaccatgaaaaattttgggactatctccaagaatttgctgagcactttgacctcctgaaatacattcagtttaagaccactgtgtgcagcataacgaagcgtccagacttctccgaaactggtcagtgggatgttgtcacagagacagagggcaagcaaaatagagctgtctttgatgctgttatggtttgcactggacatttcctgaatccccatttacctttggaagcctttcctggaattcataagtttaaaggtcagatcctgcatagtcaagagtacaagatcccagaaggctttcagggcaaacgcgtcttggtgattggtcttgggaacactggaggagacattgctgtggaactcagtcgaacggcagctcaggtacttctcagtactagaactggtacctgggttcttgggcgctcttcagattggggctatccttataatatgatggttacaagaagatgctgtagttttattgcacaagttctgccttcacgttttctaaactggattcaagaaaggaagttgaataagagatttaatcatgaggattatggattaagtattaccaaagggaaaaaagcaaaattcattgtgaatgatgagctgccaaactgtatcctctgtggggcaatcactatgaaaaccagcgtgattgaatttacagaaacctctgctgtctttgaagatgggacagtggaagaaaacattgatgttgtgatcttcactacaggatatacattttcttttccattttttgaagaacctcttaaaagcctctgtacaaagaagatatttctatacaagcaagtctttcccttaaacctagagagagcgacattagccatcatcggccttatcggccttaaaggatccatcttatcaggcacagagctccaagcacgatgggtcacaagagtattcaaaggactctgtaagatacctccatcccaaaaattgatgatggaggctactgaaaaggaacagctcattaaaaggggagtgtttaaagacaccagcaaagacaaatttgactacattgcctacatggatgatatcgctgcctgcataggcacaaagcccagcatcccacttctgttcctcaaggatcccagactagcttgggaagttttctttggaccatgtactccttatcagtaccgcctcatgggccctggaaaatgggatggagccagaaatgccatcctgacccagtgggacagaacattgaaacctttaaaaactcgaattgtccctgattcctccaagcctgcctccatgtcacattatttaaaagcctggggggcacctgtcctacttgcctctcttctacttatctgtaaatcttcacttttcttgaaattggtgagagataaactacaggacagaatgtccccttacctagtaagtctttggcgaggatgaacctgattgttacaagggttacaccaagtcatgctaattctatctccaagtatcttgtgcatccctcctctgctctccatcataactgctattagccaaattcaggcccagtcatctcctatctgaattattgtattatcttcttctttgttttcagtaccctctttcttgccaccctttccaatgcatcttctaccctgctacctcagtgattattctaaaataaatatatatgatatggtttaaaaaaaaaa

SEQ ID NO: 56511 - DNA, 2473 bp, Homo Sapiens; identical to SEQ ID NO: 25059

SEQ ID NO: 56512 - DNA, 1784 bp, Homo Sapiens; identical to SEQ ID NO: 29235

SEQ ID NO: 56513 - DNA, 4050 bp, Homo Sapiens
tctggcctcgcgcctgcctgttccctccagcccggacccccctgaaatatgttcaggggcgcttggatgtggcccgggaaagacgccgccgcgctgactatctgctgctgctgctgctgctgggctcccaggccgagcgacaaaccttgcgccgactccgagcgggcgcagcgatggcgactgtccctggcgtccctgctcttcttcaccgtgctgctcgctgaccatctgtggctgtgcgcgggggcccggccccgggccagggagctgagcagcgccatgcggcccccatggggggccggccgggagcggcagccggtgcctcctcgcgcggtgctgccgctgccgccgccgccgcccggcgagcccagcgcgcccccaggcacctgcggccccagatacagcaacctgaccaaagccgcccccgccgccggctctcggccggtctgcggcggcgtcccagagcccacggggctggacgcagcttgcaccaaattgcaatctttgcagagacttttcgaaccgactactccggccccccctctgcggccccctgactccctttcccgtgccccggccgagttcccctccgccaaaaaaaacttgctcaaaggccactttcggaacttcactctctccttttgcgacacctacacggtctgggacttgctgctgggcatggaccgccccgacagcctggactgtagcctggacaccctgatgggggacctgctggccgtggtggccagcccgggctccggggcctgggaggcgtgtagcaactgtatcgaggcgtaccagcggctggaccgacacgctcaggaaaaatatgacgagttcgacctcgtgctgcataaatacttacaggcggaagagtactcaatccggtcctgcacgaaaggctgtaaggctgtctacaaggcctggctgtgctcagaatacttcagcgtgacccagcaggaatgccagcgctgggtgccctgcaagcaatactgcctggaggtgcagacccggtgcccctttatactccccgacaatgaggaaatggtgtacggagggctccctggctttatctgtacagggttgctggatacttcaccaaagcgtctggaaaccaagtgctgtgacgtgcagtgggtctcctgtgaggcgaagaagaagaagttcaaggagtctgaggcccccaaaacccaccagcagcaattccaccactcctatttccaccactaccaccaacagtaccatcactaccacccccatcatgatcccccaggccgtgtcagcaacaagcccgccctgctgccggtctctgggggctcccgcctcagccctagcaggatccggctctgcgtccttgttctcatgctcctccataccgtggtgtccttctccagcaaccagggtggtgggggattggggctggagacactgcctgccctagaggagggcctgacacgggaagagtgacagtagggagggaggacagacctccaccacactgacatcagctccagctcccccaggttgggggggagggggctcctcccatgggaggtgtaggataaggtgggggcgggggaaatgggggaatgacacatcccccccaacctacccccaccccaaaagcagctccaacagaatggccagagggcctcagggagctgcaaaactcatccaggagaaaaaggcaggagcagcaagtgacccctcccaagctcccatctatggggcttagcaaaaaaagggaggaagtgggggctggatatgcccacccctgccaaaagccctgaccccagggaaggaggctgctcacccagccttggccctgcagggaatgttggggggcacagaggggagaagctctttcccccactccacattccttttgttgccaagatccttaattccctcctgcccatatccctacaggcgacggcagacagtgcaatggccctcctgccacttcagcacaccttgccccacctgggaccatcacacgtgaagcaccaggctgggagatgaggtgcacacagttgcagctaggtcggggccccagttaagctgtgccccaccaccctaggcaatgaggggcaggaaaggggtacagaatgaatggtgaaagagagtggagatacggaagggggagaggagaggagaaatgtggacagagggcttgaagacatggccgaataggctactgccacccggctttggggagatgggcgataagtgttgaggtaggctcgagaactgctccccaaatcagtgagaattgcattaggagccctctggggaaagagcacaggaactgagttgctgggcctcaaaacaaaaggctgcaggcacatggttagactgccgctgtctgaaggaccatatcttacagaaggtgcacatactcccaagggccactcttgccctggagatcttggccttggggccaaagacatttccatttccgatctccatggggaggagggacttaagcccaagtgggtcaggcctggcccaggtccttatactcccctatcttgtcctagcccaggcctccatgaaggagaacctggtggcattgccccagagctctccagagatgagcctcccctatccccaccctgtccccgtccccagcctaccaaagagtattcacacctttccatccctgactctatgggttactgtcccaattgcgaaacacccatactcctcttcaccctgtagcagggtcttctgctccagtcaccccggcctcttgcaagagaaagtccagggactggcaagaagaccctttgactaaagataatgtgctgtcatatcttggctgagaaactgttgagtcaggctagaggactggacaagagaagaggcattgagagcccccttgggagccattagccttgctctggtctgctgtgtggggttggggagtaggggggatcccacattgcctgggacatctgaatgctgatacgaatggacaggaaagggagccagagctgtatacctgggacaggccagggagcctttagtgccagcagggcctgtgtcctgggatgtgatgctagtgagtgaatgggagggcgggcctggagctgcgtgagagtgaaaccaagaagcggatggggaagggagagctggccttggtcagcttagggatgaatggagaaggaatcattcatgggcctcggctaggtcccagactgattacatgagactggggagtccttccctgccagttttctcatttattacagcctatcccccaaccctacccctgtgccctgcctacacactcccgtttggccctcagcactttgggcctggtcacataccccatccctagagtgctcttttcagctggggaggggaagaggtgctggctcctttccagacatgcttatgtataagtaaaggggcaggtgcttgggctccagagagaccctaggtactgccttctaactcctgcatcctcagaaggggaaaagggactgggaagtaaagggaaaccatatggccccagggaatggacccttggagactcccatcctctcttccccctcaccaagtgcccaggagacccctggctcagaccagcccaaggccttgcccagtggcaggggaaaggggcacctcactccacctcaaagtcatttgactgcccccatccaccccaccaccctaatcttccaccacctctccggctgcccctgccctccatcacagacagcagagccgggcagctttcttatgccattttctacactgtgcttcatgagtaggactttcttgcactagttcctatgactgagtctccaaactggtttcctagtagtcccccatcccttcctcccttacccagctatgattcagttgtctctgccctccctcttaccctgcctctgtgtttcggtgagagtctctgtatatgtactgctttctgttttgttgcattgtggggcagaggcctctctgctcttgtttaaccccataaagaaataaatggtaagacttgatgataaaaaaaaaaaaaaaaaaaaaaaaaaaaaaaaa

SEQ ID NO: 56514 - DNA, 1232 bp, Homo Sapiens
gcagccgtcatggcagcggaggagaaggaccctctgagctattttgcggcatacgggagcagcagctcaggctcctcggacgaggaggataacatcgagccggaggagacgagtcgcagaaccccggatccggcgaagtcggcgggcggctgtaggaacaaggcggagaagcggctcccgggacctgacgagctgtttaggagcgtgactcgcccggcctttctctacaatccgctcaacaaacagatagactgggagaggcacgtcgtcaaggcgcctgaggagcctccaaaggaattcaaaatatggaagtcaaattatgtaccacctcctgagacctacaccactgagaagaagcctccgcctccagagcttgacatggcaataaaatggtctaacatatatgaggacaatggtgatgatgctccacagaatgctaagaaagctaggcttctaccagaaggggaggagacgttggaatcagatgatgaaaaagatgagcatacttctaaaaagcgcaaagtagagccaggagaaccagcaaagaagaaaaagtagaaacaaatgaccagaatttctgtactgctaaacttgttgaaatgtttctttggacagattaagttgatattgtgggttattatgccacatctccatgaaaatgcatacgttaatgaactaataagtattgcctcaagaactttccactatagaattctttttttatttaaaacatgtatgtatttaaaactcaactggtgacttgtgattgtgaaattgataacacttggatgcattcttgctctcacagaattggtgacatgctttgagagttttgtcacatgttgacatgccaatgttcttataaaccttttataaaggaatatatttttaaagtaaatatattgtaatgtactgtgaacttgtagggtgcttttcaacagtctttgtacagtgtaaatagatcatggaaataaaattacttattcaatattactattactgtataacattaacatttgaatgtttgtctgtgacaagtaccctatttgtcgtgtgacattttaagttgtaataagaagtattaccatttaaagagtgcctcctgtgttccaggtgctttgtgcatatattttctctgatccttaaacaacctagcgcaaggtattattagtattctcattttataataaagagtgcttgagtagcttgtctgaaagaaaaaaaaaaaaaaa

SEQ ID NO: 56515 - DNA, 2188 bp, Homo Sapiens
agacaggggtagtgcgaggccgggcacagccttcctgtgtggttttaccgcccagagagcgtcatggacctggggaaaccaatgaaaagcgtgctggtggtggctctccttgtcattttccaggtatgcctgtgtcaagatgaggtcacggacgattacatcggagacaacaccacagtggactacactttgttcgagtctttgtgctccaagaaggacgtgcggaactttaaagcctggttcctccctatcatgtactccatcatttgtttcgtgggcctactgggcaatgggctggtcgtgttgacctatatctatttcaagaggctcaagaccatgaccgatacctacctgctcaacctggcggtggcagacatcctcttcctcctgacccttcccttctgggcctacagcgcggccaagtcctgggtcttcggtgtccacttttgcaagctcatctttgccatctacaagatgagcttcttcagtggcatgctcctacttctttgcatcagcattgaccgctacgtggccatcgtccaggctgtctcagctcaccgccaccgtgcccgcgtccttctcatcagcaagctgtcctgtgtgggcatctggatactagccacagtgctctccatcccagagctcctgtacagtgacctccagaggagcagcagtgagcaagcgatgcgatgctctctcatcacagagcatgtggaggcctttatcaccatccaggtggcccagatggtgatcggctttctggtccccctgctggccatgagcttctgttaccttgtcatcatccgcaccctgctccaggcacgcaactttgagcgcaacaaggccatcaaggtgatcatcgctgtggtcgtggtcttcatagtcttccagctgccctacaatggggtggtcctggcccagacggtggccaacttcaacatcaccagtagcacctgtgagctcagtaagcaactcaacatcgcctacgacgtcacctacagcctggcctgcgtccgctgctgcgtcaaccctttcttgtacgccttcatcggcgtcaagttccgcaacgatctcttcaagctcttcaaggacctgggctgcctcagccaggagcagctccggcagtggtcttcctgtcggcacatccggcgctcctccatgagtgtggaggccgagaccaccaccaccttctccccataggcgactcttctgcctggactagagggacctctcccagggtccctggggtggggatagggagcagatgcaatgactcaggacatccccccgccaaaagctgctcagggaaaagcagctctcccctcagagtgcaagcccctgctccagaagatagcttcaccccaatcccagctacctcaaccaatgccaaaaaaagacagggctgataagctaacaccagacagacaacactgggaaacagaggctattgtcccctaaaccaaaaactgaaagtgaaagtccagaaactgttcccacctgctggagtgaaggggccaaggagggtgagtgcaaggggcgtgggagtggcctgaagagtcctctgaatgaaccttctggcctcccacagactcaaatgctcagaccagctcttccgaaaaccaggccttatctccaagaccagagatagtggggagacttcttggcttggtgaggaaaagcggacatcagctggtcaaacaaactctctgaacccctccctccatcgttttcttcactgtcctccaagccagcgggaatggcagctgccacgccgccctaaaagcacactcatcccctcacttgccgcgtcgccctcccaggctctcaacaggggagagtgtggtgtttcctgcaggccaggccagctgcctccgcgtgatcaaagccacactctgggctccagagtggggatgacatgcactcagctcttggctccactgggatgggaggagaggacaagggaaatgtcaggggcggggagggtgacagtggccgcccaaggcccacgagcttgttctttgttctttgtcacagggactgaaaacctctcctcatgttctgctttcgattcgttaagagagcaacattttacccacacacagataaagttttcccttgaggaaacaacagctttaaaagaaaaagaaaaaaaaagtctttggtaaatggcaaaaaaaaaaaaaaaaaa

SEQ ID NO: 56516 - DNA, 1599 bp, Homo Sapiens
gtggtgcgccgcccgggcgaggatgcggctgttccggtggctgctgaagcagccggtgcccaagcagatcgagcgctactcgcgcttttcgccgtcgccgctctccatcaaacaattcctggacttcgggagagataatgcatgtgagaaaacttcatatatgtttctacgaaaggaacttcctgtgcggctggctaacacaatgagagaagttaatcttctgccggataatttacttaaccgcccttcagtgggattggttcagagttggtatatgcagagttttcttgaacttttagaatatgaaaataagagccctgaggatccacaggtcttggataactttctacaagttctgattaaagtcagaaatagacacaatgatgtggttcctacaatggcacaaggagtgattgaatacaaggagaagtttgggtttgatcctttcattagcactaacatccaatattttctggatcggttttataccaaccgcatctctttccgcatgcttattaatcagcacacacttctgtttgggggtgacactaatcctgttcatcctaaacacataggaagtatcgatcccacctgtaacgtggcggatgtggtgaaagatgcatatgaaacagccaagatgctgtgtgaacagtattacctggtagctccagagctggaagttgaagaattcaatgccaaagcgccagacaaacctattcaggtggtttatgtgccctcacatctgtttcatatgctatttgagttgttcaagaactcaatgagagcgacagttgaactctatgaagacagaaaagagggctaccctgctgttaaaaccctcgttactttgggtaaagaagacttatccattaagatcagtgacctaggtggtggtgtcccacttcgaaaaatagatcgtctttttaactacatgtattctactgctcctaggcccagcctggagcctaccagagctgcccctttggctggatttggttatggtttgccaatttcccgtctgtatgctagatattttcaaggagatctgaaactgtattccatggaaggagtgggtactgatgctgtcatttatttgaaggctctttcaagtgagtcatttgagagacttccagtttttaataagtccgcatggcgccattacaagaccacgcctgaagccgatgattggagcaatcccagcagtgaacccagggatgcttcaaaatacaaagcaaaacagtaatataccaccttgatttccattacaaagtatctgatttgtctgaataaaggtgtcccactcactgttccaggaattcttgcagtgtagaggtattcacaacagcaagcagggatttggcctgccatcaattttatttaaaaagcaattaagtttgcagtttgtcctcataaacgttgtaggttgaaactgaaaaataagttaaaatgatcaatcaagataaaaggtgatctatccatccaatggaatattatttggccttaaaaaggaaggacatctgatatgtgctgcaacatgggtgaatcttgaagtcattatgctaagtgaaataaaccagacataaaaggacaaatacatcg

SEQ ID NO: 56517 - DNA, 2646 bp, Homo Sapiens
atcagcaacaattaaaatattcacgtggtatctgtagtttaataatggaccaacatcaacatttgaataaaacagcagagtcagcatcttcagagaaaaagaaaacaagacgctgcaatggattcaagatgttcttggcagccctgtcattcagctatattgctaaagcactaggtggaatcattatgaaaatttccatcactcaaatagaaaggagatttgacatatcctcttctcttgctggtttaattgatggaagctttgaaattggaaatttgcttgtgattgtatttgtaagttactttggatctaaactacacagaccgaagttaattggaattggttgtctccttatgggaactggaagtattttgacatctttaccacatttcttcatgggatattataggtattctaaagaaacccatattaatccatcagaaaattcaacatcaagtttatcaacctgtttaattaatcaaaccttatcattcaatggaacatcacctgagatagtagaaaaagattgtgtaaaggaatctgggtcacacatgtggatctatgtcttcatggggaatatgcttcgtggcataggggaaacccccatagtaccattggggatttcatacattgatgattttgcaaaagaaggacattcttccttgtatttaggtagtttgaatgcaataggaatgattggtccagtcattggctttgcactgggatctctgtttgctaaaatgtacgtggatattggatatgtagatctgagcactatcagaataactcctaaggactctcgttgggttggagcttggtggcttggtttccttgtgtctggactattttccattatttcttccataccattttttttcttgccgaaaaatccaaataaaccacaaaaagaaagaaaaatttcactatcattgcatgtgctgaaaacaaatgatgatagaaatcaaacagctaatttgaccaaccaaggaaaaaatgttaccaaaaatgtgactggttttttccagtctttgaaaagcatccttaccaatcccctgtatgttatatttctgcttttgacattgttacaagtaagcagctttattggttcttttacttacgtctttaaatatatggagcaacagtacggtcagtctgcatctcatgctaactttttgttgggaatcataaccattcctacggttgcaactggaatgtttttaggaggatttatcattaaaaaattcaaattgtctttagttggaattgccaaattttcatttcttacttcgatgatatccttcttgtttcaacttctatatttccctctaatctgcgaaagcaaatcagttgccggcctaaccttgacctatgatggaaataattcagtggcatctcatgtagatgtaccactttcttattgcaactcagagtgcaattgtgatgaaagtcagtgggaaccagtctgtgggaacaatggaataacttacctgtcaccttgtctagcaggatgcaaatcctcaagtggtattaaaaagcatacagtgttttataactgtagttgtgtggaagtaactggtctccagaacagaaattactcagcacacttgggtgaatgcccaagagataatacttgtacaaggaaatttttcatctatgttgcaattcaagtcataaactctttgttctctgcaacaggaggtaccacatttatcttgttgactgtgaagattgttcaacctgaattgaaagcacttgcaatgggtttccagtcaatggttataagaacactaggaggaattctagctccaatatattttggggctctgattgataaaacatgtatgaagtggtccaccaacagctgtggagcacaaggagcttgtaggatatataattccgtattttttggaagggtctacttgggcttatctatagctttaagattcccagcacttgttttatatattgttttcatttttgctatgaagaaaaaatttcaaggaaaagataccaaggcatcggacaatgaaagaaaagtaatggatgaagcaaacttagaattcttaaataatggtgaacattttgtaccttctgctggaacagatagtaaaacatgtaatttggacatgcaagacaatgctgctgccaactaacattgcattgattcattaagatgttatttttgaggtgttcctggtctttcactgacaattccaacattctttacttacagtggaccaatggataagtctatgcatctataataaactataaaaaatgggagtacccatggttaggatatagctatgcctttatggttaagattagaatatatgatccataaaatttaaagtgagaggcatggttagtgtgtgatacaataaaaagtaattgtttggtagttgtaactgctaataaaaccagtgactagaatataagggaggtaaaaaggacaagatagattaatagcctaaataaagagaaaagcctgatgcctttaaaaaatgaaacactttggatgtattacttaggccaaaatctggcctggatttatgctataatatatattttcatgttaagttgtatatttttcagaaattataaatattattaatttaaaattcgaaaaaaaaaaaaaaaaaaaaa

SEQ ID NO: 56518 - DNA, 2092 bp, Homo Sapiens
ctctaaagcaattctcgtgtaaaaaggcattttactccgcgcgtcttccttacagccatttagttgggagtttgcggtgggcagggggagggagaagaaacgcctgctctgaatcggaaaacaccgaagagaccagaccatctctttcagcagcaggaaagagaggagccgtcgcaggagccgcacacgtctccaactctctattgctttttgcgcacattcctaacttcctgacgtccatcccagcgggcaggcatggggtgtttgggcggcaacagcaagacgacggaagaccagggcgtcgatgaaaaagaacgacgcgaggccaacaaaaagatcgagaagcagttgcagaaagagcgcctggcttacaaggctacccaccgcctgctgctcctgggggctggtgagtctgggaaaagcaccatcgtcaaacagatgaggatcctgcacgtcaatgggtttaatcccgaggaaaagaaacagaaaattctggacatccggaaaaatgttaaagatgctatcgtgacaattgtttcagcaatgagtactataatacctccagttccgctggccaaccctgaaaaccaatttcgatcagactacatcaagagcatagcccctatcactgactttgaatattcccaggaattctttgaccatgtgaaaaaactttgggacgatgaaggcgtgaaggcatgctttgagagatccaacgaataccagctgattgactgtgcacaatacttcctggaaagaatcgacagcgtcagcttggttgactacacacccacagaccaggacctcctcagatgcagagttctgacatctgggatttttgagacacgattccaagtggacaaagtaaacttccacatgtttgatgttggtggccagagggatgagaggagaaaatggatccagtgctttaacgatgtcacagctatcatttacgtcgcagcctgcagtagctacaacatggtgattcgagaagataacaacaccaacaggctgagagagtccctggatctttttgaaagcatctggaacaacaggtggttacggaccatttctatcatcttgttcttgaacaaacaagatatgctggcagaaaaagtcttggcagggaaatcaaaaattgaagactatttcccagaatatgcaaattatactgttcctgaagacgcaacaccagatgcaggagaagatcccaaagttacaagagccaagttctttatccgggacctgtttttgaggatcagcacggccaccggtgacggcaaacattactgctacccgcacttcacctgcgccgtggacacagagaacatccgcagggtgttcaacgactgccgcgacatcatccagcggatgcacctcaagcagtatgagctcttgtgaggacttggccgccaccctgcgacggagcggcgcccccggactgcctgactgccagccccatgccatggtaggaggcagagtctctagttccatctcgctgccgtctgtcccgttctgtgtcgaccaccaagcctctggctacctctgtcccctcaggtttggttgtgtagcttctgttgtcattgaatacggcttcccgcagcatcccacccccaaaccaccgactctcattgccgacactgcagcagaatctctccgggtgggagcccaattattcattctccctttattgattcatcgaggagaacttggtagatggggagaaaaacacagttggtttttttttccacgttatcaaccgtgactgcaagagcgttcgtgcatgccctgagccacggccgtctctgattctccctttatgaagctgcaggctgacgagagatggtcccttcccattgccttagcccaagacttggagtcgaccccaagcgacagagtgaccagaaacccttttacagtcacattcagagtcgctgctggcctcaggcatttgaattagagctactttgagcctcttaggcagaaaacctaccacattcactactgcaaaatgtgtcctgtctaaaaatgattctctaaactttccctatacttaggcatagtcttctttcttagattctctttgttgttg

SEQ ID NO: 56519 - DNA, 4477 bp, Homo Sapiens
gaagaaggctcctcggtgaggagggtgaggctcaaagagcagagttcctggagcgcccccagcaggcctgaattgcagttcctgtgccctggcactaagactggcacctcctgcggcccatgcccttcgcctgcattgcccactgagtcccactcgactgtcttcagcgcggttcacactgagacccagccctctcccgctggccccgagcaggcccacctttaggagggcgtgatggaaaggcccctggagaatggggatgagtccccagactctcagggccatgccaccgactggagatttgctgtgtgcagtttcagggatgcctgggaagaggaggaacctgcttcccagatgcacgttaaggacccaggtcctccaagaccaccagccggggccacccaggatgaggagctacagggcagccccttgtccaggaaattccagttacccccagctgcagatgagtcgggggatgcccagaggggcacagtagaaagctcctcagtcctgtcagaagggccaggcccctctggagtggagagtctcctatgccccatgtcctcccacctcagcttggcacagggtgagagtgacaccccaggggtagggttggtaggggacccaggtccaagcagggcgatgccatctggcttgagccctggggcattggacagcgaccctgtgggccttggagaccctttatcagaaatatcaaagctgctggaggcagcccccagtggatccggcctccctaagcctgctgactgcctcctggcccaagacctctgttgggagctgctggccagtggtatggccaccttgccagggactcgggatgtccaaggccgggcagtgctgcttctgtgtgcccacagcccagcctggcttcagtctgagtgcagcagccaggaactcatccgcctcctgctgtacctgcgaagcatccccaggcccgaagtacaggcactgggactgacagtgctagttgatgcccgaatttgtgctccaagttcttccctcttctctgggctcagccaactacaagaagcagccccaggggccgtgtaccaggtgctgctagtgggaagcacgctgctgaaggaagtgccttccgggctgcagctggagcagttgccttctcagagcctgctgacccacatcccaacggcggggctgcccacttcgctaggaggaggcctgccttactgccaccaggcctggctggatttccgaaggcggctggaagctctactacagaactgccaggcagcttgtgccctgctccagggggccatcgaaagtgtgaaggctgtgccccagcccatggagcctggggaggtcggtcagctgctacagcagacagaggtcctgatgcagcaggtgctagactcgccatggctggcatggctacaatgccaggggggccgggagctgacatggctgaagcaagaggtcccagaggtgaccctgagcccagactacaggacggcaatggacaaggctgacgagctatatgaccgggtggatggattgctgcaccaactgaccctgcagagcaaccagcgaatacaggccctagagttggtccaaacactggaggcccgggaaagcggactgcaccagattgaagtgtggctgcagcaggtgggctggccagcactggaggaggctggggagccctcgctggacatgctgctccaggcccaaggctcttttcaggagctgtaccaggttgcccaggagcaggtcaggcaaggggagaagtttctgcagccgctgactggctgggaggcggctgaactggacccccctggggcacgctttctggccctgcgagcccagctgactgaattctctagggctttggcccagcggtgccagcggctggcggatgctgagaggctgtttcagctcttcagggaggccttgacgtgggctgaggaggggcagcgagtgttggcagagctggagcaggaacgcccgggggttgtgttgcagcagctgcagctgcactggaccaggcaccctgacttgcctcctgcccacttccgaaagatgtgggctctggccacggggctgggctcagaggccatccgccaggagtgccgctgggcctgggcgcggtgccaggacacctggctggccctggaccaaaagcttgaggcttcactgaagctaccaccggtgggcagcacagctagcctgtgtgtcagccaggtccccgctgcacctgcccaccctcccctgaggaaggcctacagcttcgatcggaatctggggcagagtctcagtgaacctgcctgccactgccaccatgcggccactattgctgcctgccgcagaccagaggctggaggaggtgccctgccccaggcatcccctactgtgcctccaccaggcagctctgaccccaggagcctcaacaggctacagctggtgctggcagagatggtggccacggagcgggagtatgtccgggctctagagtacactatggagaactatttccccgagctggatcgccccgatgtgccccagggcctccgcggtcagcgtgcccacctctttggcaacctggagaagctgcgggacttccactgccacttcttcctgcgtgagctggaggcttgcacccggcacccaccacgagtggcctatgccttcctgcgccatagggtgcagtttgggatgtacgcgctctacagcaagaataagcctcgctccgatgccctgatgtcaagctatgggcacaccttcttcaaggacaagcagcaagcactgggggaccacctggacctggcctcctacctgctaaagcccatccagcgcatgggcaagtacgcactgctgctgcaggagctggcacgggcctgcgggggccccacgcaggagctcagtgcgctgcgggaggcccagagccttgtgcacttccagctgcggcacggaaacgacctgctggccatggacgccatccagggctgtgatgttaacctcaaggaacaggggcagctggtgcgacaggatgagtttgtggtgcgcactgggcgccacaagtccgtgcgccgcatcttcctttttgaggagctgctgctcttcagcaagcctcgccatgggcccacaggggttgacacatttgcctacaagcgctccttcaagatggcagaccttggtctcactgagtgctgtgggaacagcaacctgcgcttcgagatctggttccgccgccgcaaggccagggacacctttgtgctgcaggcctccagcctggctatcaagcaggcctggacagctgacatctcccacctgctttggaggcaggccgtccacaacaaggaggtgcgcatggctgagatggtgtccatgggtgtggggaacaaggccttccgagacattgctcccagcgaggaagccatcaacgaccgcaccgtcaactatgtcctgaagtgccgagaagttcgctctcgggcgtccattgccgtagccccgtttgaccatgacagcctctacctgggggcctcgaactcccttcctggagaccctgcctcttgctctgttctggggtccctcaacctgcacctgtacagagacccagctcttctgggtctccgctgtcccctgtatcccagcttcccagaggaagcagcactggaggctgaggcagagctgggcggccagccctctttgactgctgaggactcagagatctcgtcccaatgcccatcagccagtggctccagtggctctgacagcagctgtgtgtcagggcaggccctgggtaggggcctggaggacttaccctgtgtctgagcccgggactggacgagcagtagatccagcagcctgcagctccaaggaacattgcctctctggatctgctgtgaccagggtgtggctgacacctgggctacctccaacctacatgtgcaacgctgttgactaccctttctgatgtgtgtggccattggactaactggcacggggcctctctagggaagtctggttgtagagcctgaataggctcctggccccatgaccccttctcctgtccccagctcccatcccagttgtgggttaagaataggctagagcagacattgggtgtttccatgctgtaggctggtgggggaccatgtgcctctaggcagtgactagggtgcccccacccctcaggaagaacacaggtgggctcctagcagctgatccccaatgcctggccttaaagccgagctcagttaccatagggacaggtccacctctactgggccctcatgcttgcctttcctggcccccaggcccagcccctttttactggggcagtttcgttattttgacttgatgccttttgaataactttcaatagaattgtctaaaattatcttactggttgttaggcctttggtgtctcagagaaggagtctaggtctttgatgtgtgatttaatcttttatttgtttataataaaaaatagactgat

SEQ ID NO: 56520 - DNA, 2901 bp, Homo Sapiens
cagcctccctctcccacctctgtctgcccgctgcctcttgtctagctgctgtcaggagctgactgcctccagggctggaatcctgtgctccctctgtgcccagagccccacgatgtcggccaacgccacactgaagccactctgccccatcctggagcagatgagccgtctccagagccacagcaacaccagcatccgctacatcgaccacgcggccgtgctgctgcacgggctggcctcgctgctgggcctggtggagaatggagtcatcctcttcgtggtgggctgccgcatgcgccagaccgtggtcaccacctgggtgctgcacctggcgctgtccgacctgttggcctctgcttccctgcccttcttcacctacttcttggccgtgggccactcgtgggagctgggcaccaccttctgcaaactgcactcctccatcttctttctcaacatgttcgccagcggcttcctgctcagcgccatcagcctggaccgctgcctgcaggtggtgcggccggtgtgggcgcagaaccaccgcaccgtggccgcggcgcacaaagtctgcctggtgctttgggcactagcggtgctcaacacggtgccctatttcgtgttccgggacaccatctcgcggctggacgggcgcattatgtgctactacaatgtgctgctcctgaacccggggcctgaccgcgatgccacgtgcaactcgcgccaggcggccctggccgtcagcaagttcctgctggccttcctggtgccgctggcgatcatcgcctcgagccacgcggccgtgagcctgcggttgcagcaccgcggccgccggcggccaggccgcttcgtgcgcctggtggcagccgtcgtggccgccttcgcgctctgctgggggccctaccacgtgttcagcctgctggaggcgcgggcgcacgcaaacccggggctgcggccgctcgtgtggcgcgggctgcccttcgtcaccagcctggccttcttcaacagcgtggccaacccggtgctctacgtgctcacctgccccgacatgctgcgcaagctgcggcgctcgctgcgcacggtgctggagagcgtgctggtggacgacagcgagctgggtggcgcgggaagcagccgccgccgccgcacctcctccaccgcccgctcggcctcccctttagctctctgcagccgcccggaggaaccgcggggccccgcgcgtctcctcggctggctgctgggcagctgcgcagcgtccccgcagacgggccccctgaaccgggcgctgagcagcacctcgagttagaacccggcccacgtagggcggcactcacacgcgaaagtatcaccagggtgccgcggttcaattcgatatccggactcctgccgcagtgatcaaagtccgaggggcgggacccaggcacctgcattttaaagcgccccgggagactctgaatctttttcagaaacagtgagttaaagcagtgcttctcaaaccttgatgtgcctgtgaatcacctaggggtcttgttaagtgcagtctgatccaggaggccggggccgggtactgagagtctgcacttaacaagctcccaggccgagaagccagtgcggcaggttcacaggcgaggcctggagtaacacaaagtgaaactcgtaatagacttcccactctagggcagtggagtcggaagggcacacggggtgcgtctccccggagttcagttttaccagatgatgggggaggggggaaggagttttatgttaaaccatccatgtatttttggagaagagagaggaaaggtttgagaagcactgttccagcctgccctcttcatttagccaatgcttactgcgctagacgcttcatcccacaatcttaaggggcagcttctattagccagtctttacagctgagcacattctggctcagggaggttaagtgacttgcccagtttcagggctaacgaccacagggtctgcactctaaccctaggcatcacatgctcaatgactctctggtgagcgaggacattctctgacctactcgagggacttaagatgctaccttgtgacccagcactgcccaaagtgcttccaaggcagaagcagcaggggatggcgtggtcaagcactcgggaaacctggggctaatcaaatccaatgggggaaatgactaaaagtcttcggtcgttagaagttgaatgggcacagcaactctaagactacagcacacgtcatttcttagctaagcggaccagcctccctgtcggcctggtgttctgtgggatccctctgggcactggtaatcccaagatctgtgcagccccgcctccaggccacatggggctgggcagctaccatttcccttttgcggatgggaggggtaacttgcacctctgacctatcacttccactgcaccccgtctcattcctccacctgccgtggacttggggtcagagactgctgtgtttgagctctgcagcccagggaccgaaaagttggtgtcaatgaattttgcttggtggatgaaatgtcagtggaagaagcagatgagaaactcttgagatcttggtcctgtgttttttctgccaccaaaggccagggtcactgaaggcctggcccacagcaggtgctgagcaaagggaacagtgaggtgcccagctagctgcagagccaccctgtgttgacacctcgcccctgctccctcccatcccttccccctttactcatagcacttcccccattggacacgtggtgcattttgcttgtttattatgttttctctccatcagaatgaaagctcctcgagggcagggactttggtctattgtctgtatttgccggtgcctaggattgtgcctgtatgcaacaggcactcaataaatatttttgctgtagactgg

SEQ ID NO: 56521 - DNA, 1222 bp, Homo Sapiens
agctcagcaggacctcagccatgagacttctcatcctggccctccttggcatctgctctctcactgcatacattgtggaaggtgtagggagtgaagtctcagataagaggacctgtgtgagcctcactacccagcgactgccggttagcagaatcaagacctacaccatcacggaaggctccttgagagcagtaatttttattaccaaacgtggcctaaaagtctgtgctgatccacaagccacatgggtgagagacgtggtcaggagcatggacaggaaatccaacaccagaaataacatgatccagaccaagccaacaggaacccagcaatcgaccaatacagctgtgactctgactggctagtagtctctggcaccctgtccgtctccagccagccagctcatttcactttacacgctcatggactgagtttatactcaccttttatgaaagcactgcatgaataaaattattcctttgtatttttacttttaaatgtcttctgtattcacttatatgttctaattaataaattatttattattaagaatagttccctagtctattcattatatttagggaaaggtagtgtatcattgttgtttgatttctgaccttgtacctctctttgatggtaaccataatggaagagattctggctagtgtctatcagaggtgaaagctatatcaatctctcttagagtccagcttgtaatggttctttacacatcagtcacaagttacagctgtgacaatggcaacaatttgagatgtatttcaacttgtctctataatagaattctgtttatagaataagggagaaaataatccagtcttcactgggttcccattctgagggtccactactcaaaaatttgcttcactcaatttttttcacctctttgtgttttattttggtgtcctattaaaggaataaaatgacacaacttgtcccttttttgtcccattagcaaaaattagaattttggtataaagaaactttattcaagtaaaaatcaataccctttgaattggacaataatctcactaccttattaggatttctgtatttgccattacgctagttatcatgcatgttatgctttactgcgaataagcttttaatgctccaaatgctgacccatgcaatatttcctcatgtgatcacaatttgcagtaaacttttaattaaatgctcatctggtaactcaacaccccag

SEQ ID NO: 56522 - DNA, 1872 bp, Homo Sapiens
ttcagaaaaaaagtgattcaatttccataaatttaatttactcacagcgttttcataatgttgctataacatctgaatgacagtccatggcatattcctggttgcagcaagcactctcctactccctgtccatattagatgcatctcctgttttcaagggagagaaacccctgctcagcccctgatgagcacatcatcaaatatttactattgttttattaatcaatgtgggtggttattatgtgtctctggctcagggagtgtttcatccaactaagctccctcagtggttgtctcacttcatctcttatagattaacttccttccaaaatgtcaccattcctgtacctggttctcttggtacttgggcttcatgctacaatccactgtgcatcacctgaaggcaaagtaacagcctgccattcatcccaaccaaatgccactctctacaagatgtcatccattaatgctgactttgcattcaatctgtaccggaggttcactgtggagaccccagataagaacatcttcttttcccctgtgagcatttctgcagctttggttatgctttcctttggggcctgctgcagcacccaaactgagattgtggagaccttggggttcaacctcacagacactccaatggtagagatccagcatggcttccagcatctgatctgttcactgaattttccaaagaaggaactggaattgcagataggaaatgccctcttcattggcaagcatctgaaaccactggcaaagttcttgaatgatgtcaagaccctctatgagactgaagtcttttctaccgacttctccaacatttctgcagccaagcaggagattaacagtcatgtggagatgcaaaccaaagggaaagttgtgggtctaattcaagacctcaagccaaacaccactatggtcttagtgaactatattcactttaaagcccagtgggcaaatccttttgatccatccaagacagaagacagttccagcttcttaatagacaagaccaccactgttcaagtgcccatgatgcaccagatggaacaatactatcacctagtggatatggaattgaactgcacagttctgcaaatggactacagcaagaatgctctggcactctttgttcttcccaaggagggacagatggagtcagtggaagctgccatgtcatctaaaacactgaagaagtggaaccgcttactacagaagggatgggttgacttgtttgttccaaagttttccatttctgccacatatgaccttggagccacacttttgaagatgggcattcagcatgcctattctgaaaatgctgatttttctggactcacagaggacaatggtctgaaactttccaatgctgcccataaggctgtgctgcacattggtgaaaagggaactgaagctgcagctgtccctgaagttgaactttcggatcagcctgaaaacactttcctacaccctattatccaaattgatagatctttcatgttgttgattttggagagaagcacaaggagtattctctttctagggaaagttgtgaacccaacggaagcgtagttgggaaaaaggccattggctaattgcacgtgtgtattgcaatgggaaataaataaataatatagcctggtgtgattgatgtgagcttggacttgcattcccttatgatgggatgaagattgaaccctggctgaactttgttggctgtggaagaggccaatcctatggcagagcattcagaatgtcaatgagtaattcattattatccaaagcataggaaggctctatgtttgtatatttctctttgtcagaatacccctcaactcatttgctctaataaatttgactgggttg

SEQ ID NO: 56523 - DNA, 886 bp, Homo Sapiens
tttccgcgagcgccggcactgcccgctccgagcccgtgtctgtcgggtgccgagccaactttcctgcgtccatgcagccccgccggcaacggctgcctgctccctggtccgggcccaggggcccgcgccccaccgccccgctgctcgcgctgctgctgttgctcgccccggtggcggcgcccgcggggtccggggaccccgacgaccctgggcagcctcaggatgctggggtcccgcgcaggctcctgcagcaggcggcgcgcgcggcgcttcacttcttcaacttccggtccggctcgcccagcgcgctacgagtgctggccgaggtgcaggagggccgcgcgtggattaatccaaaagagggatgtaaagttcacgtggtcttcagcacagagcgctacaacccagagtctttacttcaggaaggtgagggacgtttggggaaatgttctgctcgagtgtttttcaagaatcagaaacccagaccaaccatcaatgtaacttgtacacggctcatcgagaaaaagaaaagacaacaagaggattacctgctttacaagcaaatgaagcaactgaaaaaccccttggaaatagtcagcatacctgataatcatggacatattgatccctctctgagactcatctgggatttggctttccttggaagctcttacgtgatgtgggaaatgacaacacaggtgtcacactactacttggcacagctcactagtgtgaggcagtgggtaagaaaaacctgaaaattaacttgtgccacaagagttacaatcaaagtggtctccttagactgaattcatgtgaacttctaatttcatatcaagagttgtaatcacatttatttcaataaatatgtgagttcctgcaaaaa

SEQ ID NO: 56524 - DNA, 7878 bp, Homo Sapiens
ctaaaaataccattaagtaatagtattagcttttgtattctgagattcaacagcagcagtcacttccctccactcctatgtgtatcccaggaccaccctgggcggggagggctgaggtcagggaggtctgaagctggtcctgggctccgggggtgacagtgatgaggaactgggtgcacacatgagtggggcagccgggcctggccagagaagcaacacacacgtgcacagacatgtttatccacatacacatgtgcacgcatgtgcacaaacacattgcaggcaggcatgttgacgcctcaggcagcggaggaccctgactctgggccctgctgacccgggcaaggcccattgtgatgcgtgccatgacctcagaatgtcactggtgcttagcacctatccgctctccagactgcgtctgtgttctacggcagttacacacacgcagtggtattcacaagcggttttgtggactcaaaggttttctccctgagaggcataacccaggccagctgattcatcagaatcaggtgagtgtgacctgctctcttccctccaggctgacttggggacagtggctatggtatgggcggtgttggcctctgggcagctacagaggagggtcatccctgagcactcaccgggcgcccgttctacactgcccatgtagacgattttctctttcgtcttcatggtggcttcgtagagtgggtgctgttcccaaatgtacccattcgacaggtgagccgtctggggtcagagaggcagtaactggcctgggaatccagacaagaccctgggttttgctctcagccctgctgtgtgccatgctagacttcaggcctcaaccctgagacctccctgctctagatcccaaatctgcccagatttccgatccaatgggcagagcctggccctggcagagacactgggatggatccactgtgggtggggaggagggaagggtcctcagaacacacctggggcctaagctgggtcttgatggtcactgtgggacccactggacacacacagtcccttgtctgggagtggcatggggagccttctgcccttgggcagttgtggaaagtgaaggagccctggagagctggctgaggggagactatcttcccttgtgttcaaaggggtccaggcactggggctctccccaagtatttcttattctgtctggcctcgctttccttttgccctgagtattctcaggagggacggtccatctagatgtcctccaggagcaaggacccactgttcttcatcagtgacccaggaaaatgaagccccctcctgtggggacagctcagaatggtggagtccacagtccctccctgagagacatggtttccatgagcacagtggctgctttggagacagtaatcattttcatccccaaaaccaaacacactcctgctcaaatggtgttattgctaaagcagcttcactggttagactgaagggccatggtagcccaagtgatgagcggggtagaatggagcagtcaggagagatcttgttccccgtaggaaactgggcatctctgtggccctgaacatcccaggaggccgatcgtacagagacctctggtgcctgaccgcagttcacatccacatccctggaatagaccatcacaggctcttcacccttggcaggtggacaccattcaacctgccggggcaggatggacatggtagagaatgcagatagtttgcaggcacaggagcggaaggacatacttatgaagtatgacaagggacaccgagctgggctgccagaggacaaggggcctgagcccgttggaatcaacagcagcattgatcgttttggcattttgcatgagacggagctgcctcctgtgactgcacgggaggcgaagaaaattcggcgggagatgacacgaacgagcaagtggatggaaatgctgggagaatgggagacatataagcacagtagcaaactcatagatcgagtgtacaagggaattcccatgaacatccggggcccggtgtggtcagtcctcctgaacattcaggaaatcaagttgaaaaaccccggaagataccagatcatgaaggagaggggcaagaggtcatctgaacacatccaccacatcgacctggacgtgaggacgactctccggaaccatgtcttctttagggatcgatatggagccaagcagagggaactattctacatcctcctggcctattcggagtataacccggaggtgggctactgcagggacctgagccacatcaccgccttgttcctcctttatctgcctgaggaggacgcattctgggcactggtgcagctgctggccagtgagaggcactccctgccaggattccacagcccaaatggtgggacagtccaggggctccaagaccaacaggagcatgtggtacccaagtcacaacccaagaccatgtggcatcaggacaaggaaggtctatgcgggcagtgtgcctcgttaggctgccttctccggaacctgattgacgggatctctctcgggctcaccctgcgcctgtgggacgtgtatttggtggaaggagaacaggtgttgatgccaataaccagcattgctcttaaggttcagcagaagcgcctcatgaagacatccaggtgtggcctgtgggcacgtctgcggaaccaattcttcgatacctgggccatgaacgatgacaccgtgctcaagcatcttagggcctctacgaagaaactaacaaggaagcaaggggacctgccacccccagccaaacgcgagcaagggtccttggcacccaggcctgtgccggcttcacgtggtgggaagaccctctgcaaggggtataggcaggcccctccaggcccaccagcccagttccagcggcccatttgctcagcttccccgccatgggcatctcgtttttccacgccctgtcctggtggggctgtccgggaagacacgtaccctgtgggcactcagggtgtgcccagcctggccctggctcagggaggacctcagggttcctggagattcctggagtggaagtcaatgccccggctcccaacggacctggatatagggggcccttggttcccccattatgattttgaacggagctgctgggtccgtgccatatcccaggaggaccagctggccacctgctggcaggctgaacactgcggagaggttcacaacaaagatatgagttggcctgaggagatgtcttttacagcaaatagtagtaaaatagatagacaaaaggttcccacagaaaagggagccacaggtctaagcaacctgggaaacacatgcttcatgaactcaagcatccagtgcgttagtaacacacagccactgacacagtattttatctcagggagacatctttatgaactcaacaggacaaatcccattggtatgaaggggcatatggctaaatgctatggtgatttagtgcaggaactctggagtggaactcagaagagtgttgccccattaaagcttcggcggaccatagcaaaatatgctcccaagtttgatgggtttcagcaacaagactcccaagaacttctggcttttctcttggatggtcttcatgaagatctcaaccgagtccatgaaaagccatatgtggaactgaaggacagtgatggccgaccagactgggaagtagctgcagaggcctgggacaaccatctaagaagaaatagatcaattattgtggatttgttccatgggcagctaagatctcaagtcaaatgcaagacatgtgggcatataagtgtccgatttgaccctttcaattttttgtctttgccactaccaatggacagttacatggacttagaaataacagtgattaagttagatggtactacccctgtacggtatggactaagactgaatatggatgaaaagtacacaggtttaaaaaaacagctgagggatctctgtggacttaattcagaacaaatcctactagcagaagtacatgattccaacataaagatttctcctcttcaccatctacaaatggaatgttcaccctaactaccaatggggacctacccaaaccaatattcatccccaatggaatgccaaacactgttgtgccatgtggaactgagaagaacttcacaaatggaatggttaatggtcacatgccatctcttcctgacagcccctttacaggttacatcattgcagtccaccgaaaaatgatgaggacagaactgtatttcctgtcacctcaggagaatcgccccagcctctttggaatgccattgattgttccatgcactgtgcatacccagaagaaagacctatatgatgcggtttggattcaagtatcctggttagcaagaccactcccacctcaggaagctagtattcatgcccaggatcgtgataactgtatgggctatcaatatccattcactctacgagttgtgcagaaagatgggatctcctgtgcttggtgcccacagtatagattttgcagaggctgtaaaattgattgtggggaagacagagctttcattggaaatgcctatattgctgtggattggcaccccacagcccttcaccttcgctatcaaacatcccaggaaagggttgtagataagcatgagagtgtggagcagagtcggcgagcgcaagccgagcccatcaacctggacagctgtctccgtgctttcaccagtgaggaagagctaggggaaagtgagatgtactactgttccaagtgtaagacccactgcttagcaacaaagaagctggatctctggaggcttccacccttcctgattattcaccttaagcgatttcaatttgtaaatgatcagtggataaaatcacagaaaattgtcagatttcttcgggaaagttttgatccgagtgcttttttggtaccacgagacccggccctctgccagcataaaccactcacaccccagggggatgagctctccaagcccaggattctggcaagagaggtgaagaaagtggatgcgcagagttcggctggaaaagaggacatgctcctaagcaaaagcccatcttcactcagcgctaacatcagcagcagcccaaaaggttctccttcttcatcaagaaaaagtggaaccagctgtccctccagcaaaaacagcagccctaatagcagcccacggactttggggaggagcaaagggaggctccggctgccccagattggcagcaaaaataagccgtcaagtagtaagaagaacttggatgccagcaaagagaatggggctgggcagatctgtgagctggctgacgccttgagccgagggcatatgcgggggggcagccaaccagagctggtcactcctcaggaccatgaggtagctttggccaatggattcctttatgagcatgaagcatgtggcaatggctgtggcgatggctacagcaatggtcagcttggaaaccacagtgaagaagacagcactgatgaccaaagagaagacactcatattaagcctatttataatctatatgcaatttcatgccattcaggaattctgagtgggggccattacatcacttatgccaaaaacccaaactgcaagtggtactgttataatgacagcagctgtgaggaacttcaccctgatgaaattgacaccgactctgcctacattcttttctatgagcagcaggggatagactacgcacaatttctgccaaagattgatggcaaaaagatggcagacacaagcagtacggatgaagactctgagtctgattacgaaaagtactctatgttacagtaaagctaccactctggctgctagacagcttggtggcgagggagatgactccttgtagctgatacttggcaaaagtgtcactgaaagacaagctaaatgtagttattttatcctgttagaacaaaaattctaattaaaatagttaacttgaagagtagaaacaattgtattttgaagtctcatacaagctgtctgatagagaactttcaggcagatcccaccattagcctgtaaacaaaaggtgtggcaccagccacctgggaccaaataagaattgaattgtgcttgtccagatatgaacaaatatgtagtgagtatagagtttaccaataatcataacaaatattaaagatttccttggagtcagaggaaaaaacaaacaattataatgttgtctagggacgacatgatacgctacctcctttttcctgaagttttattccattatattgacaagatggagaaagcaagatcatgaaggtgtgcaaatgattcttacggcatggacaaggatttttcaatttattttttaaactgtttccataccctttctttttcttgctttttgtttttgccattgtgtttacgtttgagacacaaccagtcattggtggcaggggcatagagtggtcagtctgaaagggaggctctcttaagagctatgtgccttccaaccagagggagacccagtagaaagaaaaacatcctgggaaatccagctaccagggccctcccagtggaggcatcttacatttaggctacttcaagtatcctcagaaatgtattctgcacccccggccccgcccatgctgagggaaggggagcagttgccaatatttgcaccatcttcacatgcacatgttgcaacaagagcttctgggaaggtaagcggcatcggagctagatcacgtttcacaattagtggttattcttttctgtgtttgttttgcactttaaaaaagagagaacacatgcaaatgaacttgcttgtgtgtatttgatggctctaagggctataaattacaaacaaaacacatcccagacattaggagttcataagtatatttaatgaaattggtggttttaggaagtcaactttagttttgctttgtttgcatgtccactggtttttttattttgatatttgtctttttttaaattttacagtagtcattgaaagttatgtttctttgcttacttcattttttccctctaattatttaagattggaacaaaagtataaatattatttatttgaggtagaatttttttcatgtagtttcttaatatatacttgaaggaaatgtttcaccttatttttggtctttgtttattcatttagaccctgcaagttgattctcattgccagattccattaccctttcttcctcataggtagtaattaccaatgtaactaagcatttgtgttctgatatctgaggccagtaactattaatatctagttctcagagcatttggaaaggttatcttaaatggctacctaaattgaaatccttttcagaaaaaatataattgcaagtaggtaggagtggcctaaattgtctaatgtaataaagtcagacaaaatgcacactttatagtttcaagattttcagtaaataaaatctgtccattcctacctggacatgtcccattaaaaagtggaagattttaaataatttctttacagatgttttatttaaacaggtagcacaatctactaatgttgtgtgatttgtgttatactggttgtaattaatttttttaattcatgaactagcggaaaatttattaaattaactattaactacattcaccttgtaaattactgtataaaacttgttgacaatgcactgactttagaaagatgttaatgtacataaatagagtgtaaataaaatagtgttgatgtactgaaatatgaactgtatcaaaagtattggtaattgtatatggggtgtacctgtttatctgttaactattatccaaacaaattaaatactgtggttgcctctatgtgctgtttttcctcatacaagtaaacacagaaagtcaaaaaaaaaaaaaaaaaaaaaa

SEQ ID NO: 56525 - DNA, 2246 bp, Homo Sapiens
agttcccgttaaccttagccacaaagtcaaagatggcaggaaagggacacagccggcgctgatgctgggaggcctccagggatggagagtggcctggctggcaacggcacaggagctgggctggtgatgaaggtcaagcaggagaagccggagcggctgctgcagacgctggcgccgcaggccatgcttgtggagaaggacaaggagaacatctttcagcagcaccggggcctcccgccacgccagaccatggggcggcctcgagccctggggggacaggaggagtctgggagtccaaggtgggcccctcccactgagcaggatgcggggctggcaggccgggctcccgggtcagcctccggccccctgagcccctcgctttcctccggcgagggtcactttgtatgcctggactgcgggaagaggttcagctggtggtcgtccctgaagatccaccagcgcacccacaccggggagaagccgtacctctgcggcaagtgcggcaagagcttcagccagaagccgaacctggcgcgccaccagcggcaccacacgggcgagcgacccttctgctgccccgagtgcgcgcggcgcttcagccagaagcagcacctgctcaagcaccagaagacccactcccggcccgccacccactcgtgccccgagtgcgagcgctgcttccgtcaccaggtgggcctccgcatccaccagcgcgcgcacgcccgggaccgccagggctcccgcgccggcctgcacgagctgattcaggacgcggcggcgcgccgggcctgtcgcctgcagccggggccgccgcgggggcgccccgagtgggcctggctggggctctgccagggctggtggggccagcccggggcccgggccgcggtctccggcccccgaggggccgggcgagccgcgccagttcatctgcaacgagtgtggcaagagcttcacctggtggtcgtcgctgaacatccaccagcgcatccacactggcgagcgcccctatgcgtgccccgagtgcggccgccgcttcagccagaagcccaacttgacgcggcacctgcgcaaccacacaggcgagcgcccgcacccctgcccgcactgtggccgcggcttccgccagaagcagcacctgctcaagcacctgcgcacgcacctgcccggcgcccaggctgcgccctgccccagctgcggtaagagctgccgcagccgcgccgcgctgcgcgcccaccagcgcgcccacgctgtcgctgagcccgccgttccggccggggaaccgggcgaccagccgcaggccgaggccatcccgggcttggccgcgaggccgcggagctcccaacggtccccgggggcccgggacgcgctgtggggccggggacaagcgggcctcgctgggcctggcgagccgcgccagttcatctgcaacgagtgcggcaagagcttctcgtggtggtcggcgctcaccatccaccagcgcatccacacgggtgagcggccctacccgtgccccgagtgcggccgccgcttcagccagaagcccaacctgacgcggcaccggcgcaaccacacaggcgagcggccctacctgtgtcccgcctgcggccgcggcttcagccagaagcagcacctgctcaagcaccagcgcgtgcaccgcgcggcccctgcgtgcagccccaaggaggaggcgcgctagtggactggacctcagcggacccgtggtggtgcgggggatgtttgcggggtgtgtgtggggagtgggggtggccaggattgctggctcctagaaccccttagagcgggaccggtggattccttaaggctctgaagggctgagaacagttctagaagcgtcccaaagggtgctgggaaaggtcccagcgtgggttgagggaggagggaagatccgagttcctcaccgcgggccgggatgtgaccaccctcttcagaggttggaccccaggcttcaagcaccgagtgaggggtctgttggggacgctgggagagtctctggtgtgaagtggcttaggtctggactggtcagctgtggcaccagccggtcctgcccacgcttcaggatggccgggggctgcccctgtgggagagttgccaagactcggcgataccaaggatggaagccagaggctgtggcgagggagagccaagcatattcccagcaccagggccactgctggcacgtcgtagacatccaataaatatttttggaaggaaaaaaaaaaaaaaaa

SEQ ID NO: 56526 - DNA, 2500 bp, Homo Sapiens
tatattacttaaacaaccaaagatatgaaactatccatgaagaacaatattatcaatacacagcagtcttttgtaaccatgcccaatgtgattgtaccagatattgaaaaggaaatacgaaggatggaaaatggagcatgcagctccttttctgaggatgatgacagtgcctatacatctgaagaatcagagaatgaaaaccctcatgcaaggggttcctttagttataagtcactcagaaagggaggaccatcacagagggagcagtacctgcctggtgccattgccatttttaatgtgaacaacagcagcaataaggaccaggaaccagaggaaaaaaagaaaaagaaaaaagaaaagaagagcaagtcagatgataaaaacgaaaataaaaacgacccagagaagaaaaagaagaaaaaggacaaagagaagaaaaagaaagaggagaaaagcaaagataagaaagaacaccacaagaaagaagttgtggttattgatccctcgggaaacacatattacaactggctgttttgcatcacattacctgttatgtacaactggacaatggttattgccagagcatgttttgatgaacttcaatctgattacctagaatattggctcattttggattacgtatcagacatagtctatttaatcgatatgtttgtacgaacaaggacaggttacctagaacaaggactgctggtaaaggaagaacttaaactcataaataaatataaatccaacttgcaatttaaacttgatgttctgtcactgataccaactgatttgctgtattttaagttagggtggaactatccagaaattagattaaacaggttgttacggttctctcgtatgtttgagttcttccagagaacagaaacaaggacaaactatccaaacatcttcaggatttccaaccttgttatgtatatcgtcatcattatccactggaatgcatgtgtgttctactctatttctaaagctattggatttggaaatgatacatgggtctaccctgatattaatgatcctgaatttggccgtttggctagaaaatacgtatacagcctttactggtctacactgactttgactaccattggtgaaacaccccctcccgtgagggattctgagtatgtctttgtggtggttgatttcctaattggagtgttaatttttgctaccatcgttggtaacataggttctatgatttccaacatgaatgcagccagagcagaatttcaagcaagaattgatgctatcaagcaatatatgcattttcgaaatgtaagcaaagatatggaaaagagggttattaaatggtttgactacctgtggaccaacaaaaaaacagttgatgagaaagaagtcttaaagtatctacctgataaactaagagcagaaattgccatcaacgttcacttagacacattaaaaaaggtacgcatttttgctgattgtgaagctggtctgttggtggagttggtcttgaaattgcaaccccaagtctacagtcctggagattatatttgcaagaaaggggatatcggacgagagatgtacattatcaaggaaggcaaactcgctgtggtggcagatgatggagtcactcagtttgtggtattgagcgatggcagcaccttcggtgagatcagcattcttaacattaaagggagcaaagctggcaatcgaagaacggccaatattaaaagtattggctactcagacctgttctgtctctcaaaagatgacctcatggaagctctaactgagtacccagatgccaaaactatgctagaagaaaaagggaagcaaattttaatgaaagatggtctactggatctaaacattgcaaatgctggcagtgatcctaaagatcttgaagagaaggttactcgaatggaggggtcagtagacctcctgcaaaccaggtttgcccgaatcttggctgagtatgagtccatgcagcagaaactgaaacaaagattaaccaaggttgagaaatttctgaaaccgcttattgacacagaattttcaagtattgagggaccttggagcgaaagtgggcccatcgactctacatagaaccgaaaagctggtcattaacagggacatgcctcatgatccttttgatcctatgactgacatcaactaaaatttaaaagaagaggaagactcagttgggaaatttttccatgaggaaaatgtgctttggtgcaaggtacagcccacacctctctgagagatactatgattaaaaaagctttatatctgggatttttcacaactgataatgtgcaaagatataaactgattaacttgtcagtgtctgtattttctgattttttcacatacgctcattttatgtaatattcttcataaaaatgaataagtagccctcactttcatgccatttccattgttgagtgaagcgtatttgaagtaactgagaattaccatgtacatcatatttgggataacattttta

SEQ ID NO: 56527 - DNA, 1128 bp, Homo Sapiens; identical to SEQ ID NO: 29230

SEQ ID NO: 56528 - DNA, 2619 bp, Homo Sapiens; identical to SEQ ID NO: 31016

SEQ ID NO: 56529 - DNA, 3003 bp, Homo Sapiens
cgaagtcaagacgtctggaaagaattacccagtcctggcttcgagcagcccattgaaccagagacttgaaacagccccagccaaagacttttctcccaattctgcgcttcctgggttctgctgagtcttccacaggctttttttttttttttttttttttaagacgaaaaagagattttctgttatcgggggcagaaagactgaagcacaaaaaaaaaaaaaaagaaaagaaaagaaaagaaaaaagaaaagttaatttatttttaaagcataatttttttaagaattagactgaagtgcaacggaaacataaagagaatattagtgaaattattttttaaagtggggaagaatcaaacatttaagactcccctatcctttttaaatgttgtttttaaatttcttattttttttggccggtcgtctcaaattcatctgatctcttattacctcaattttggaaactgcccgccaccgaccctccgggaccacacagacaggctgaggacgactttatgaccaagagctgaacaagatgcattgtgagaggtttctatgtatcctgagaataattggaaccacactctttggagtctctctcctccttggaatcacagctgcttatattgttggctaccagtttatccaaacggataattactatttctcttttggactgtatggtgcctttttggcatcacacctcatcatccaaagcctgtttgcctttttggagcaccgaaaaatgaaaaaatccctagaaacccccataaagttgaacaaaacagttgccctttgcatcgctgcctatcaagaagatccagactacttaaggaaatgtttgcaatctgtgaaaaggctaacctaccctgggattaaagttgtcatggtcatagatgggaactcagaagatgacctttacatgatggacatcttcagtgaagtcatgggcagagacaaatcagccacttatatctggaagaacaacttccacgaaaagggtcccggtgagacagatgagtcacataaagaaagctcgcaacacgtaacgcaattggtcttgtccaacaaaagtatctgcatcatgcaaaaatggggtggaaaaagagaagtcatgtacacagccttcagagcactgggacgaagtgtggattatgtacaggtttgtgattcagacactatgcttgacccagcctcatctgtggagatggtaaaagttttagaagaagatcccatggttggaggtgttgggggagatgtccagattttaaacaagtacgattcctggatctcattcctcagcagtgtaagatattggatggcttttaatatagaaagggcctgtcagtcttattttgggtgtgttcagtgcattagtggacctctgggaatgtacagaaactccttgttgcatgagtttgtggaagattggtacaatcaagaatttatgggcaaccaatgtagctttggtgatgacaggcatctcacgaaccgggtgctgagcctgggctatgcaacaaaatacacagctcgatctaagtgccttactgaaacacctatagagtatctcagatggctaaaccagcagacccgttggagcaagtcctacttccgagaatggctgtacaatgcaatgtggtttcacaaacatcacttgtggatgacctacgaagcgattatcactggattctttcctttctttctcattgccacagtaatccagctcttctaccggggtaaaatttggaacattctcctcttcttgttaactgtccagctagtaggtctcataaaatcatcttttgccagctgccttagaggaaatatcgtcatggtcttcatgtctctctactcagtgttatacatgtcgagtttacttcccgccaagatgtttgcaattgcaacaataaacaaagctgggtggggcacatcaggaaggaaaaccattgttgttaatttcataggactcattccagtatcagtttggtttacaatcctcctgggtggtgtgattttcaccatttataaggagtctaaaaggccattttcagaatccaaacagacagttctaattgttggaacgttgctctatgcatgctattgggtcatgcttttgacgctgtatgtagttctcatcaataagtgtggcaggcggaagaagggacaacaatatgacatggtgcttgatgtatgatcttccatgttttgacgtttgcagtcacacacaacaccttagttcctctaggggctgtacagtattgtggcatcagataatgccaccaaaggagacatatcactgctgctgggacttgaacaaagacatttatatgggtttattttcattctgccaaagtaaaacaatacatcaacaagaagaaactcagatttaacctgttatttctatgaaaatgggatgaattctttgtttatgcactttttccttactgtgcatccgcctgaaagtgttttggcctatatacctcactagccatgctttatgtgggttatcatggaagaaaaggattttggaaactcaaggaaaagttctttcaacctatacaacctaacttatggactgtttgatagatgataattttttttttttaggaaggattttctttttaactttaccaaatgaaatgccaaaggaagttttaaaggccgtggctgtgctgtatttgatataattgtactgtgtttttaaattgtgtatgccaatcttaaagacaaattttgcatattctctattttacttttctgccaaaataaacctgttcttccttttttaaaataaaataagttcttaaaaaatttatacttaaaaaatcctgcccaaaatgtgaagcttggttgactgatgttcatgatagaaagaataaaatgtttctctctctctaccttttaaaattgaatagtttatttctgtgaaagaagtatttaaactttcaatattttaactttttgtttttatttcttttagaaaaggccaatatacctatcgcg

SEQ ID NO: 56530 - DNA, 1567 bp, Homo Sapiens
gattcacatccattggtcaggggcaaataccactagctctgcatcctcagtcactttgtgccatttcatcaggtcagagccaaaggaaagcttgaaaaatgaagacattagcaggacttgttctgggacttgtcatcttggatgctgctgtgactgccccaactctagagtccatcaactatgactcagaaacctatgatgccaccttagaagacctggataatttgtacaactatgaaaacatacctgttgataaagttgagattgaaatagccacagtaatgccttcagggaacagagagctcctcactccacccccacagcctgagaaggcccaggaagaggaagaggaggaggaatctactcccaggctgattgatggctcttctccccaggagcctgaattcacaggggttctggggccacacacaaatgaagactttccaacctgtctttggtgtacttgtataagtaccaccgtgtactgtgatgaccatgaacttgatgctattcctccgctgccaaagaacaccgcttatttctattcccgctttaacagaattaaaaagatcaacaaaaatgactttgcaagcctaagtgatttaaaaaggattgatctgacatcaaatttaatatctgagattgatgaagatgcattccgaaaactgcctcaacttcgagagcttgtcctgcgtgacaacaaaataaggcagctcccagaattgccaaccacttcgacatttattgatattagcaacaatagacttggaaggaaagggataaagcaagaagcatttaaagacatgtatgatctccatcatctgtacctcactgataacaacttggaccacatccctctgccactcccagaaaatctacgagcccttcacctccagaataacaacattctggaaatgcacgaagatacgttctgcaatggtaaaaatttgacttatattcgtaaggcactagaggacattcgattggatggaaaccctattaatctcagcaaaactccacaagcatacatgtgtctacctcgtctgcctgttgggagccttgtctaatttcagataatggttagcattacgatggctactataaataaaccattcttactgctctcttccaaaacaaaactcagcatgatactttgagattgtgttctgagagatgatatgactacataaaatacaattaaaaatgttataatataatgaaaatgtagtaatttaagaaaacaccagatgagttaggaataaacctataacatttacaaaaagagcaaaactaagtgatagaaaatatttcacacatgttcttatagatcatgtatcacttgcaagttttaggagttcatatcctatatcatttcaaattaagtacataataaagtaaaattttgaaatgaacactttaggtatttttgccaagatttagatgtttttaattaaacttttctcttcctttttttttcactaaggcatgtttattcccctaatccattaaagagcatgaaaaaaagaataaatgtatttgaaaaaaaaaaaaaaaaaaaaaaaaaaaa

SEQ ID NO: 56531 - DNA, 1235 bp, Homo Sapiens
ctcagctccgcaccgcaactgaagatctgccgccgcggaacagttgcgtctccatctggctaccaacccacccaagctttcttctccaccaccaccaccttccttccttccccctcctccccctcctttccgtcttccctctccacccccgcccccaatctcctcctttttttctcactacgagcggttgctgatgctgaagccgagcgtcacttcggctcccacggcagacatggcgacattgacagtggtccagccgctcaccctggacagagatgttgcaagagcaattgaattactggaaaaactacaggaatctggagaagtaccagtgcacaagctacaatccctcaaaaaagtgcttcagagtgagttttgtacagctattcgagaggtgtatcaatatatgcatgaaacgataactgttaatggctgtcccgaattccgtgcgagggcaacagcaaaggcaacagttgcagcttttgcagctagtgaaggccactcccaccctcgagtagttgaactgccaaagactgatgaaggccttggttttaatgtgatgggaggaaaggagcaaaattcccccatttatatctctcgcataattcctggaggggtggctgaaagacacggaggcctcaaaagaggagaccagctgctatcagtgaacggagtgagtgtggaaggagaacaccatgagaaagctgtggaactactcaaggctgctaaagacagcgtcaagctggtggtgcgatacaccccaaaagttctggaagaaatggaggctcgctttgaaaagctacgaacagccaggcgtcggcagcagcagcaattgctaattcagcagcagcaacagcagcagcagcaacaaacacaacaaaaccacatgtcataggcccttgagggaaagctacttgatcaaacatccgatagtcacaaatttgaaaccgtgcttcagaatcccagcacatagtaaaagacaacactgataattatacctgtcaagaagctgtgaacacatggtgtataaattctttaccaaggcaactcaacaccttctttctctgggcttgaaccgccactgctcacgtgggctttacatacattgaccttccattcactgcagtgggaattctcagtgtgcagagggagaggttttctagtctgcaaactgaaacagtgtaagaagaataaagtctatgacttttaaataaatcaccagggccaagaaaaag

SEQ ID NO: 56532 - DNA, 5121 bp, Homo Sapiens
gcgaggaggaaacggtgccggagcgcgcagggcttgctgccgccaccgccgctgcacaggctgccggagcgagcctgccgcgcgccgccctccccgctctccttcctgggcgagctgcggggatggggcggccgcgggagcccgagcgcgcgcaggaaccgccgccgccgccgcccgcgtctccgttgccgcgcgcctgagccgccgtcgccgccgcgcgccctgcccgggggcggcccccccagccccatggaggtctcccggaggaaggcgccgccgcgccccccgcgccccgcagcgccactgcccctgctcgcctatctgctggcactggcggctcccggccggggcgcggacgagcccgtgtggcggtcggagcaagccatcggagccatcgcggcgagccaggaggacggcgtgtttgtggcgagcggcagctgcctggaccagctggactacagcctggagcacagcctctcgcgcctgtaccgggaccaagcgggcaactgcacagagccggtctcgctggcgccccccgcgcggccccggcccgggagcagcttcagcaagctgctgctgccctaccgcgagggggcggccggcctcggggggctgctgctcaccggctggaccttcgaccggggcgcctgcgaggtgcggcccctgggcaacctgagccgcaactccctgcgcaacggcaccgaggtggtgtcgtgccacccgcagggctcgacggccggcgtggtgtaccgcgcgggccggaacaaccgctggtacctggcggtggccgccacctacgtgctgcctgagccggagacggcgagccgctgcaaccccgcggcatccgaccacgacacggccatcgcgctcaaggacacggaggggcgcagcctggccacgcaggagctggggcgcctcaagctgtgcgagggcgcgggcagcctgcacttcgtggacgcctttctctggaacggcagcatctacttcccctactacccctacaactatacgagcggcgctgccaccggctggcccagcatggcgcgcatcgcgcagagcaccgaggtgctgttccagggccaggcatccctcgactgcggccacggccaccccgacggccgccgcctgctcctctcctccagcctagtggaggccctggacgtctgggcgggagtgttcagcgcggccgctggagagggccaggagcggcgctcccccaccaccacggcgctctgcctcttcagaatgagtgagatccaggcgcgcgccaagagggtcagctgggacttcaagacggccgagagccactgcaaagaaggggatcaacctgaaagagtccaaccaatcgcatcatctaccttgatccattccgacctgacatccgtttatggcaccgtggtaatgaacaggactgttttattcttggggactggagatggccagttacttaaggttattcttggtgagaatttgacttcaaattgtccagaggttatctatgaaattaaagaagagacacctgttttctacaaactcgttcctgatcctgtgaagaatatctacatttatctaacagctgggaaagaggtgaggagaattcgtgttgcaaactgcaataaacataaatcctgttcggagtgtttaacagccacagaccctcactgcggttggtgccattcgctacaaaggtgcacttttcaaggagattgtgtacattcagagaacttagaaaactggctggatatttcgtctggagcaaaaaagtgccctaaaattcagataattcgaagcagtaaagaaaagactacagtgactatggtgggaagcttctctccaagacactcaaagtgcatggtgaagaatgtggactctagcagggagctctgccagaataaaagtcagcccaaccggacctgcacctgtagcatcccaaccagagcaacctacaaagatgtttcagttgtcaacgtgatgttctccttcggttcttggaatttatcagacagattcaactttaccaactgctcatcattaaaagaatgcccagcatgcgtagaaactggctgcgcgtggtgtaaaagtgcaagaaggtgtatccaccccttcacagcttgcgacccttctgattatgagagaaaccaggaacagtgtccagtggctgtcgagaagacatcaggaggaggaagacccaaggagaacaaggggaacagaaccaaccaggctttacaggtcttctacattaagtccattgagccacagaaagtatcgacattagggaaaagcaacgtgatagtaacgggagcaaactttacccgggcatcgaacatcacaatgatcctgaaaggaaccagtacctgtgataaggatgtgatacaggttagccatgtgctaaatgacacccacatgaaattctctcttccatcaagccggaaagaaatgaaggatgtgtgtatccagtttgatggtgggaactgctcttctgtgggatccttatcctacattgctctgccacattgttcccttatatttcctgctaccacctggatcagtggtggtcaaaatataaccatgatgggcagaaattttgatgtaattgacaacttaatcatttcacatgaattaaaaggaaacataaatgtctctgaatattgtgtggcgacttactgcgggtttttagcccccagtttaaagagttcaaaagtgcgcacgaatgtcactgtgaagctgagagtacaagacacctacttggattgtggaaccctgcagtatcgggaggaccccagattcacggggtatcgggtggaatccgaggtggacacagaactggaagtgaaaattcaaaaagaaaatgacaacttcaatatttccaaaaaagacattgaaattactctcttccatggggaaaatgggcaattaaattgcagttttgaaaatattactagaaatcaagatcttaccaccatcctttgcaaaattaaaggcatcaagactgcaagcaccattgccaactcttctaagaaagttcgggtcaagctgggaaacctggagctctacgtcgagcaggagtcagttccttccacatggtattttctgattgtgctccctgtcttgctagtgattgtcatttttgcggccgtgggggtgaccaggcacaaatcgaaggagctgagtcgcaaacagagtcaacaactagaattgctggaaagcgagctccggaaagagatacgtgacggctttgctgagctgcagatggataaattggatgtggttgatagttttggaactgttcccttccttgactacaaacattttgctctgagaactttcttccctgagtcaggtggcttcacccacatcttcactgaagatatgcataacagagacgccaacgacaagaatgaaagtctcacagctttggatgccctaatctgtaataaaagctttcttgttactgtcatccacacccttgaaaagcagaagaacttttctgtgaaggacaggtgtctgtttgcctccttcctaaccattgcactgcaaaccaagctggtctacctgaccagcatcctagaggtgctgaccagggacttgatggaacagtgtagtaacatgcagccgaaactcatgctgagacgcacggagtccgtcgtcgaaaaactcctcacaaactggatgtccgtctgcctttctggatttctccgggagactgtcggagagcccttctatttgctggtgacgactctgaaccagaaaattaacaagggtcccgtggatgtaatcacttgcaaagccctgtacacacttaatgaagactggctgttgtggcaggttccggaattcagtactgtggcattaaacgtcgtctttgaaaaaatcccggaaaacgagagtgcagatgtctgtcggaatatttcagtcaatgttctcgactgtgacaccattggccaagccaaagaaaagattttccaagcattcttaagcaaaaatggctctccttatggacttcagcttaatgaaattggtcttgagcttcaaatgggcacacgacagaaagaacttctggacatcgacagttcctccgtgattcttgaagatggaatcaccaagctaaacaccattggccactatgagatatcaaatggatccactataaaagtctttaagaagatagcaaattttacttcagatgtggagtactcggatgaccactgccatttgattttaccagattcggaagcattccaagatgtgcaaggaaagagacatcgagggaagcacaagttcaaagtaaaagaaatgtatctgacaaagctgctgtcgaccaaggtggcaattcattctgtgcttgaaaaactttttagaagcatttggagtttacccaacagcagagctccatttgctataaaatacttttttgactttttggacgcccaggctgaaaacaaaaaaatcacagatcctgacgtcgtacatatttggaaaacaaacagccttcctcttcgcttctgggtaaacatcctgaagaaccctcagtttgtctttgacattaagaagacaccacatatagacggctgtttgtcagtgattgcccaggcattcatggatgcattttctctcacagagcagcaactagggaaggaagcaccaactaataagcttctctatgccaaggatatcccaacctacaaagaagaagtaaaatcttattacaaagcaatcagggatttgcctccattgtcatcctcagaaatggaagaatttttaactcaggaatctaagaaacatgaaaatgaatttaatgaagaagtggccttgacagaaatttacaaatacatcgtaaaatattttgatgagattctaaataaactagaaagagaacgagggctggaagaagctcagaaacaactcttgcatgtaaaagtcttatttgatgaaaagaagaaatgcaagtggatgtaagcactctggggcctggcttaatctggcaaagttcttcagacgacttgggagcaaaatggctgcttgagctactctgtgtcgttaatttgttgtttgcacataggttccactttgggcactgtctttttaagagaccaaggcacatgcacagcttttagaaagcaa

SEQ ID NO: 56533 - DNA, 2508 bp, Homo Sapiens
gcaaggacccggacgcgaccaggggaggcagaaggactctgcacttgtccaagagaagaatccagagaaatcagagcaggtcaaatagttctaaaagccatggcccagggactggtgacattcagggacgtggccatagagttctctctggaagaatggaagtgcctggaacctgctcagagggacttgtacagggaggtgactctggagaactttggtcacttggcctcactaggactctccatttctaagcctgatgtcgtctccttattggagcaagggaaagagccctggatgattgcaaatgatgtgacaggaccatggtgcccagacttggagtccaggtgtgagaaatttctacaaaaagacatttttgaaatcggggcattcaactgggagataatggaaagccttaaatgcagtgacctggagggctccgattttagagctgactgggaatgcgaaggccagtttgagagacaagtcaatgaagagtgctattttaagcaagtgaacgtcacctatggacatatgcccgtgttccagcatcacacgtctcacactgtacgtcagagcagggagactggtgagaaactgatggaatgtcatgaatgtgggaaagcatttagccgtggctcacaccttattcaacatcagaaaactcacactggtgaaaaaccctttggatgtaaggaatgtgggaaggccttcagccgtgcctcacaccttgttcagcatcagagaattcacacgggtgagaaaccttatgactgtaaggactgtgggaaggcctttggtcgtacatcagaacttattctacatcagagacttcatactggtgtcaaaccttatgaatgtaaagaatgtgggaagacctttaggcagcattcacagctgattctgcatcaaagaactcacacaggcgagaaaccctacgtatgtaaagactgtggcaaggctttcattcgtggctcccaactcactgtgcatcggagaatccacacaggggccagaccctatgagtgtaaagaatgcgggaaagcctttagacagcactcacagctgactgtacaccagcgaatccacactggtgagaaaccctacgagtgtaaggaatgcggaaagggctttattcacagctcagaagttactcgacatcaaagaattcattctggggagaaaccctatgagtgtaaggaatgtgggaaggccttcagacagcacgcacagctcacacgacatcagagagtccatactggcgacagaccctatgaatgtaaggactgcgggaaggcatttagtcgtagctcatacctcattcaacatcaaagaattcatacaggtgacaaaccctacgaatgtaaggaatgtgggaaggcctttattcgtgtttcacaactgactcatcatcagcgaattcacacttgtgagaaaccctatgaatgcagggagtgtggaatggcctttattcgtagttcacaacttaccgaacatcagagaattcatcctggtatcaaaccttacgaatgtagagagtgtgggcaggcatttattcttggctcacaactcattgaacactacagaattcatactggttagaaagccttgagtgtaagggataaagataagcctttatgtggagttcacatctggctcagtactaggtaatttttaatgtagtgtaattaatgtcagaaaacacctgtcacttccatcatagaacatcagaaaactcacacccaaagaaaattaaataaatgtgggaattctttttgcctcactcactgtttcctaagcatcagataatctatgctaaaaaaaaaatgaatatagaaaagctgcttcttgccattcaaaatatgttaaatttctgacaattcctaatacaaaaatgacccgattaaaagattctgtggccaccgtgcctggactttccattattttttgttctttcaaacaatcccataatatttcccttgcacgtaaattattttgtacatgtgtaatatatctttaaggtaaattcctagaagtggaaatgctagataaaaatgtaaatttttggctgggcgcagcggctcacacctgtaatccctaatcccagcactttgggaggctgaggcagggggatcacgaggtcaggagataaagaccatcctggccaacatggtgaaacctcatctctactaaaaatacaaaaaattagcaacagagcgagattccgtctcaaaaaaaaagtaactttttaaaactttctatcatgaaaaaatttgaacatatacaaaaatacacagaatcttatattgaactccagcggcctcatcaccagcttcaagaattatcagctcatggccaatcttgctttgtctgtgtacccacttctctcatctctgttatttttgaagtaaataccagatatattatttcatccacagacatttcatacatatctttaaagcacatgacaacattagaaaatattttcactccttaaaaaaaaaaaaaaaa

SEQ ID NO: 56534 - DNA, 2199 bp, Homo Sapiens
gctctccagaggcgggccctgagccggcacctcccctttcggacagctcaagggactcagccaactggctcacgcctccccttcagcttctcttcacgcactccaagatctaaaccgagaatcgaaactaagctggggtccatggagcctgcacccgcccgatctccgaggccccagcaggaccccgcccggccccaggagcccaccatgcctccccccgagaccccctctgaaggccgccagcccagccccagccccagccctacagagcgagcccccgcttcggaggaggagttccagtttctgcgctgccagcaatgccaggcggaagccaagtgcccgaagctgctgccttgtctgcacacgctgtgctcaggatgcctggaggcgtcgggcatgcagtgccccatctgccaggcgccctggcccctaggtgcagacacacccgccctggataacgtctttttcgagagtctgcagcggcgcctgtcggtgtaccggcagattgtggatgcgcaggctgtgtgcacccgctgcaaagagtcggccgacttctggtgctttgagtgcgagcagctcctctgcgccaagtgcttcgaggcacaccagtggttcctcaagcacgaggcccggcccctagcagagctgcgcaaccagtcggtgcgtgagttcctggacggcacccgcaagaccaacaacatcttctgctccaaccccaaccaccgcacccctacgctgaccagcatctactgccgaggatgttccaagccgctgtgctgctcgtgcgcgctccttgacagcagccacagtgagctcaagtgcgacatcagcgcagagatccagcagcgacaggaggagctggacgccatgacgcaggcgctgcaggagcaggatagtgcctttggcgcggttcacgcgcagatgcacgcggccgtcggccagctgggccgcgcgcgtgccgagaccgaggagctgatccgcgagcgcgtgcgccaggtggtagctcacgtgcgggctcaggagcgcgagctgctggaggctgtggacgcgcggtaccagcgcgactacgaggagatggccagtcggctgggccgcctggatgctgtgctgcagcgcatccgcacgggcagcgcgctggtgcagaggatgaagtgctacgcctcggaccaggaggtgctggacatgcacggtttcctgcgccaggcgctctgccgcctgcgccaggaggagccccagagcctgcaagctgccgtgcgcaccgatggcttcgacgagttcaaggtgcgcctgcaggacctcagctcttgcatcacccaggggaaagatgcagctgtatccaagaaagccagcccagaggctgccagcactcccagggaccctattgacgttgacctgcccgaggaggcagagagagtgaaggcccaggttcaggccctggggctggctgaagcccagcctatggctgtggtacagtcagtgcccggggcacaccccgtgccagtgtacgccttctccatcaaaggcccttcctatggagaggatgtctccaatacaacgacagcccagaagaggaagtgcagccagacccagtgccccaggaaggtcatcaagatggagtctgaggaggggaaggaggcaaggttggctcggagctccccggagcagcccaggcccagcacctccaaggcagtctcaccaccccacctggatggaccgcctagccccaggagccccgtcataggaagtgaggtcttcctgcccaacagcaaccacgtggccagtggcgccggggaggcagaggaacgcgttgtggtgatcagcagctcggaagactcagatgccgaaaactcgtcctcccgagagctggatgacagcagcagtgagtccagtgacctccagctggaaggccccagcaccctcagggtcctggacgagaaccttgctgacccccaagcagaagacagacctctggttttctttgacctcaagattgacaatgaaagtgggttctcctggggctacccccacccctttctaatttagtctctgagtcccaaaaagaagtgcaggcagagccatctgccaggcccaggagagctctgagctctggccaacaactgcagccaggctgggcagagcactccggctcacctgggctcctggcgtgtcatttgctggcttgaataaagatgtcgcctt

SEQ ID NO: 56535 - DNA, 4930 bp, Homo Sapiens
ctcagccttcccggttcgggaaaggggaagaatgcaggaggggtaggatttctttcctgataggatcggttgggaaagaccgcagcctgtgtgtgtctttcccttcgaccaaggtgtctgttgctccgtaaataaaacgtcccactgccttctgagagcgctataaaggcagcggaagggtagtccgcggggcattccgggcggggcgcgagcagagacaggtcatggcagcgccaggcggcaggtcggagccgccgcagctccccgagtacagctgcagctacatggtgtcgcggccggtctacagcgagctcgctttccagcaacagcacgagcggcgcctgcaggagcgcaagacgctgcgggagagcctggccaagtgctgcagttgttcaagaaagagagcctttggtgtgctaaagactcttgtgcccatcttggagtggctccccaaataccgagtcaaggaatggctgcttagtgacgtcatttcgggagttagtactgggctagtggccacgctgcaagggatggcatatgccctactagctgcagttcctgtcggatatggtctctactctgcttttttccctatcctgacatactttatctttggaacatcaagacatatctcagttggaccttttccagtggtgagtttaatggtgggatctgttgttctgagcatggcccccgacgaacactttctcgtatccagcagcaatggaactgtattaaatactactatgatagacactgcagctagagatacagctagagtcctgattgccagtgccctgactctgctggttggaattatacagttgatatttggtggcttgcagattggattcatagtgaggtacttggcagatcctttggttggtggcttcacaacagctgctgccttccaagtgctggtctcacagctaaagattgtcctcaatgtttcaaccaaaaactacaatggagttctctctattatctatacgctggttgagatttttcaaaatattggtgataccaatcttgctgatttcactgctggattgctcaccattgtcgtctgtatggcagttaaggaattaaatgatcggtttagacacaaaatcccagtccctattcctatagaagtaattgtgacgataattgctactgccatttcatatggagccaacctggaaaaaaattacaatgctggcattgttaaatccatcccaagggggtttttgcctcctgaacttccacctgtgagcttgttctcggagatgctggctgcatcattttccatcgctgtggtggcttatgctattgcagtgtcagtaggaaaagtatatgccaccaagtatgattacaccatcgatgggaaccaggaattcattgcctttgggatcagcaacatcttctcaggattcttctcttgttttgtggccaccactgctctttcccgcacggccgtccaggagagcactggaggaaagacacaggttgctggcatcatctctgctgcgattgtgatgatcgccattcttgccctggggaagcttctggaacccttgcagaagtcggtcttggcagctgttgtaattgccaacctgaaagggatgtttatgcagctgtgtgacattcctcgtctgtggagacagaataagattgatgctgttatctgggtgtttacgtgtatagtgtccatcattctggggctggatctcggtttactagctggccttatatttggactgttgactgtggtcctgagagttcagtttccttcttggaatggccttggaagcatccctagcacagatatctacaaaagtaccaagaattacaaaaacattgaagaacctcaaggagtgaagattcttagattttccagtcctattttctatggcaatgtcgatggttttaaaaaatgtatcaagtccacagttggatttgatgccattagagtatataataagaggctgaaagcgctgaggaaaatacagaaactaataaaaagtggacaattaagagcaacaaagaatggcatcataagtgatgctgtttcaacaaataatgcttttgagcctgatgaggatattgaagatctggaggaacttgatatcccaaccaaggaaatagagattcaagtggattggaactctgagcttccagtcaaagtgaacgttcccaaagtgccaatccatagccttgtgcttgactgtggagctatatctttcctggacgttgttggagtgagatcactgcgggtgattgtcaaagaattccaaagaattgatgtgaatgtgtattttgcatcacttcaagattatgtgatagaaaagctggagcaatgcgggttctttgacgacaacattagaaaggacacattctttttgacggtccatgatgctatactctatctacagaaccaagtgaaatctcaagagggtcaaggttccattttagaaacgatcactctcattcaggattgtaaagatacccttgaattaatagaaacagagctgacggaagaagaacttgatgtccaggatgaggctatgcgtacacttgcatcctgaaagtgggttcgggaggtctctatgagcaaggaatacaagacaaaacttcctcaatgcattgactatttcttcagactcaaaacactcattcttttttctattaagccattgaaagagaagcactaagactgcttctaggctttatttataaaataaacaccttatccctaacatgggcaaaatggctagaattattcagacgatttggcagcgtccagggtaagctggtgttataatacgctgctgatctacatcacagatttgctaataatgttcacgtgggccctggcatatctctgttcagttagagtgagtgctgacccaacagcctctgtggtcaagcgagtcacgaatgattaatcataaagaaaaatcagtttttgactgacctggatatccatgagctgcactgatcaccatgtaaggtcacatttagtaaatgctgaaataaaatgattaatgcatttatcaataaaagcctttgaaaatactttggataataaattggagttttaaaaatgcaaatttgcttagtatctaataatgaagtgttattacatatagccggaattgaggatctctttgatcctggaaatggtttacctaaaagctacagaaccaggccaatatattttgaaatattgatgcagacaaatgaaataataaagagattttcatggtttataaaaatcttttttgatatgataataatcatgatcacaactgagatcaaaaaaatatatgacagattattttgtttaaaaatgcagttttaattatcttagtctatagaaatgatcattgcatggaggcatgtataggtatgatctgtgtaaaatctgacataaaaacagtgctattctgagtgaaaatttttttgatgtgcttacataaccatggtgattaaaatgagtttatattttttctcaaaaattttagcagtgtgtaaagtaagtaatctttaactgaactctgaccacttaaaaaaaaatctaaaaattgaactacctatagtagtctgtgtttaaagtgaatttttaaagacaaagcattctaaatgaactcaatataaaaacattcatttggaatgtacatactgaaaaatacaggtttttttgaccaaaagtttttatatcttttctttttatttatttttttcctaagtgccaacaattttctagatattatatacaacacaggctttgatcttggggacttttcccatatatttcacactggagtgaatgaagttgtacttcatttctagagaaaagttatacccaggtccccaattgagaatgtcttgcttgattgaaaacgacatcatcccttggtatactccagggattggtttcaggacccctgcatttaccaaaatttgtgcacactcaagtcctgcagtcacccctgcctaaagatagaatggcttctctgtttttcttctgaaatacaaccagaaacaatgtgtctatttctgaaagaataggattaatgatcatacaaatgggttaatcctgaattctggttgtaaatctggttacagcataactaggattataatgctgcctcattttcacagcactacttgcttatattgacaacaaatcatctcgctaaagagtgaatgtaggccaggcgcggtggctcatgcctgtaatcccagcactttgggaggccgaggcgggtggatcacgaggtcaggagatcgagaccatcctggctaacatggtaaaaccccgtctctactaaaaatagaaaaaaagaaattagcctagcgtggtggctggcgggcgcctgtagtcccagctatttgggaggctaaggcaggagaatggcgtgaacccgggaggcggagcttgcagtgagccgaggtcgtgccactgcactccagcctgggcgacagagcaagactccgtctcaaaaaaaaaaaaaaaaaaaaaaaaagagtgaatgtaatagtcttgcagaaaatgaatgaatacctttgttcaataaaggaaatatgcactgctcacttttttgaaggaaatgccaaagttacgttttacaacaaggctagagtttgtaaattctgggttcatttgtgatgacataagtcagcaaactgcgggaatactgtctcttctatgtattttgtgaatagtaagcataattttagttttgtattatcaatgaaaatttcacttgaaattaaagctgccttttgttatatttttaacctataggataagattccagtattgtatatgagttttaacaaattaaaaaatcaaatcatgtacatttgaaaatatttgcacacatttaaaaataaatgtaaagttgtcttttaaactactcggatgtgtcctttctgaacaaaa

SEQ ID NO: 56536 - DNA, 3675 bp, Homo Sapiens
tttgtgttccctcaaatggcggtgtgaagagagttcgcctgagccagatcccaggtttcactgaagaaacttcttagagattcattgcacttctgagatttaatgtttacaacttggagttgtcgaccttcttataagatacattttggaagtcaaaatgaaagttttctgtgaagttttagaagagttatacaagaaggtacttcttggagccacacttgaaaatgacagccatgattacatcttttatctcaacccagcagtttcagatcaagattgttctacagccacctccttagaatgggcaaacacctgtggtatccagggcaggcatcagcccatctctgttggtgtggctcccattgctgtagcacctgtgtgtttgaagaccaactctcagatgagcggttccagagaagtaatgctccttcagttaacagtgatcaaagtgatgacaacccggatattgtctgtcaaaaccgagttccatgcaaaggagcagtacagagatgtaattaaaattctcttagaatcagccaaagtcgattctaaattaatctgcatgttccaaaattcagataaattgttatctcacatggctgcacagtgccttgcattgcttctatatttccaattgagagaaaagataaccttaagtaattcctggattgctttttgccagaaaaatctttctgaatactctgagagtaataaagcaatatactgcctctggactcttacagcaataataaaagaaatctttaaagattcatgttcacagaaaacagaaattctaaagcagttcctgactcatttcgacaccatttttgaagtgttttacaattccttattctctcagcattttgaaaactgccgggatacttctaaaatagtaaacatcctgatgtgtttcctggatttgcttgagcttctcatcgcctccagaatccacctgaagttacatttcacttgccagaggattttatttttgaaaccatcttgcatgctagaagttattacctggcctattcaggcttttgttaaaaggaaggtcatcatattcctcaaaaagtgccttctctgtaaagtgggtgaagacctctgtcgtggatctgtgcctgccttaatgccgccagaccatcatgtagcggtggacatgctggctttagctaatgctgttttgcaagctgtgaattcggggttgttgaagacactgtctgtttatgaaaaacattccttttttggaggtgatgaagttcaacctgaatgtgaacttatcactagtccagatcatgtgatccttagagcagcaagcttagttataatgaaatccttagaaatcaagtttcaaaattattcttcagcaagtgaagtgaaaggtgcgtgaccatggcccactgcagccctgaccccccttcggcccatgctattcctcctgtcccaacctgggaggtcctagcctgggagatcaaggctacagtgagccgcgacccatcgcacacctgcactccagtcctggtgcaacagatggagatcctttcagggagagagagagagagagaggagaagacagagagattaaagaaaaatatgttcactcccacttatgtgtttattgttattattgtttgttgttatttctttgttattgttgtgtttactgtttatttattttgaggcagggtcttgctctgtctcccaggctcactgcagcctcaacgttttgagctgaagtgatcctctcgtctctgtttccccaccccatttgtattaatccttcatacaattagtgtttccactaatgtagattattgaaaattagatattgaattaaagctaatatatgagaagttatattgacaaagaaattgttacatatataatttccagaatagtaactcaggagttcaaagtcttccattttacttgagaaaaatgaatagtaaatgtctctaaacaggcagcatacagattcagtgaaaagtttgaattgtgagcaatgacatcactgaattgctttggatataatttagcttttaataactacacattagttataattctgtgcagttttaatttataacactagatggcacctgttatataattcagttttaaattgtagttcaaactacctaaaacgttttttatttttgtgcttaatagtagtacttctatgctttaaacaaacaaaaaatatgtttttctgttattttgaagacaaaattatttttgcttggttgcattcttggacagacagctctggcatccgatgaagtgatcttagttgtctgctcatttatttatctgcttttagcaagaaatcacataacttttatttctaagagacagttgttaggcagttgttgcaaatagatgatgtagctgtacattttaaatgtatgctctggaatgagtcactttttttccctgagcctcagtgtcctcatttgccaaataaagatgcttcctaactgattcctgatgactttttgaaagtgaattaggataattgcatcttaaggtactttagacactatgaatttatatataggcaagatattcattcattcataaactattgcctacactttgaaattttcattttttgaagttgacttacagaggttcatgtctgagttactgaccttcttaaagcctcatcttcagccctctctgcaattacacaatccgtgcaaatggctgtctcgggttttcatagaacaagacgatgacatgctggaggctgccaaggcatcactgggcatctacttaacactgaccagaggatgtgaagccactgaaagcttgactcagggaaaagaaatgtgggaccatcacacacatgaaaatggctataatcctcactgtattttcttgttcttcttgaaaaatataggatttgattccacagttcttcttgactttttgatttcatcagaaacctgttttcttgaatattttgttagatatttaaaattactgcaaaaggactgggataattttttcaccatttgcaataactttgatgcaactgaatctaaatatgacataagtatttgtggctgtgtcccctcacttgtccaagaccaaagctccaaccaaacaataccccatcgtttgactgctcctcatagtcacagagatgtgtgtgctcggcactcctgggcttccgatgctccctctgaaccactgaaagctgtgatgtccaagggggctcacaccatgtgtgcttctagtctgtcttccccccgggcctctcaaagtctggtagattacgacagctctgacgattctgacgtggaatccacagagcagtgtttagctaacagtaaacagacatctttacaccagcaagcaactaaggagattcaggatgcagctgggacaagcagggataaaaaagaatttagccttgagcctccatcaaggcctctggttctgaaagaatttgatactgccttctcctttgattgtgaagtagccccaaatgatgtcgtctctgaagtgggaatattttacagaatagtaaaatgcttccaggaactacaagatgccatctgccgtttgcaaaagaaaaatcttttcccatataatccaactgcacttttgaagttgttaaaatacatagaggtgataagtaataaaactatgaacactttgtaaaacattgac

SEQ ID NO: 56537 - DNA, 1694 bp, Homo Sapiens
cgtgtgggacaagctgctcccgacagaaggatgtcgctgctgagcctgccctggctgggcctcagactggtggcaatgtccccatggctactcctgctgctggttgtgggctcctggctactcgcccgcatcctggcttggacctatgccttctataacaactgccgccggctccagtgtttcccacagcccccaaaacggaactggttttggggtcacctgggcctgatcactcctacagaggagggcttgaaggactcgacccagatgtcggccacctattcccagggctttacggtatggctgggtcccatcatccccttcatcgttttatgccaccctgacaccatccggtctatcaccaatgcctcagctgccattgcacccaaggataatctcttcatcaggttcctgaagccctggctgggagaagggatactgctgagtggcggtgacaagtggagccgccaccgtcggatgctgacgcccgccttccatttcaacatcctgaagtcctatataacgatcttcaacaagagtgcaaacatcatgcttgacaagtggcagcacctggcctcagagggcagcagtcgtctggacatgtttgagcacatcagcctcatgaccttggacagtctacagaaatgcatcttcagctttgacagccattgtcaggagaggcccagtgaatatattgccaccatcttggagctcagtgcccttgtagagaaaagaagccagcatatcctccagcacatggactttctgtattacctctcccatgacgggcggcgcttccacagggcctgccgcctggtgcatgacttcacagacgctgtcatccgggagcggcgtcgcaccctccccactcagggtattgatgattttttcaaagacaaagccaagtccaagactttggatttcattgatgtgcttctgctgagcaaggatgaagatgggaaggcattgtcagatgaggatataagagcagaggctgacaccttcatgtttggaggccatgacaccacggccagtggcctctcctgggtcctgtacaaccttgcgaggcacccagaataccaggagcgctgccgacaggaggtgcaagagcttctgaaggaccgcgatcctaaagagattgaatgggacgacctggcccagctgcccttcctgaccatgtgcgtgaaggagagcctgaggttacatcccccagctcccttcatctcccgatgctgcacccaggacattgttctcccagatggccgagtcatccccaaaggcattacctgcctcatcgatattataggggtccatcacaacccaactgtgtggccggatcctgaggtctacgaccccttccgctttgacccagagaacagcaaggggaggtcacctctggcttttattcctttctccgcagggcccaggaactgcatcgggcaggcgttcgccatggcggagatgaaagtggtcctggcgttgatgctgctgcacttccggttcctgccagaccacactgagccccgcaggaagctggaattgatcatgcgcgccgagggcgggctttggctgcgggtggagcccctgaatgtaggcttgcagtgactttctgacccatccacctgtttttttgcagattgtcatgaataaaacggtgctgtcacctctgcctgggcctcactgacagcctgcag

SEQ ID NO: 56538 - DNA, 7085 bp, Homo Sapiens
atggatggtcaaatctacaagagacacttagaagctatacttacaaaaatatcactgaagaacaacttagaccatttgttggctagccttctatttgaagagtatatttcatatagttcacaggaagaaatggattctaataaagtgtctttgcttaatgaacaatttcttccactcattaggcttttagaaagcaaataccccagaacattagatgttgtattagaggaacacttaaaggaaattgcagatctgaaaaaacaagagcttttccatcagtttgtttctctttctacaagtggaggaaagtatcagtttttagcagattctgatacttctttgatgctcagcctgaatcatccacttgctcctgtgagaattctggccatgaatcatttgaaaaagatcatgaaaacatcaaaggagggtgttgatgaatctttcataaaagaagctgttttagcccgattaggtgatgataatatagatgttgttttgtcggctataagtgcttttgagattttcaaagaacacttcagttcagaagtgacgatttcaaatcttctgaatctctttcaaagagcagaactttcaaagaatggagaatggtacgaggtacttaagatagccgctgacatattaattaaagaagagatactgagtgaaaatgatcagttgtcaaatcaggtggttgtatgtttgctgccatttatggttatcaataatgatgatacggaatctgctgagatgaaaattgctatatatttatcaaaatcaggaatctgctccctgcaccctctattaagaggctgggaagaagctcttgaaaatgtaattaaaagcacaaagccaggaaaactaatcggtgtagcaaatcagaagatgattgagttgttggctgataatataaatttaggagatccttcttcaatgttaaagatggtggaggatttaataagcgtgggtgaggaggagtcctttaacctgaagcagaaagaaatcccctcagaatggcacattgaactgatgttagacagagggatcccagtggagctgtgggcacattatgtagaagagctcaacagcactcagagggtggccgtggaggactcggtttttcttgtattttccttgaaaaaatttatttatgcactgaaagctcctaaatcttttcctaaaggtgatatatggtggaatcctgaacaactgaaagaagacagcagggactatctgcacttgctcattgggctgtttgagatgatgctcaatggtgccgatgctgttcatttcagagttctgatgaaacttttcataaaggtgcatctagaagatgtttttcagttattcaagttctgttctgttttatggacctatggttctagcctttcaaatccactaaactgcagtgtgaaaacagtgctgcagactcaagctctttatgtgggctgtgcaatgctttcttctcagaagacacagtgtaaacaccaactggcatccatatcttctccagtggtgacatctttactcattaacctgggaagccccgtaaaagaagttcgtagggctgccattcagtgtctccaggccctcagtggagtggcatccccgttttatctgataatagatcatttgatttctaaagcagaggagatcacttcagatgctgcctatgttattcaggatttggctactttatttgaggaactacagagagaaaagaaactgaaatctcatcagaagttgtctgaaactttgaaaaacttacttagttgtgtgtatagttgcccatcttatatagcaaaagatttgatgaaagtacttcagggagtcaacggtgagatggtgctttctcagctattgcctatggctgaacaactgctagaaaagatccagaaggagcccacagctgtgctgaaagatgaggccatggttctgcatctcactctgggaaagtataatgaattttcagtttcccttttaaatgaggatccgaagagtctagatatatttataaaagctgtgcacacaacaaaggaactttacgcgggaatgccaaccattcagatcacagcccttgaaaagattacaaaaccattttttgcagccatatcagatgaaaaagttcagcagaagcttttaagaatgttgtttgatttattggtgaactgtaaaaactcacattgtgctcagactgtcagcagtgtttttaaagggatttccgttaatgctgaacaagtccgaatagaactggagccaccagataaagctaaacccttgggcacagttcagcaaaaaagaaggcaaaaaatgcagcagaaaaaatcacaagatctagaatctgttcaggaagttggaggttcttactggcaaagagtaactctcatcctggaattactgcagcacaaaaagaagctcagaagtcctcagatattggtgccaactctttttaacttgctatcaagatgtttagaacccttgccacaagagcagggaaatatggaatacaccaaacaattaattcttagttgtctgctcaacatctgccaaaaactatctccagatggtggcaaaatacccaaagatattttagatgaggagaagttcaacgtggagttgatagttcagtgcatccgcctttcggagatgccgcagacccatcaccatgcccttttacttttgggcactgttgctggaatatttccggataaagttttacacaatatcatgtctatttttacatttatgggagccaatgtcatgcgcctagatgatacttacagttttcaagttattaacaagacagtgaaaatggttattcccgcacttattcagtctgatagtggagattctatagaagtttcaagaaacgttgaagagattgtggtaaaaatcattagtgtatttgtggatgcgctgccacacgtcccggagcacaggcgcctgcccatccttgttcaacttgttgatacactgggtgcagagaaattcctctggattctcctcatcttgctttttgaacagtatgtcacaaaaacagtgctggcggctgcctatggcgaaaaggatgctattttagaagcagacactgaattttggttttcagtctgttgtgagtttagtgtccagcatcagatacaaagcttgatgaatatcctccagtacttactaaagctgccagaggaaaaagaagaaaccattcccaaagcagtgtcatttaataagagtgaatcacaagaagaaatgctacaggtttttaatgtagagactcacactagcaagcaactgcggcattttaaatttttgtcagtgtccttcatgtctcagctcctgtcttccaataattttctgaaaaaggtagttgagagtggtggtcctgagattttaaaaggccttgaagagaggttgctggagaccgttctcggctatatcagtgcagttgcacagtccatggaaaggaacgcagacaaactcaccgtgaagttctggcgcgcgctccttagtaaagcttacgacctgttagataaggtcaatgccttgctgcccacagagacattcattcctgtgatcagagggctggtgggcaatcccctgccatctgttcgccgcaaagcgctggaccttttgaataacaagctgcagcaaaatatatcctggaagaagacaatagttacccgtttcctaaaactggttccagaccttttggccattgtgcagcgtaagaaaaaggaaggggaagaagaacaagcaatcaacagacagacagcattgtataccttaaagcttttatgcaagaattttggtgcagaaaatccagatccttttgtcccagtgctgaacactgctgtgaaactgattgctccagagagaaaggaggagaagaatgtcctgggaagcgcgctgctgtgcatagcagaggtgacctccaccctggaggcgctggccatcccccagcttcccagcctgatgccatcgttgctgacaacaatgaagaacaccagcgagctggtctccagcgaggtctacctgctcagtgccttggctgctctgcagaaggttgtggagactctcccgcacttcatcagcccctatctggaaggcattctctcccaggtgattcatctggagaaaatcactagtgaaatgggttctgcgtcacaggctaatatccgtctcacatctcttaaaaagacactggctaccacacttgcaccccgagtcctgttgcccgccatcaaaaaaacttacaagcagattgagaagaactggaagaatcacatgggtccgtttatgagcatcttgcaagagcatattggggtgatgaagaaggaagagctcacctcccatcagtctcagctaaccgcctttttcctggaagccctggacttccgagcccagcactctgagaacgatctggaggaagttggaaaaacggaaaattgtatcattgactgtctagtagccatggttgtcaaactttccgaggtcacattcaggcccctgttcttcaagctgtttgattgggctaaaacagaagatgccccaaaggacaggttgttgacattttacaacttggcagattgcattgctgaaaagctgaaagggctttttactctgtttgccggccacttagtgaagccttttgctgacaccttgaaccaggtgaacatctccaaaacagatgaagcattttttgactctgaaaatgaccctgaaaagtgctgcttgctgttgcagtttattttgaactgtttatacaaaatcttcctttttgatacccagcattttataagtaaagagagagcagaagccttgatgatgcctctggtggatcagctggaaaacaggcttgggggagaagagaaattccaggaacgggtgacaaagcacctgataccatgcatcgcacagttttcggtggccatggcggatgactctctttggaaaccactgaactaccagattctgctaaagacgagagactcctcgcctaaggttcgatttgctgctttgattactgtgttagcactggctgaaaaactaaaggagaattatattgtcttgctaccagaatccattcctttcttagcagagttgatggaagatgaatgtgaagaagtagaacatcagtgccaaaagactattcagcaactggaaactgtcctgggagagccactccagagctatttctaagactttctgtggtgtttcatactctactcagagttcacactcatatttcatatttttatttttgggtgttgggtgccatgttacttttggtgccttaatacacctacttggattacttacaaatgttttatcacttctttacaaaatccccacctggcttgtgctgccacataagcctctcctgcctatcgtatagagctgcagaaagagtaaatgatacacggtatttttatacagactgctgtgtttgtttaaacatttattattctcttcctgattgatggtaataatattagacttgttaattttagcacccaaagctgacgcctcatttgcactgtaagccttaactcttctgtacagcagtatcttacatacatggtatccatgttgcagatttcactcaaagttgctctatttcaagaaaatgaagttatttagcaatcaacagaagtacttttgactgtaaagcctacttttcattttgggtaggcgaacttcagccttcgtttctttgttgtgcccataaagagaagtggttctggaatgctttttttaacccaggagtgtgactgtcacctttatcctttgttcttttgggaaacgggagagatgaaggcaacacgctgcttctaaaacagctcacacctggctgctcacacagagggcccagaaacactgggtggcacgaggaagctcctccaggattcagaatgaacccagttccattggtggttaactaagaactacttgtctaagaaagtaagtatcagtagatttttttcaatgctttgaagtgccctaatctctagtactgggtcatggtgaagttggaaagtgagggttcaaataaaattagatctgccccctttttaaaggcatctaagaacatcccgtagaatgttcgcattgagtttaaaagcctttgaagctaatatagaagtttaatgcagaaatgtggcaagcaaaaggccaacttgcattttagagacagagcttgctagtatagaagtgcatatttctaagaaatgtctcagtaaaattcattaataaatactaatagctttttaaatttttttcctccacgtaaaatgaaaatgaacttaagacttacaaggaatgatgtgagtgggctatttttttcctaaatgcctcacagtctccaacagctcagttaagcactctgatggtctttatggagaaaaataactctgggggattctcgagtcttcttgccttctacagctttccctgtggcaccctccacccccaaccagtgtctttgagcttggtgagactctgcatacattaatatgaaaagctggaaaagaattaagggctagcgatttctacactgagtacttttaaaaaaataagattgacaatggtattcttttcaatatatggatagaaataatatctaaaatctgttctgaaaatattcctaaatcctggcagagttctgccccagtctaatgtgataaaatgatcctcactgactgagcttttttccctccccactcccaaacctttgaaatttcctgtaacaagatctgacctgtaaagatcccatatacatggaacttctgccaactcccctcaaataatagaaaaatcacagaaatggaaccatttaacttgctgatacaggtttgattttaatcacgtaaagtggaagagtgctttgatctcagttgctaatgatgatggactaatctttagaagaacggaggccttgattggtgatttcatgggaacaaaacagatttctgcattacctctgcctgctttgtgggtcccttagttggcgtacactttctgatagtgcctgccttatgaatgcctgaagtctaatcctgaccttactttgttgcccataaatatctttcaaattg

SEQ ID NO: 56539 - DNA, 3476 bp, Homo Sapiens
atccccgcctgacgggagctagccctcagtccgcccgagctgtggttgtgggcgccggacaagtccaaggcgcctcctcccaatatggacagccgctacaacagcactgcgggcatcggggacttgaaccagctgagcgctgccatcccggccacgcgggtggaggtgtccgtgtcctgcagaaatcttcttgacagagacacattttctaaatctgatccaatttgtgtcttatatgtacaaggagttggaaataaagaatggagagagtttggaagaactgaagtaattgataatactttaaatcctgattttgtaagaaagtttattctggactacttttttgaagaaagagagaatcttcgttttgacttgtatgatgttgattcaaagagccccaacttatccaaacatgactttctgggacaagtgttttgtacattgggagagatcgttggttcacagggaagtcgcctggaaaaaccaatagtaggaattccagggaagaaatgtggtacaatcatacttacagcagaggaattaaactgttgcagggatgccgttttgatgcaattttgtgcgaacaaattggacaagaaggacttctttggaaaatcagatcctttccttgtattttatcgaagtaatgaagatggcagttttacaatttgtcacaagacagaagttgtcaaaaacactctaaatccagtatggcaagcattcaagatctcagtcagagcattatgtaatggagactatgacagaacaatcaaagtagaggtgtatgactgggaccgagatggaagtcatgatttcattggagaatttacaacaagctatagggaactttctagagggcagtcacaattcaacgtatatgaggtggtgaatcccaaaaagaaaggaaaaaagaaaaaatatactaattctggaacagtaactttactctctttcttggtagaaacagaagtttcattccttgactacattaagggagggacgcaaatcaatttcacagtggctattgattttacagcatcaaacggcaaccctgctcagcccacttccctccactacatgaatccttaccaactgaatgcctatggtatggcactaaaagcagtgggagaaattgttcaagattatgacagtgataaaatgtttccagctctaggatttggtgcaaaactgcctccagatggaaggatatctcacgaatttgctttgaatgggaatcctcaaaacccctactgtgatggcattgagggggtcatggaggcttattacaggagtctgaaatctgtacaactatatgggcccaccaactttgctcctgtaattaatcatgtagcaagatatgcttcttctgtaaaggatggctcccagtattttgtgcttctgattgttacagatggtgttatctcagatatggcccagactaaggagtccatagttaatgcctcaaaacttccaatgtcaataattatagtaggtgttggaccagcagaatttgatgcaatggtcgaattggatggagatgatgtaagagtctcctctagaggaaaatatgctgaaagagacattgtgcagtttgtgccattcagggattatattgacagaagtggaaaccacatactgagcatggctagattggctaaagatgtcctagctgagatccctgagcagtttctctcctatatgagagcccgaggaatcaagccatcacctgcgcctcccccatacaccccacctacacatgtgttacagactcaaatatgactgtgctctgaaatgctaatgtcaactacaaatcaaaagtgctgagttaatgctttgtgcctggtgctctgtaatgaaccaggcaatgagatagttttctcagtttggtttcagcagttaatgtgctttcttggatccaaatttaaatatcttcctaaaccaaaactgtaaatatggttgttgcatgagcaacagaaaaaattgtttaaatgcttgaagcaaagtatggatgtcttctctaaatctttctttctttttttttttaacagaaacagctaatttccaatgtattgttgggaaaaagcacaaactgtgtttttaactcaaatattgtcttcgactgctatgtgtataggaaagcagtctctgtatcaatgtttacatgttactactttttaaatttcaatacttttataactgttcttaaaaataagagttttaaatactgaatcctttgtcttctaaattgcaatagctataatcacaagagcaatatctctttgaatgactgtctggacaaacacaattgcaaataagggaagggaaaaatgcttttctatttttcagtaactggattgtcttaagaaactacatctgcttaataaacaatttctcagcaatgtttgctgggtatgggagtttaagcccggcagatgtgtctcctggttgaacatgcatttttcatggagtttgggttctaaatttagactgcagttggtttgtattttgtaacactaagtagaaattataaaaagtcaaacattgtgatctataaatgcacagaaaatactttgtaaaaagtagcatccttatataataatgctatttagaaagactgaaaccaagactatttaactgtgaactatgtagcagatgttttaaactttttattccattatatcttgtctagatattttaattcaaagggatactggctctcttgatcggaatttcttgttatcaccattccacgttgccacacaaggtgcacaggctggaagtcttttgtgaaattcccagttaaatatatacaactatgtgacttagtgcacaacacatttgtgaaataacctactcctatatactgacctgcctgtccacgaataattgtaaagggtttttgcatgtacagtttttacaagaattacagttttgtgaagttgtgtctaaattaaagcatttctttagaacaaatggccttaaattctcacggaattcctggaaatgattgtgaattgccttcaaataatagaaaagtgtatttatttgtgtgtgtgtgtgtgtcaaaaatgtaactgctttataatattttttccttacctatatattctatttaatacttggtttatttctactgtacattgttttctttgtcccaagttgacctagggtgacttttataagcatgaaactattttactggaaagaaaaatatatacatccacatatctaacagtatcaatgttatataactatgtaataattgttgatttttaattatgtattaaaatctttaaatcataactatttgctttgtacgtttcatgtatgaatgacaatagtttgatgatttcctttactgatcttaaatatttatgccactacagtgtattacctacagatttttaaatttagctttatttatcaacccaaaaaacaaataaataagatcaatattctttaaaaaaaaaaaaaaa

SEQ ID NO: 56540 - DNA, 6207 bp, Homo Sapiens
gaggcgcgtgtccgtgcactagaggcccccgtgcgtgacacaggccgatgagctcctgcgggctgcacccacgcggagtcacagaccgaaaagcccgcggtgtcgagcgcaggcggaggtacatggccccgacgggaggcgcgcggcgagcacccggagctcggctccctgcctgagcacggcagccgcgcctccgcccgcgcgtcctcgcccctccggccggcagcccgcggacatgatcgtgtagcctcctcctgggctgggatttgtttgaagattttcttcatggaagcgatgtccccccagcaggagactctagggggacagccggggcgctcctcttccctgacaggagtgtctcggctcgcgggaggcagctgcaccaagaagaaaatgaaaacactagcagaaaggaggaggagcgctccatctcttatcctggataaagccctacaaaaacggcctactaccagggacagtccttctgctagtgttgacacatgcacatttctgtcatcattagtgtgctccaataggactctgctgattgatggccgggcagaactcaaaagaggcctccagaggcaggagcggcatcttttcctattcaatgatctgtttgttgtggccaaaatcaaatataacaataactttaagataaaaaataaaattaaattaactgatatgtggacagcaagctgtgtggatgaagtgggagaaggcaacaccaatgccatgaaatcctttgttttgggctggcccacagtgaactttgtggccactttcagttctccagaacaaaaggacaaatggctctctctccttcagagatacatcaatctagagaaagaaaaggactacccgaagagcattcccctcaaaatcttcgccaaggacattgggaattgtgcctactctaaaactataacagtaatgaattcagatacagcgaatgaagttatcaacatgtcattaccaatgctagggataactggctctgagagagattaccagttgtgggtcaattctggcaaagaagaggctccatacccactcattgggcatgaatatccatatggaattaaaatgagccatcttcgagactctgcactcctgacaccgggatcaaaggactctaccacccctttcaacctccaggagcccttccttatggaacagctcccccgagagatgcagtgccagttcatcctgaagcccagccgcctggctgcagcccagcaactgagtgattcaggtcataagacatttaaaaggagaagatctatcataaactgggccttctggcgaggttctagcactcacctggacaacttgccctcatcgccaacatcacctatgccaggacagctctttggaatttctctgccaaatatttgtgagaatgacaatctgcccaaacctgtcttggatatgcttttctttcttaatcaaaaaggacctctcaccaaaggtatcttcaggcaatcagccaatgtgaaatcctgcagagaactaaaagagaaattgaattctggagtcgaagtacacctagactgtgaatctatttttgtgatagcatctgtcttaaaggattttctgcgaaatattccaggaagtattttttcatcagatctctatgatcactgggtctctgtaatggatcaaggaaatgatgaagagaaaataaatactgttcaaaggctattagaccagcttccgagagccaatgttgttctcctaaggtatctttttggggtgttacacaacattgagcaacattcctcatccaatcagatgactgcatttaatttagctgtgtgtgtcgctccaagtattctttggcctcctgcttcctccagcccagaactagaaaacgaatttacaaaaaaggtttccctgcttatacaatttctgattgagaattgccttaggatatttggagaagaaatcacttccctcttcagagaggtttcagtgagatgtgacactagagagaatgcctcagatatttcttgctttcaactgaatgactcctcctatgacagcttggaaaatgagctaaatgaggatgttgatgcaccatgcagtgacttggtaaagaaacttggccaggggagcagaagcatggactctgtcttaaccctcagtgactatgatcttgaccagcccgaggtggaaggccttttaaccctaagcgactttgacttggcccattctaaagatgaagatgttcaaatgaaacggcctcttgaatccaagccggtgaacattttagtgtacacaaagatcccactgcgggatcatgccagggccccatctgccatgtgcacacccagctacctgtccacagctgcagcaaatgctgcaaaaagcctgaggcgacaccggcgttgctcagagcccagcatcgactatctggattcaaagctttcctacctcagggagttttatcagaaaaagctacgcaagtccagctgtgatgcaattctttctcaaaaagatgaagactatctgaagcagaatcaacccctccaggaggaaggaaagacatgttttaaacagagtttagtcacaggcactgatgtcagcaagaaaaatgccactactcaaaacactaagaagaaaagcttgtctggtagtgaaggaaatcacgtgaaacttttccctaagtctaagccagtggccatttctgtggcatcttatagtcctatgtcctcacaggatcattccaagaaccagccctttgatgtgaatacatctggatactccccaccacacacagcagatgccctcaagggtccaaggacacatcggcgctgctcagagcccaacatagaagaccagaaccgcaagctgacctatctcaggggaatttattcaaagaaacaacataaaaccagctgtgaagctggtctcttgcatggagaggaggattatctcaaacggcataagtctttgcaaatggaggggcagaagctcattaatcagagtttagtcatggggattgaggtgggcaagagtagtgccacaaaccaaaacactgagaaggttttacccccaagattaaacctttgcccaaggaccagctattccagcttatcctccccaggcacttccccatccggctcatcagtaagctcccaagacagtgctttttctcagatttctgaacactctgtgtttacacccactgagacttcctctccaatagattgcacttttcaggctcagagaaaacgggaagacctttctcctgactttagcaatgccagccatgtttccggaatgcccggtccctcatcagggcaggcttgcagccgcccagcctatacaaagaaggacaccatggagtggcattcacaaatgcattctgtaactcttcatcccagcacatggttgagaaatggtgtggccagtttgaaaaactggtccctcaaaaagaaagcaaaggcagccagaccagaggaagagaaaatagcttctccaaaaggacccttagagccacccccacatgcttctggtgttccagaagccaactcactgcaagaggaacaaaaagacttgcccttaagggcagctgaaggactgtcccctgtgcagtcagcccaaaggtgtagttcttctcccttccaggactcagagagacactgtagctctccattcagcctggtggagagcagacttaagctgtgcatgaagtcacatgaggaaatagagcctggtagtcagagctcttctggttctctgccttgggaaagagcctcagccagctcttggactctagaggatgcgaccagcccagactcagggcctacagtggtctgcgacattgaggacaggtatttaaccaaagacatttaagcatagtaagaatctgatgtccacaagaacaggaactgggttaataataatagacaataattattatgacccctttgtataagatacctgggagaggtagcataaggattatcattgctaatacttaggacaacgaaataattctctttattgagactacttgacaaatactttatgctaaaaattttgtcacctaagtgtttgggaggctttttcttattaaaggttggtattggtcctgtcatgtggttttagagatactaacagagggctagagaaagcatcttctgcagaggaagcacttatgggaacagtctgtgagattgatgtcctgagaagaccaagatatcaggaatgaggaataggggcctgaggagagaggggaagggtacagagaaaccatctacattccatggaatgtttttaataagtaggcaagaaaaatgccactaatcaaagcattaagtgtgtccagtaataaagaacatcatataaaatctttccctaaatctaagccagtggccatttttgtgggatcttactaatcacgtgtccttacagaatcattccaagaaccagcccattgctacagctagagtggagaaaaacagagtgactcaaaagccatgggtaccatgatatcagttttgttggttgtatttgtcggtttgttttttcattcatgttgaagtgctttgcaaggcttcaggaaacagagttgtgaggagaaagaagaaaatggctgcccatttcagtaccctttcaaaggtatctctgcctaggaacattcttcagaaatgcaacttcttctatttagaaggtgacctcctgacagcgttcactctcaatatggaggaaaagaccacaacaactgtcctttctcaattacacaaatgctgttaaaatgtgatcaaaccatggcatcactttgctgaaatgtttctgcacagtcctgcctcttagattacagtcagccagaaaaacatacttataaatcatcccttttctgatttttgtagtttggcaattgagagagcaatattgaggttggccggttataaggagtcccacaatagaatacccaacaaagtggctgccaggccttctcagacagccatttgctttgggttttgcttccagacgttgttccatatttttgccccaaatgtttcatggcttataccccattggtttattttatatccatggacctttctttctctgctttcttgacttaaaggttgcagcagtacatctcgtcacctaggaatagattatcaggccttgccaactagtatgcagggatggcactaaaaatggatgtgcatcttctttcacattaactactaacctataagaagttgctctgagcccatttatttaaactctttagttcaccatcagatggacctttctctcacaagctagcttattccaaattatttgtcttattaatcaccagaaaatggtcatatcaaatgttctttcttttttgttctaaaggttgcattttcagttataggggaaaaaatattttctctaagatagaagaagttatttcagtattagctataggtgctacctacctcttggggacatggccctgtttgcgctaaccattacaatgatcttttagaactctgtatccaaagagctacttcgtgacactggccatctgagtcacagatgtgaagtcgatttcactttataactaaccagtcctacatattaagacttctaagtgtccatatgcctcttttttggtataatatataaagtcagcagggactcccctttcccttagggcatactactgtcagtcagaactgcaagatgtgaatgaagctcttaacggcttggagtgtctttctggaagaaattgccttttttttttttttcatgttagcaggtaaaaaatcattcacccaatttgaagcatagaagaaaatagttgctgaggttttttaataaccattcctactatctgtgttcccttagatactcctgtaattcttaatgtgaatagtttgttaatattgctgtaaagtattatattgtatgatttgaagacagactatatgtcattttattatactccatcaatctataatatattagactgatgctttatctaaaatgctttgagtttgtataatatatcttgacaaattttactaccatatgttatgtaataaatgtgtatttttgtacttgcagaaactgctgctaacttttaaagttgtttggttttcaaggcactgataatggatatgtatgaagtccatgctgtctgttaaataaaatgccattctgcagaattaaccatccaaaaaaaaaaaaaaaaaa

SEQ ID NO: 56541 - DNA, 3885 bp, Homo Sapiens
ggggctccgcgggcctggagcacggccgggtctaatatgcccggagccgaggcgcgatgaaggagaagtccaagaatgcggccaagaccaggagggagaaggaaaatggcgagttttacgagcttgccaagctgctcccgctgccgtcggccatcacttcgcagctggacaaagcgtccatcatccgcctcaccacgagctacctgaagatgcgcgccgtcttccccgaaggtttaggagacgcgtggggacagccgagccgcgccgggcccctggacggcgtcgccaaggagctgggatcgcacttgctgcagactttggatggatttgtttttgtggtagcatctgatggcaaaatcatgtatatatccgagaccgcttctgtccatttaggcttatcccaggtggagctcacgggcaacagtatttatgaatacatccatccttctgaccacgatgagatgaccgctgtcctcacggcccaccagccgctgcaccaccacctgctccaagagtatgagatagagaggtcgttctttcttcgaatgaaatgtgtcttggcgaaaaggaacgcgggcctgacctgcagcggatacaaggtcatccactgcagtggctacttgaagatcaggcagtatatgctggacatgtccctgtacgactcctgctaccagattgtggggctggtggccgtgggccagtcgctgccacccagtgccatcaccgagatcaagctgtacagtaacatgttcatgttcagggccagccttgacctgaagctgatattcctggattccagggtgaccgaggtgacgggttacgagccgcaggacctgatcgagaagaccctataccatcacgtgcacggctgcgacgtgttccacctccgctacgcacaccacctcctgttggtgaagggccaggtcaccaccaagtactaccggctgctgtccaagcggggcggctgggtgtgggtgcagagctacgccaccgtggtgcacaacagccgctcgtcccggccccactgcatcgtgagtgtcaattatgtactcacggagattgaatacaaggaacttcagctgtccctggagcaggtgtccactgccaagtcccaggactcctggaggaccgccttgtctacctcacaagaaactaggaaattagtgaaacccaaaaataccaagatgaagacaaagctgagaacaaacccttaccccccacagcaatacagctcgttccaaatggacaaactggaatgcggccagctcggaaactggagagccagtccccctgcaagcgctgctgctcctccagaactgcagccccactcagaaagcagtgaccttctgtacacgccatcctacagcctgcccttctcctaccattacggacacttccctctggactctcacgtcttcagcagcaaaaagccaatgttgccggccaagttcgggcagccccaaggatccccttgtgaggtggcacgctttttcctgagcacactgccagccagcggtgaatgccagtggcattatgccaaccccctagtgcctagcagctcgtctccagctaaaaatcctccagagccaccggcgaacactgctaggcacagcctggtgccaagctacgaagcgcccgccgccgccgtgcgcaggttcggcgaggacaccgcgcccccgagcttcccgagctgcggccactaccgcgaggagcccgcgctgggcccggccaaagccgcccgccaggccgcccgggacggggcgcggctggcgctggcccgcgcggcacccgagtgctgcgcgcccccgacccccgaggccccgggcgcgccggcgcagctgcccttcgtgctgctcaactaccaccgcgtgctggcccggcgcggaccgctggggggcgccgcacccgccgcctccggcctggcctgcgctcccggcggccccgaggcggcgaccggcgcgctgcggctccggcacccgagccccgccgccacctccccgcccggcgcgcccctgccgcactacctgggcgcctcggtcatcatcaccaacgggaggtgacccgctggccgcccgcgccaggagcctggacccggcctcccggggctgcggcgccaccgagcccggcaaatgcgcacgacctacattaatttatgcagagacagctgtttgaattggaccccgccgccgacttgcggatttccaccgcggaggccccgcgcgccggtgccgagggccgaggagcgcccgggtccgggcaggtgaccgcccgcctctgtcctgcgagggccggtgcgacccagttgctgggggcttggtttcctcaccttgaaatcgggcttcacgcgtcttgccttgtccccaacgttccacaacagtcccgctgggggattgaagcggtttcactccgcaaatatcctccactttcaggagggaaaacccaccctaccacagtccgctcttccaagtggacggcagacctgggaggggacgcctgtgtcacgagcccttttagatgcttaggtgaaggcagaagtgatgattgtaagtcccatgaatacacaactccactgtctttaaaagtcattcaagagtctcattatttttgtttttatttaaccctttcttcaatacaaaaagccaacaaaccaagactaagggggtgaccatgcaattccattttgtgtctgtgaacataggtgtgcttcccaaatacattaacaagctcttacttccccctaacccctatgaactcttgataacaccaagagtagcaccttcagaatatattgaataggcattaaatgcaaaaatatatatgtagccagacagtttatgagaatgaccctgtcaagcttcattattacgtggcaaaatccctctggcccacacagatctgtaattcactaggctcgtgtttgctacaaatagtgctaataaagttaaattgcacgtgcaatacggaacactgtcaatggactgcaccttgtgaaggaaaaacatgcttaagggggtgtaatgaaaatgatgtagacattttaagcattttctacacagcgagaaaacttcgtaagaacatgttacgtgtgcaacaggtaaacagaaatcctttcataaagcaccagcagtgtttaaaaaatgagcttccattaatttttactttttatgggttttgcttaaagatctcaacatggaaaaatcctgtcatggctctgaactgcacaatgcattgaaccgccgtccttcaattttcttcacactatcaacactgcagcattttgctgctttatcaaaatggtttattttaggaaactttttccacctttctgaatggaaagaggttttcacaaatgttttaaactcatcgttctaaaatcaagtgcacctacaccaactgctctcaaaatgtgaactgacttttttttttttttttttgccaaccctgtgtcacttagtgaggacctgacacaatccctacagggtgtctgtcagtgggcctcatggtaagagtcacaatttgcaaatttaggaccgtgggtcatgcagcgaaggggctggatggtaggaagggatgtgcccgcctctccacgcactcagctatacctcattcacagctccttgtgagtgtgtgcacaggaaataagccgagggtattatttttttatgttcatgagtcttgtaattaaaccgtgattcttgaaaggtgtaggtttgattactaggagataccaccgacatttttcaataaagtactgcaaaatgcttttgtgtctaccttgttattaacttttggggctgtatttagtaaaaataaatcaaggctatcggagcagttcaataacaaaggttactgttgagaaaaaagaccctatcatagatttacaag

SEQ ID NO: 56542 - DNA, 4581 bp, Homo Sapiens
aaaagacagcttttcttcctggagaacagactttttcagcaggattttcctttcagtgaaacataatttgacttgaaaggaacccagggaaaagtgtccaggtgtgagcatgagcgggtagaggtgtgcccttgtttgcttcaggctgtctgcttttcgcccctgactgttttttctgtttctggccatggaggaagagaaagatgacagcccacagctgacggggattgcagttggagccctcctggccctggccttggttggtgtcctcatccttttcatgttcagaaggcttagacaatttcgacaagcacagcccactcctcagtaccggttccggaagagagacaaagtgatgttttacggccggaagatcatgaggaaggtgaccacactccccaacacccttgtggagaacactgccctgccccggcagcgggccaggaagaggaccaaggtgctgtctttggccaagaggattctgcgtttcaagaaggaatacccggccctgcagcccaaggagcccccgccctccctgctggaggccgacctcacggagtttgacgtgaagaattctcacctgccatcggaagttctgtacatgctgaaaaacgttcgggtcctgggccactttgagaagccgctgttcctggagctttgcaaacacatcgtctttgtgcagctgcaggaaggggagcacgtcttccagcccagggagccggaccccagcatctgtgtggtgcaggacgggcggctggaggtctgcatccaggacactgacggcaccgaggtggtggtgaaagaggttctggcgggagacagcgtccacagcctgctcagcatcctggacatcatcaccggccatgctgcaccttacaaaacggtctccgtccgcgcggccatcccgtccaccatcctccggcttccagctgcggcttttcatggagtttttgagaaatatccggaaactctggtgagggtggtgcagatcatcatggtgcggctgcagagggtgacctttctggctctgcacaactacctcggcctgaccacagagctcttcaacgctgagagccaggccatccctctcgtgtctgtagccagtgtggctgccgggaaggccaagaagcaggtgttctatggcgaagaagagcggcttaaaatgccaccgcggctccaggagtcctgtgactcagatcacgggggcggccgcccggcagctgctgggcccctgctgaagaggagccactccgtccccgcgccttccattcgcaaacagatcttggaggagctggagaagcccggggcaggtgaccctgacccttcggccccacaagggggcccaggcagtgccacttctgatctggggatggcatgtgaccgtgccagggtcttcctgcactcggacgaggaccccgggagctccgtggccagcaagtccaggaaaagcgtgatggttgcagagataccctccacggtctcccagcactcagagagtcacacggatgagaccctggccagcaggaagtcggatgccatcttcagagctgccaagaaggacctgctcaccctgatgaagctggaagactcatctctgttggatggccgggtggcgcttctgcacgttcctgcaggcacggtggtgtcaaggcagggagaccaggacgccagcatcctgttcgtggtctcggggctgctgcacgtgtaccagcggaagatcggcagccaggaggacacctgcttgttcctcacgcgccccggggagatggtgggccagctggccgtgctcaccggggagcctctcatcttcaccgtcaaggccaacagggactgcagcttcctgtccatctccaaggcccacttctatgaaatcatgcggaagcagccgaccgtcgtcctgggtgtggcgcacactgtggtgaagaggatgtcgtccttcgtgcggcaaatcgactttgccctggactgggtggaggtggaggccgggcgagcaatatacaggcagggggacaagtccgactgcacgtacatcatgctcagcggccggctgcgctctgtgatccggaaggatgatgggaagaagcgcctggccggggagtacggccgaggagacctcgtcggcgtggtggagacactgacccaccaggcccgggcgaccacggtgcatgccgttcgggactcagaattggccaagctgccggcaggagccctcacgtccatcaagcgcaggtacccacaggtggtgactcggctgattcatctcttgggtgagaagatcctgggcagcctccagcagggacctgtgacaggccaccagcttgggctccccacggagggcagcaagtgggacttggggaacccggctgtcaacctgtccacggtggcagtgatgcccgtgtcagaggaagtgcccctcaccgccttcgccctggagctggagcatgccctcagcgccatcggcccgaccctgctgctgactagtgacaacataaaacggcgccttggctccgctgccctggacagtgttcacgagtaccggctgtccagctggctggggcagcaggaggacacccacaggatcgtgctctaccaggcagatggcacgctcacaccctggacccagcgctgcgtgcgccaggccgactgcatcctcatcgtgggcctgggtgaccaggagcccacagtgggcgagctggagcggatgctggagagcacagctgtgcgtgcccagaagcagctgatcctgctgcacagggaggagggcccggcgccagcgcgcaccgtggagtggctcaacatgcggagctggtgctccggccacctgcacctctgctgcccgcgccgcgtcttctccaggaggagcctgcccaagctggtggagatgtacaagcatgtcttccagcggcccccggaccgacactcagacttctcccgcctggcgagggtgctgacgggcaacgccattgccctggtgcttgggggagggggagcaagaggctgtgcccaggtgggcgttctcaaggccttggcggagtgcggcatccctgtggacatggtgggaggcacgtccatcggggccttcgtgggtgccctgtactctgaggagcggaactacagccagatgcggatccgggccaagcagtgggccgagggcatgacgtccttgatgaaggccgcgctggacctcacctaccccatcacgtccatgttctccggagccggcttcaacagcagcatcttcagcgtcttcaaggaccagcagatcgaggacctgtggattccttatttcgccatcaccaccgacatcacagcctcggccatgcgggtccacaccaacggctccctgtggcggtacgtgcgtgccagcatgtccctgtccggttacatgccccctctctgtgacccgaaggacggacacctgctgatggacgggggctacatcaacaacctcccagcggatgtggcccggtccatgggggcaaaagtggtgatcgccattgacgtgggcagccgagatgagacggacctcaccaactatggggatgcgctgtctgggtggtggctgctgtggaaacgctggaaccccttggccacgaaagtcaaggtgttgaacatggcagagattcagacgcgcctggcctacgtgtgttgcgtgcggcagctggaggtggtgaagagcagtgactactgcgagtacctgcgcccccccatcgacagctacagcaccctggacttcggcaagttcaacgagatctgcgaagtgggctaccagcacgggcgcacggtgtttgacatctggggccgcagcggcgtgctggagaagatgctccgcgaccagcaggggccgagcaagaagcccgcgagtgcggtcctcacctgtcccaacgcctccttcacggaccttgccgaaattgtgtctcgcattgagcccgccaagcccgccatggtggatgacgaatctgactaccagacggagtacgaggaggagctgctggacgtccccagggatgcatacgcagacttccagagcacctcagcccagcagggctcagacttggaggacgagtcctcactgcggcatcgacaccccagtctggctttcccaaaactgtctgagggctcctctgaccaggacgggtagaggcctctgctaaagagcccggatgcagcgtcttccgtgggactgtccccaaggctgaggctcctgccaagtcctaggggcctctgtacctgccctgctggaagccctgacttccccggggccccaggctgtgttagggttctctgggcctcttctttgtaccagcagccctgcatacagggccctgtgagcccccctgcagtcctgtgaggcccctgaagctctgtgaggcccctgaagctctgtgaaccccctgcagccctgtgaggccccccgaagccctgtgaggccccccgaagccctgtgaaccacctgctgccctgtgaggcccccaaagctctgtgaactgcctgctgtcctgtgaactgcctgctgccctgtgaggtgtgggagccctgatgctgccgtgtgatgtttcaataaaggtggatctcactgtt

SEQ ID NO: 56543 - DNA, 2308 bp, Homo Sapiens; identical to SEQ ID NO: 30300

SEQ ID NO: 56544 - DNA, 4364 bp, Homo Sapiens
agatgacaatagggagaatggagaacgtggaggtcttcaccgctgagggcaaaggaaggggtctgaaggccaccaaggagttctgggctgcagatatcatctttgctgagcgggcttattccgcagtggtttttgacagccttgttaattttgtgtgccacacctgcttcaagaggcaggagaagctccatcgctgtgggcagtgcaagtttgcccattactgcgaccgcacctgccagaaggatgcttggctgaaccacaagaatgaatgttcggccatcaagagatatgggaaggtgcccaatgagaacatcaggctggcggcgcgcatcatgtggcgggtggagagagaaggcaccgggctcacggagggctgcctggtgtccgtggacgacttgcagaaccacgtggagcactttggggaggaggagcagaaggacctgcgggtggacgtggacacattcttgcagtactggccgccgcagagccagcagttcagcatgcagtacatctcgcacatcttcggagtgattaactgcaacggttttactctcagtgatcagagaggcctgcaggccgtgggcgtaggcatcttccccaacctgggcctggtgaaccatgactgttggcccaactgtactgtcatatttaacaatggcaatcatgaggcagtgaaatccatgtttcatacccagatgagaattgagctccgggccctaggcaagatctcagaaggagaggagctgactgtgtcctatattgacttcctcaacgttagtgaagaacgcaagaggcagctgaagaagcagtactactttgactgcacatgtgaacactgccagaaaaaactgaaggatgacctcttcctgggggtgaaagacaaccccaagccctctcaggaagtggtgaaggagatgatacaattctccaaggatacattggaaaagatagacaaggctcgttccgagggtttgtatcatgaggttgtgaaattatgccgggagtgcctggagaagcaggagccagtgtttgctgacaccaacatctacatgctgcggatgctgagcattgtttcggaggtcctttcctacctccaggcctttgaggaggcctcgttctatgccaggaggatggtggacggctatatgaagctctaccaccccaacaatgcccaactgggcatggccgtgatgcgggcagggctgaccaactggcatgctggtaacattgaggtggggcacgggatgatctgcaaagcctatgccattctcctggtgacacacggaccctcccaccccatcactaaggacttagaggccatgcgggtgcagacggagatggagctacgcatgttccgccagaacgaattcatgtactacaagatgcgcgaggctgccctgaacaaccagcccatgcaggtcatggccgagcccagcaatgagccatccccagctctgttccacaagaagcaatgaggactgcccagtggaggaggggcgatgtggctggggagctagggagagactctggaggtggtgggtctctcgggagacccctaatgaggaagttgaggtaatgcttaacattgttgctgtgagaatttactgccctatgtttcccagagccattttggctcaattcaagtctattcaattcaagttaactctagcccagcccagatcaactcctcctacaaatattattggatgataggccctagaacccaataaaggagctccaaatgtcgttgggtggggaagcaaaatgtagagaaacatttaaagcacactgtaataataaatgcaattataaactatatggaggagggtgcaggggagggaatgtgtctggtgtgtgatgtgtgtatgtgcagtgggggtatcacagagagtatgacatctgagttaagggtagcaggtgcctggagtctcaggtggctgctcacccatctgtgcaggtgtctctggggctgctggtctcacctgtggtctgcagtagacacaattggctgagcaggatatgtgatactgtgtggttggtgtggagttttgaagaaggggctgtgtttgggccacgtaggctctactcagagacctgaaaccacttcagaatggcgcatatgtcgaaagagctggctgggggccttgcccaaaccaactgaggtcttaaagtccagggaaaaaaagtctgggttccaactagaattctagaaatatttctagaacacacagagagggaataagtccctctatcacccttattaccaagccttgtggttccctgtgattttagacaatgtctgatatttttctggctatttgcctagtaggatttaaaaaatattttcaaagtgaagctgagagagaatcttggaaacacacatacctgttgatcatgggccctgcagaattggcccttgggggctttatttggttacatgtgcctgggtggtctttaccagcttagactctaccatgggcccccatgaagctccattctcaatactgaataattattacttcccttgttgagtttctttttctgtcatgccctgggggcttctgctcttctcaccagaaagaacatttgaatctggattcttgtacacctgggttagaccctgttcagaggtgtggccaatttatcccgatctcctggaaggctgttgtgatttccatctaagaaatgagggtcttgagaatcaaccagtcccaagattagcctgttatcctgttatctactgagaccccaaatttctcaccaatgttttgggagatcctggaaaagatcccttcagtttagggtgtcaccaagacttctacacaacccaggactaccattgacctcagagctgtaccccacatcttgaagtaaattgatcccaccaggtcccacgtttgttatctctgcctaaatgttagcttctccatcctcaccacatgatgacctgctgtgtccctctgagcactacccagtggctgaaaactctgcaaatgggccacacttttgcaaaatacttgtatctgacacttaggtcttgtttgaagaatttcctttctggaaggttttacaagaagactgatagtctttcaagcccccacatcacaggcttagggacggcactaactttctcccagggatctaactggctagttcaaattatcactcttttaccttcatataaaatgtctcccccaaacctttttcccttctttgtcattgttatctgctaagcccctggtcatttccccatattcgtagtctttttttccatcctatctttctaatatttgttgtctttaacaaactgtgttctgtgtctgtgctcctccttccctctcagaccactggaatgcaagtccttcttccctttggaatgtactctggatcccttcccctgctttgacccccagactttgctccatctattattgcttctccatcctggatccttgacatttgtcaccccactggccttctcaggtgcaatcagtaaaaatgctgagaactcttggatcttaatcttcatgactgagttttttttagttgtatagttatcatctgcctttcttcactttgcatttcttcttgaatccattgcagattgacttccactcccactccttcactaaaaggactcttaccaagatcaaatctaatgggtacattttagttcctatgtgatttggcctttcgatgtcaatcatcactcccagccattgattttggtgacccacttccctgtgatgatcttctgatctagtttctcaggttccttcgctggtcctttttctttccctgcccctgacatattgacatttcctggagttggttttgtccttgattcattctcatgtcattctgcacacagtctctgcatgaactcaggcagacccttcatttaatgaccaccttagggctgatgattctcaaatctgtattccccgatcttgcatttgagctccagccccactcatcctctcggatgttctgcaggcccagcaaactcatcatgtccaaagtgaaactttttctctttcctgtctcctctcctctgatctgttctttcttggaacaccacccaagaacgtcacctcctccatcagattgtgagctcctggagggcaggagctgtgtccttctattcatcttcctatccccagaaccttgcacagatcctggaatgtggtaggtgctcagtaaatgtgtgttgaataaatgaatgaatgaatgaacaaatgaatgaatttgcttacttcaaggcaaaagaaccatgaaactgtattttgagtttctatgttatagcagtcagcaaatcctattaaatactttgtgtttccaagcaaaaaaaaaaaaaaaaaaaa

SEQ ID NO: 56545 - DNA, 4731 bp, Homo Sapiens; identical to SEQ ID NO: 24826

SEQ ID NO: 56546 - DNA, 7596 bp, Homo Sapiens; identical to SEQ ID NO: 29735

SEQ ID NO: 56547 - DNA, 2449 bp, Homo Sapiens; identical to SEQ ID NO: 28918

SEQ ID NO: 56548 - DNA, 2395 bp, Homo Sapiens
gccgccgtcggcgcgctgggtgcgggaagggggctctggatttcggtccctcccctttttcctctgagtctcggaacgctccagctctcagaccctcttcctcccaggtaaaggccgggagaggagggcgcatctcttttccaggcaccccaccatgggcaatgcctccaatgactcccagtctgaggactgcgagacgcgacagtggcttcccccaggcgaaagcccagccatcagctccgtcatgttctcggccggggtgctggggaacctcatagcactggcgctgctggcgcgccgctggcggggggacgtggggtgcagcgccggccgcaggagctccctctccttgttccacgtgctggtgaccgagctggtgttcaccgacctgctcgggacctgcctcatcagcccagtggtactggcttcgtacgcgcggaaccagaccctggtggcactggcgcccgagagccgcgcgtgcacctacttcgctttcgccatgaccttcttcagcctggccacgatgctcatgctcttcgccatggccctggagcgctacctctcgatcgggcacccctacttctaccagcgccgcgtctcgcgctccgggggcctggccgtgctgcctgtcatctatgcagtctccctgctcttctgctcgctgccgctgctggactatgggcagtacgtccagtactgccccgggacctggtgcttcatccggcacgggcggaccgcttacctgcagctgtacgccaccctgctgctgcttctcattgtctcggtgctcgcctgcaacttcagtgtcattctcaacctcatccgcatgcaccgccgaagccggagaagccgctgcggaccttccctgggcagtggccggggcggccccggggcccgcaggagaggggaaagggtgtccatggcggaggagacggaccacctcattctcctggctatcatgaccatcaccttcgccgtctgctccttgcctttcacgatttttgcatatatgaatgaaacctcttcccgaaaggaaaaatgggacctccaagctcttaggtttttatcaattaattcaataattgacccttgggtctttgccatccttaggcctcctgttctgagactaatgcgttcagtcctctgttgtcggatttcattaagaacacaagatgcaacacaaacttcctgttctacacagtcagatgccagtaaacaggctgacctttgaggtcagtagtttaaaagttcttagttatatagcatctggaagatcattttgaaattgttccttggagaaatgaaaacagtgtgtaaacaaaatgaagctgccctaataaaaaggagtatacaaacatttaagctgtggtcaaggctacagatgtgctgacaaggcacttcatgtaaagtgtcagaaggagctacaaaacctaccctcagtgagcatggtacttggcctttggaggaacaatcggctgcattgaagatccagctgcctattgatttaagctttcctgttgaatgacaaagtatgtggttttgtaatttgtttgaaaccccaaacagtgactgtactttctattttaatcttgctactaccgttatacacatatagtgtacagccagaccagattaaacttcatatgtaatctctaggaagtcaatatgtggaagcaaccaagcctgctgtcttgtgatcacttagcgaaccctttatttgaacaatgaagttgaaaatcataggcaccttttactgtgatgtttgtgtatgtgggagtactctcatcactacagtattactcttacaagagtggactcagtgggttaacatcagttttgtttactcatcctccaggaactgcaggtcaagttgtcaggttatttattttataatgtccatatgctaatagtgatcaagaagactttaggaatggttctctcaacaagaaataatagaaatgtctcaaggcagttaattctcattaatactcttattatcctatttctgggggaggatgtacgtggccatgtatgaagccaaatattaggcttaaaaactgaaaaatctggttcattcttcagatatactggaacccttttaaagttgatattggggccatgagtaaaatagattttataagatgactgtgttgtaccaaaattcatctgtctatattttatttagggaacatggtttgactcatcttatatgggaaaccatgtagcagtgagtcatatcttaatatatttctaaatgtttggcatgtaaatgtaaactcagcatcaaaatatttcagtgaatttgcactgtttaatcatagttactgtgtaaactcatctgaaatgttacaaaaataaactataaaacaaaaatttgaaaaaaaaaaaaaaaaaa

SEQ ID NO: 56549 - DNA, 2448 bp, Homo Sapiens
ctcctccccctcaccgtcccaattgtattccctggaagagcagccggaaaagcctccgcctgctcataccaggataggcaagaagctggtttctcctcgcagccggctccctgaggcccaggaaccaccgcggcggccggcaccacctggacccagctccaggcgggcgcggcttcagcaccacggacagcgccccacccgcggccctccccccggcggcgcgctccagccggtgtaggcgaggcagcgagctatgcccgcggcatggcccggcgctgcggccccgtggcgctgctccttggcttcggcctcctccggctgtgctcaggggtgtggggtacggatacagaggagcggctggtggagcatctcctggatccttcccgctacaacaagcttatccgcccagccaccaatggctctgagctggtgacagtacagcttatggtgtcactggcccagctcatcagtgtgcatgagcgggagcagatcatgaccaccaatgtctggctgacccaggagtgggaagattatcgcctcacctggaagcctgaagagtttgacaacatgaagaaagttcggctcccttccaaacacatctggctcccagatgtggtcctgtacaacaatgctgacggcatgtacgaggtgtccttctattccaatgccgtggtctcctatgatggcagcatcttctggctgccgcctgccatctacaagagcgcatgcaagattgaagtaaagcacttcccatttgaccagcagaactgcaccatgaagttccgttcgtggacctacgaccgcacagagatcgacttggtgctgaagagtgaggtggccagcctggacgacttcacacctagtggtgagtgggacatcgtggcgctgccgggccggcgcaacgagaaccccgacgactctacgtacgtggacatcacgtatgacttcatcattcgccgcaagccgctcttctacaccatcaacctcatcatcccctgtgtgctcatcacctcgctagccatccttgtcttctacctgccatccgactgtggcgagaagatgacgttgtgcatctcagtgctgctggcgctcacggtcttcctgctgctcatctccaagatcgtgcctcccacctccctcgacgtgccgctcgtcggcaagtacctcatgttcaccatggtgcttgtcaccttctccatcgtcaccagcgtgtgcgtgctcaacgtgcaccaccgctcgcccaccacgcacaccatggcgccctgggtgaaggtcgtcttcctggagaagctgcccgcgctgctcttcatgcagcagccacgccatcattgcgcccgtcagcgcctgcgcctgcggcgacgccagcgtgagcgcgagggcgctggagccctcttcttccgcgaagccccaggggccgactcctgcacgtgcttcgtcaaccgcgcgtcggtgcaggggttggccggggccttcggggctgagcctgcaccagtggcgggccccgggcgctcaggggagccgtgtggctgtggcctccgggaggcggtggacggcgtgcgcttcatcgcagaccacatgcggagcgaggacgatgaccagagcgtgagtgaggactggaagtacgtcgccatggtgatcgaccgcctcttcctctggatctttgtctttgtctgtgtctttggcaccatcggcatgttcctgcagcctctcttccagaactacaccaccaccaccttcctccactcagaccactcagcccccagctccaagtgaggcccttcctcatctccatgctctttcaccctgccaccctctgctgcacagtagtgttgggtggaggatggacgagtgagctaccaggaagaggggcgctgcccccacagatccatccttttgcttcatctggagtccctcctcccccacgcctccatccacacacagcagctccaacctggaggctggaccaactgctttgttttggctgctctccatctcttgtaccagcccaggcaatagtgttgaggaggggagcaaggctgctaagtggaagacagagatggcagagccatccaccctgaggagtgacgggcaaggggccaggaaggggacaggattgtctgctgcctccaagtcatgggagaagaggggtataggacaaggggtggaagggcaggagctcacaccgcaccgggctggcctgacacaatggtagctctgaagggaggggaagagagaggcctgggtgtgacctgacacctgccgctgcttgagtggacagcagctggactgggtgggccccacagtggtcagcgattcctgccaagtagggtttagccgggccccatggtcacagacccctgggggaggcttccagctcagtcccacagccccttgcttctaagggatccagagacctgctccagatcctctttccccactgaagaattc

SEQ ID NO: 56550 - DNA, 2260 bp, Homo Sapiens; identical to SEQ ID NO: 29116

SEQ ID NO: 56551 - DNA, 4232 bp, Homo Sapiens; identical to SEQ ID NO: 30655

SEQ ID NO: 56552 - DNA, 994 bp, Homo Sapiens
aagactcaaacttagaaacttgaattagatgtggtattcaaatccttagctgccgcgaagacacagacagcccccgtaagaacccacgaagcaggcgaagttcattgttctcaacattctagctgctcttgctgcatttgctctggaattcttgtagagatattacttgtccttccaggctgttctttctgtagctcccttgttttctttttgtgatcatgttgcagatggctgggcagtgctcccaaaatgaatattttgacagtttgttgcatgcttgcataccttgtcaacttcgatgttcttctaatactcctcctctaacatgtcagcgttattgtaatgcaagtgtgaccaattcagtgaaaggaacgaatgcgattctctggacctgtttgggactgagcttaataatttctttggcagttttcgtgctaatgtttttgctaaggaagataaactctgaaccattaaaggacgagtttaaaaacacaggatcaggtctcctgggcatggctaacattgacctggaaaagagcaggactggtgatgaaattattcttccgagaggcctcgagtacacggtggaagaatgcacctgtgaagactgcatcaagagcaaaccgaaggtcgactctgaccattgctttccactcccagctatggaggaaggcgcaaccattcttgtcaccacgaaaacgaatgactattgcaagagcctgccagctgctttgagtgctacggagatagagaaatcaatttctgctaggtaattaaccatttcgactcgagcagtgccactttaaaaatcttttgtcagaatagatgatgtgtcagatctctttaggatgactgtatttttcagttgccgatacagctttttgtcctctaactgtggaaactctttatgttagatatatttctctaggttactgttgggagcttaatggtagaaacttccttggtttcatgattaaactcttttttttcctga

SEQ ID NO: 56553 - DNA, 2668 bp, Homo Sapiens
tggaccaatgacagccagtggttttaattaataccattttgaatatctgagttccactggggtaaggggatgaatcaaacaaggcctcagaagaaaagttgtctgggaatgcaggaaggttttgcagaggagatgaagtttcagttgcaaccctgctgcgtgggcttcaatttcaccacctcgtgatccgcccgtctcggcctcccaaagtgctgggactgcaggcgtgagccaccgcgcccggccaacgtcattttcttttcaggagtcccttctgttatttagcaagacacactactacaatggagaaaaaagatgccccctccttcaagccctgagatcttcaggactttggcgaaaagtctgcgcccgaagagacccaggaaggattcttggaattgtagtccaaaggcatcccgccttctgcgcagactcacaagtccctgtggacggaattcttgaagtgtagcgccgctcagtccttccaccggaagtgtccgatcggaatcagccctgtccgagaggtgagtccgggtttggggatccagatgtccagccccgtgtccccctccaaacatccagtccctctcatattgcctttgaaattagcagcctctgggtgaccagaccttggccctcagaggaatcccggagaaaggtagaaccagcttcggcgttgggaacgcaggcgcgcttacgcatttagtgagggtttggcggtctccatagttaccgccgccgcgcgtgacgtcatagtggagcgctgagggcttggtggcgtggggtgggggctgtcctactgatcctgaatttggggtcactggtaagaggagttgcccattccagccaggtggaacggggaggggtgccacatgtctcagatctgccattgtctgcgaaaagaaactgctgcgaggaccatccccaatcccctgcttcccttgggaagagtaaccgccgttttgtaggacacttggggacaaccccgcttgtcctgaaatttattgacacggtaaatagtatttcctgtgtgccgaggatgcagttaaaccaacactgaccccctgcccttgagaaacacaagatggctacagaaccaaagaaagctgcagcccagaactctccagaggatgaaggacttctgatagtgaagatagaagaggaagaatttatccatgggcaggacacttgcttacagagaagtgaactccttaagcaggagctctgcaggcagctttttaggcagttctgctaccaggattctcctggacctcgcgaggcactgagccgcctccgggagctctgctgtcagtggctgaagccagagatccataccaaggaacagattctggaactgctggtgctagagcagttcctgaccatcctgccaggagatttgcaggcctgggtacatgaacattacccagagagtggagaggaggcagtgaccatactagaagatttggagagaggcactgatgaagcagtactccaggttcaagcccatgaacatggacaagaaatattccagaaaaaagtgtcacctcctggaccagcacttaatgtcaagttacagccagtggagaccaaggcccattttgattcatcagaaccccagctcctatgggactgtgataatgagagtgaaaacagtagatccatgccaaagctggaaatttttgaaaaaattgaatcacagagaattatatctggaagaatctcaggatacatatcagaagcatctggtgagtctcaagacatctgtaagtctgcaggcagggtaaagagacaatgggaaaaagaatcaggggagtctcagagactctcgtctgcccaggatgaaggttttggtaaaatcctcacccacaaaaatacagtcagaggtgaaataataagccacgatggatgtgagaggagattaaatctgaactcaaatgaattcacacaccagaaatcttgtaaacatggtacctgtgaccagagcttcaaatggaactcagattttattaaccatcaaataatttatgctggagaaaaaaatcaccaatatggaaaatctttcaagagcccaaaacttgctaaacatgcagcagttttcagtggagataaaactcatcagtgtaatgaatgtgggaaagctttcaggcacagctcaaaacttgctaggcatcagagaatccacactggagagagatgctatgaatgtaatgaatgtgggaaaagctttgcagagagctcagatcttactagacatcggcgaattcacactggggaaagaccctttggttgcaaagaatgtgggagagcattcaacctgaactcacatcttatcaggcatcagagaattcacaccagagagaaaccctacgagtgtagtgaatgtgggaaaaccttccgagtgagctcacatcttattcgacactttagaattcacactggagaaaaaccctatgaatgcagtgagtgtggaagagccttcagtcagagctcaaaccttagtcaacaccagagaattcacatgagggaaaacctattaatgtaaggaacttaaatttgtaagtaaatgctgaggaaatggcacaatatgaaaaatattaaataaaaaataaatattgggcaagatggaagactgaaaaaaaaaaaaaaaaaaaaaaaaaaaaaaaaaaaa

SEQ ID NO: 56554 - DNA, 5501 bp, Homo Sapiens
attttaaaaaagatccggccatactatttttatcttgctttttcgttctgtcgcagtactgtttaatatgagtccagcgacggctctgtgactgttttcctctggtaaaatcgctcttgcgtcctcagcgtttatctcaggtgcggaaggtctcacaggtttggaaatagcgccggaaaaatcgatccgcggagtgagacggctcgtaccacactgcagggcccggaggtcaagatggtggctgtaaaactaggatccctgacgattgcttagcattaaggcccgacatggaaccggggtgtgacgagttcctgccgccaccggagtgcccggtttttgagcctagctgggctgaattccaagacccgcttggctacattgcgaaaataaggcccatagcagagaagtctggcatctgcaaaatccgcccacccgcggattggcagcctccttttgcagtagaagttgacaatttcagatttactcctcgcgtccaaaggctaaatgaactggaggcccaaactagagtgaaattgaactatttggatcagattgcaaaattctgggaaattcaaggctcctctttaaagattcccaatgtggagcggaagatcttggacctctacagccttagtaagattgtgattgaggaaggtggctatgaagccatctgcaaggatcgtcggtgggctcgagttgcccagcgtctccactacccaccaggcaaaaacattggctccctgctacgatcacattacgaacgcattatttacccctatgaaatgtttcagtctggagccaaccatgtgcaatgtaacacacacccgtttgacaatgaggtaaaagataaggaatacaagccccacagcatcccccttagacagtctgtgcagccttcaaagttcagcagctacagtcgacgggcaaaaaggctacagcctgatccagagcctacagaggaggacattgagaagcatccagagctaaagaagttacagatatatgggccaggtcccaaaatgatgggcttgggccttatggctaaggataaggataagactgtgcataagaaagtcacatgccccccaactgttacggtgaaggatgagcaaagtggaggtgggaacgtgtcatcaacattgctcaagcagcacttgagcctagagccctgcactaagacaaccatgcaacttcgaaagaatcacagcagtgcccagtttattgactcatatatttgccaagtatgctcccgtggggatgaagatgataagcttcttttctgtgatggctgtgatgacaattaccacatcttctgcttgttaccaccccttcctgaaatccccagaggcatctggaggtgcccaaaatgtatcttggcggagtgtaaacagcctcctgaagcttttggatttgaacaggctacccaggagtacagtttgcagagttttggtgaaatggctgattccttcaagtccgactacttcaacatgcctgtacatatggtgcctacagaacttgtagagaaggaattctggaggctggtgagcagcattgaggaagacgtgacagttgaatatggagctgatattcattccaaagaatttggcagtggctttcctgtcagcaatagcaaacaaaacttatctcctgaggagaaggagtatgcgaccagtggttggaacctgaatgtgatgccagtgctagatcagtctgttctctgtcacatcaatgcagacatctcaggcatgaaggtgccctggctgtacgtgggcatggttttctcagcattttgttggcatattgaggatcactggagttactctattaactatctgcattggggtgagccgaagacctggtatggtgtaccctccctggcagcagagcatttggaggaggtgatgaagatgctgacacctgagctgtttgatagccagcctgatctcctacaccagcttgtcactctcatgaatcccaacactttgatgtcccatggtgtgccagttgtccgcacaaaccagtgtgcaggggagtttgtcatcacttttcctcgtgcttaccacagtggttttaaccaaggctacaattttgctgaagctgtcaacttttgtactgctgactggctacctgctggacgccagtgcattgaacactaccgccggctccggcgctattgtgtcttctcccacgaggagctcatctgcaagatggctgccttcccagagacgttggatctcaatctagcagtagctgtgcacaaggagatgttcattatggttcaggaggagcgacgtctacgaaaggcccttttggagaagggcgtcacggaggctgagcgagaggcttttgagctgctcccagatgatgaacgccagtgcatcaagtgcaagaccacgtgcttcttgtcagccctggcctgctacgactgcccagatggccttgtatgcctttcccacatcaatgacctctgcaagtgctctagtagccgacagtacctccggtatcggtacaccttggatgagctccccaccatgctgcataaactgaagattcgggctgagtcttttgacacctgggccaacaaagtgcgagtggccttggaggtggaggatggccgtaaacgcagctttgaagagctaagggcactggagtctgaggctcgtgagaggaggtttcctaatagtgagctgcttcagcgactgaagaactgcctgagtgaggtggaggcttgtattgctcaagtcctggggctggtcagtggtcaggtggccaggatggacactccacagctgaccttgactgaactccgggtccttcttgagcagatgggcagcctgccctgtgccatgcatcagattggggatgtcaaggatgtcctggaacaggtggaggcctatcaagctgaggctcgtgaggctctggccacactgccctctagtccagggctattgcggtccctgttggagagggggcagcagctgggtgtagaggtgcctgaagcccatcagcttcagcagcaggtggagcaggcgcaatggctagatgaagtgaagcaggccctggccccttctgctcacaggggctctctggtcatcatgcaggggcttttggttatgggtgccaagatagcctccagcccttctgtggacaaggcccgggctgagctgcaagaactactgaccattgcagagcgctgggaagaaaaggctcatttctgcctggaggccaggcagaagcatccaccagccacattggaagccataattcgtgagacagaaaacatccctgttcacctgcctaacatccaggctctcaaagaagctctgactaaggcacaagcttggattgctgatgtggatgagatccaaaatggtgaccactacccctgtctagatgacttggagggcctggtggctgtgggccgggacctgcctgtggggctggaagagctgagacagctagagctgcaggtattgacagcacattcctggagagagaaggcctccaagacctttctcaagaagaattcttgctacacactgcttgaggtgctttgcccgtgtgcagacgctggctcagacagcaccaagcgtagccggtggatggagaaggcgctggggttgtaccagtgtgacacagagctgctggggctgtctgcacaggacctcagagacccaggctctgtgattgtggccttcaaggaaggggaacagaaggagaaggagggtatcctgcagctgcgtcgcaccaactcagccaagcccagtccactggcaccatccctcatggcctcttctccgacttctatctgtgtgtgtgggcaggtgccagctggggtgggagttctgcagtgtgacctgtgtcaggactggttccatgggcagtgtgtgtcagtgccccatctcctcacctctccaaagcccagtctcacttcatctccactgctagcctggtgggaatgggacacaaaattcctgtgtccactgtgtatgcgctcacgacggccacgcctagagacaatcctagccttgctggttgccctgcagaggctgcccgtgcggctgcctgagggtgaggcccttcagtgtctcacagagagggccattggctggcaagaccgtgccagaaaggctctggcctctgaagatgtgactgctctgttgcgacagctggctgagcttcgccaacagctacaggccaaacccagaccagaggaggcctcagtctacacttcagccactgcctgtgaccctatcagagaaggcagtggcaacaatatttctaaggtccaagggctgctggagaatggagacagtgtgaccagtcctgagaacatggctccaggaaagggctctgacctggagctactgtcctcactgttgccgcagttgactggccctgtgttggagctgcctgaggcaatccgggctcccctggaggagctcatgatggaaggggacctgcttgaggtgaccctggatgagaaccacagcatctggcagctgctgcaggctggacagcctccagacctggacagaattcgcacacttctggagctggaaaaatttgaacatcaagggagtcggacaaggagccgggctctggagaggcgacggcggcggcagaaggtggatcagggtagaaacgttgagaatcttgttcaacaggagcttcagtcaaaaagggctcggagctcagggattatgtctcaggtgggccgagaagaagaacattatcaggagaaagcagaccgtgaaaatatgttcctgacaccttccacagaccacagccctttcttgaaaggaaaccaaaatagcttacaacacaaggattcaggctcttcagctgcttgtccttctttaatgcctttgctacaactctcctactctgatgagcaacagttgtgacagtggcaccaaaggtcatttgtggttgtttttgtttgtttgtttcttaaatcctactatctcctggcctggacctcagaaggagctttttgcttatctataatttttcactgccaatttttgatatcctctctcctagagttactgttaaaaggttggttcgtaaagtccacaccccgatgctcagaagtgtcttgccagcaacattcctgctagcatacaggagtgatttcctaaaccagtttcattctagtctgaatagggacaaacaaatcttgaggaagcccaagtgcgtacctttatttttgcccccaccaccctctttctgtacttcaatttttgtttgttttttgtttttttgtccctgtcataaaatattttggtgcttcaaaacttgtaccttcattgtacatccttttcttttctccccttgggtcttattataaaagaagacaatgtacgttgtaattaccaaaaagaatagggaaaaacaagaatttcatgactctacctgtggtctatctttaatttcatttcttttgttaaaaataaaacaatgagtatgtttggatactatgaaaaaaaaaaaaaaaa

SEQ ID NO: 56555 - DNA, 4757 bp, Homo Sapiens
ccgggtccctccccatcccgcgacccaacggtcgttccccgccgccggccccgcccctccctggccgcccgcggcgcgccggcgcctgcgcagtcgccccagagcgccccgaccgggatggcggccgttttggagtcgctgctgcgagaagaggtgtcggtcgcagccgtcgtgcggtggatcgcgcgcagcacccagggttcggaggataacgctggggaggcggccgcgctgagctcactccgggccctgcggaaagaattcgtaccgttcctgttgaacttcctgagggagcagagcagccgcgtcctcccgcaggggcccccgacccccgccaagaccccgggcgcctcggcagccttgccagggaggccgggaggcccgccgcggggtagccgcggggcgcgcagccagcttttccctccgaccgaggcccagagcaccgctgccgaggcccctctggcccgccgcgggggcaggaggcggggcccggggccggcccgcgagcgtggaggccgcggcctggaggagggggtcagcggggagagcctgcccggagccgggggccggaggcttaggggctctggcagccccagccgccccagcctcacgctgtctgatccgccaaacctcagcaacctggaggagttccctcccgtaggctcggttccccccggccctacagggacgaagccttctcgcaggatcaacccaactccggtgagcgaagagcggtcactctccaagcccaagacctgcttcacctcacccccaatcagctgtgtccccagttcccaaccctcagccctggacactagcccttggggccttggccttcccccagggtgcagaagtctgcaagaggagcgagagatgctcaggaaggagcgctctaagcagctgcagcagtcacctacccccacctgtcccaccccagaattggggtcgcccctccccagccggacaggaagcctcacagatgaacctgcagaccctgccagagtgtcttcccgccagcgcctggagcttgtagcccttgtttactcctcgtgcattgctgagaacctggtaccaaacctcttcttggagcttttcttcgtctttcagctcctcactgcccggaggatggtgactgccaaggacagcgaccctgaactaagtccagctgtcctagattccctggaaagtccactgttccaaagcatccacgattgtgtcttctttgcagtgcaggttttggagtgtcactttcaggttctttccaacctggacaaagggaccttgaagctgctggctgagaatgagcggctgctgtgcttctcaccagctctgcaaggccgccttcgagctgcctatgagggcagtgttgccaaggtctctctggtgatgcctccctctactcaagctgtctcctttcagccagagactgacaatcgtgccaacttctccagtgaccgagcctttcatacttttaagaaacagagggatgtgttttatgaggtgctgcgagagtgggaagatcaccatgaggagcctggctgggattttgagaagggcttgggcagcagaatcagggccatgatgggtcagctctccgcagcctgcagccacagccactttgttcggcttttccaaaaacaactactccagatgtgtcagagccctggtggtgctgggggcaccgtcttgggcgaggccccagatgtgttgagtatgctgggagctgacaagctggggcggttgtggcgcctacaggaacggcttatggctcctcagagcagtggggggccctgcccaccccccaccttcccaggctgtcaaggcttctttagggacttcatccttagtgccagcagcttccagtttaaccagcatctcatggacagtctgagcttgaagatccaggagctcaatggtcttgccctgccccagcatgagcccaatgatgaagacggggagtcagacgtagactggcagggtgagcggaagcaatttgctgtggtgcttcttagcctgagacttttggctaaattcctgggctttgtggctttcctgccataccgggggcctgaacctcccccgaccggtgagcttcaggactccattctggccctcaggagccaggtccctccggtcctggatgtgcggactctgctgcagcgagggctgcaggcccgccgggcggtgctcaccgtgccctggctggtggagtttctctcctttgctgaccatgttgttcccttgctggaatattaccgggacatcttcactctcctgctgcgcctgcaccggagcttggtgttgtcgcaggagagtgaggggaagatgtgtttcctgaacaagctgctgctacttgctgtcctgggctggcttttccagattcccacagtccctgaggacttgttctttctggaagagggtccctcatatgcctttgaggtggacacagtagccccagagcatggcttggacaatgcgcctgtggtggaccagcagctgctctacacctgctgcccctacatcggagagctccggaaactgctcgcttcgtgggtgtcaggcagtagtggacggagtgggggcttcatgaggaaaatcacccccaccactaccaccagcctgggagcccagccttcccagaccagccaggggctgcaggcacagctcgcccaggcctttttccacaaccagccgccctccttgcgccggaccgtagagttcgtggcagaaagaattggatcaaactgtgtcaaacatatcaaggctacactggtggcagatctggtgcgccaggcagagtcacttctccaagagcagctggtgacacagggagaggaagggggagacccagcccagctgttggagatcttgtgttcccagctgtgccctcacggggcccaggcattggccctggggcgggagttctgtcaaaggaagagccctggggctgtgcgggcgctgcttccagaggagaccccggcagccgttctgagcagtgcagagaacattgctgtggggcttgcaacagagaaagcctgtgcttggctgtcagccaacatcacagcactgatcaggagggaggtgaaagcagcagtgagtcgcacacttcgagcccagggtcctgaacctgctgcccggggggagcggaggggctgctcccgcgcctgtgagcaccatgctcccctcccctcccacctcatctccgagataaaagacgtgctctccttggccgtggggccacgggaccctgacgagggagtctccccagagcatctggaacagctcctaggccagctgggccagacgctgcggtgccgccagttcctgtgcccacctgctgagcagcatctggcaaagtgctctgtggagttagcttccctcctcgttgcagatcaaattcctatcctagggcccccggcacagtacaggctggagagagggcaggctcgaaggcttctgcacatgctgctttccttgtggaaggaagactttcaggggccggttccgctgcagctgctgctgagcccaagaaatgtggggcttctggcagacacaaggccaagggagtgggacttgctgctattcttgctacgggagctggtggagaagggtctgatgggacggatggagatagaggcctgcctgggcagcctccaccaggcccagtggccaggggactttgctgaagaattagcaacactgtctaatctgtttctagccgagccccacctgccagaaccccagctaagagcctgtgagttggtgcagccaaaccggggcactgtgctggcccagagctagggctgagaagtggccctgccttgggcattgcaccagaaccctggacccccgcctcacgaggaggcccaagtgcccaatgcagaccctcactggttggggtgtagctgggtctacagtcagacttcctgctctaagggtgtcactgcctggcatcccaccacgcgaatcctagaggaaggagagttggcctgatttgggattatggcagaaaagtccagagatgccagtcctggagtagaagaggtggtgtttgtttatctcttggatactaaatgaaatgaggtgtgtgggcttgtcaacacagaattcaagcctcatttgctatcccagcatctcttaaaactttgtagtcttggaattcatgacagaggcaaatgactcctgcttaacttatgaagaaagttaaaacatgaatcttgggagtctacattttcttatcaccaggagctggactgccatctccttataaatgcctaacacaggccgggtctggtggctcatgcctgtaatcccagcactttgagaggcctgaggtcggcggactgcctgaggtcaggaattcaagaccagcctggccaacatggcaaaaccccatctctactaaaaataaaaaaattattagctgggcatggtggtgtgtgcctgtaatcccagctactcaggaggatgaggcaggagacctgcttgaacctggaggtggaggttgcagtgagccgaggtcgcaccactgcactccagtctgggtaacagagcgagactttctagaaaaagcctaacaaacagataaggtaggactcaaccaactgaaacctgactttccccctgtaccttcagcccctgtgcaggtagtaacctcttgagacctctccctgaccagggaccaagcacagggcatttagagctttttagaataaactggttttctttaaaaaaaaaaaaaaaaaaaaaaaaaaaaa

SEQ ID NO: 56556 - DNA, 4281 bp, Homo Sapiens
ctgatggatttgcattcaggttccagccctgcgtttcctatattgactccttatacacgacctggcgctccagtttaggaggagacgttgttttgtaatcaaccacgaacgatgaaaccttccatagctgagatgcttcacagaggaaggatgttgtggataattcttctaagcacaattgctctaggatggactaccccgattcccctaatagaggactcagaggaaatagatgagccctgttttgatccatgctactgtgaagttaaagaaagcctctttcatatacattgtgacagtaaaggatttacaaatattagtcagattaccgagttctggtcaagaccttttaaactgtatctgcagaggaattctatgaggaaattatataccaacagttttcttcatttgaataatgctgtgtctattaatcttgggaacaatgcattgcaggacattcagactggagctttcaatggtcttaagattttaaagagactatatctacatgaaaacaaactagatgtcttcagaaatgacaccttccttggcttggaaagtctagaatatctgcaggcagattacaatgtcattaaacgtattgagagtggggcatttcggaacctaagtaaattgagggttctgattttaaatgataatctcatccccatgcttccaaccaatttatttaaggctgtctctttaacccatttggacctacgtggaaataggttaaaggttcttttttaccgaggaatgctagatcacattggcagaagcctgatggagctccagctggaagaaaacccttggaactgtacatgtgaaattgtacaactgaagagttggctggaacgcattccttatactgccctggtgggagacattacctgtgagacccctttccacttccatggaaaggacctacgagaaatcaggaagacagaactctgtcccttgttgtctgactctgaggtagaggctagtttgggaattccacattcgtcatcaagtaaggagaatgcatggccaactaagccttcctcaatgctatcctctgttcattttactgcttcttctgtcgaatacaagtcctcaaataaacagcctaagcccaccaaacagcctcgaacaccaaggccaccctccacctcccaagctttatatcctggtccaaaccagcctcccattgctccttatcagaccagaccaccaatccccattatatgccccactgggtgtacctgtaatttgcacatcaatgaccttggcttgactgtcaactgcaaagagcgaggatttaataacatttctgaacttcttccaaggcccttgaatgccaagaaactgtatctgagtagcaatctgattcagaaaatataccgttctgatttttggaatttttcttccttggatctcttgcatctggggaacaatcgtatttcctatgtccaagatggggcctttatcaacttgcccaacttaaagagcctcttccttaatggcaacgatatagagaagctgacaccaggcatgttccgaggcctacagagtttgcactacttgtactttgagttcaatgtcatccgggaaatccagcctgcagccttcagcctcatgcccaacttgaagctgctattcctcaataataacttactgaggactctgccaacagacgcctttgctggcacatccctggcccggctcaacctgaggaagaactacttcctctatcttcccgtggctggtgtcctggaacacttgaatgccattgtccagatagacctcaatgagaatccttgggactgcacctgtgacctggtcccctttaaacagtggatcgaaaccatcagctcagtcagtgtggttggtgatgtgctttgcaggagccctgagaacctcacgcaccgtgatgtgcgcactattgagctggaagttctttgcccagagatgctgcacgttgcaccagctggagaatccccagcccagcctggagattctcaccttattggggcaccaaccagtgcatcaccttatgagttttctcctcctgggggccctgtgccactttctgtgttaattctcagcctgctggttctgtttttctcagcagtctttgttgctgcaggcctctttgcctacgtgctccgaaggcgtcgaaagaagctgcccttcagaagcaagcggcaggaaggtgtggaccttactggcatccaaatgcaatgccacaggctgtttgaggatggtggaggtggtggtggcggaagtgggggtggtggtcgaccaactctttcctctccagagaaggcccctcccgtgggtcatgtgtatgagtacatcccccacccggttacccaaatgtgcaacaaccccatctacaagcctcgtgaggaggaggaggtggctgtttcatcagcccaagaagcagggagtgcagaacgtgggggtccagggacacaaccaccgggaatgggtgaggctctcctaggaagtgagcagtttgctgagacacccaaggagaaccatagtaactaccggaccttgctggaaaaagagaaggagtgggccctagcagtgtccagctcccagcttaacaccatagtgacggtgaatcaccatcaccctcaccacccagcagttggtggggtttcaggagtagttgggggaactgggggagacttggcagggttccgccaccatgagaaaaatggtggggtggtgctgtttcctcctgggggaggctgtggtagtggcagtatgctactagatcgagagaggccacagcctgccccctgcacagtgggatttgtggactgtctctatggaacagtgcccaaattaaaggaactgcacgtgcaccctcctggcatgcaatacccagacttacagcaggatgccaggctcaaagaaacccttctcttctcggctggaaagggcttcacagaccaccaaacccaaaaaagtgattacctcgagttaagggccaaacttcaaaccaagccggattacctcgaagtcctggagaagacaacatacaggttctaacagagagaagaaaatatattagtgctttttttttttcaaaagaaaaggaaaataaaagaaatatatcccttgctccctttacacttgtcccagtaactccatcctcacgatctttcctaccctgaacaaaactaaaaccgcatgataactagagaatacagatgtatgctctcccctctcagatgcgatttggaggaagggccatactcagatcattaatcaatgaaagtgccttcgcagacttttgccagcaaatgttatcattatttttttatactgaaacttgagactttgactgtgccatgtataagatatactggggatcattgtatggatcctaattaagtaaaattcaatgtgtctttttattttcagtaactattttttttatagttgtagttttgatttaaagggggggaaacaagttgacatttgtcatttgtggctttctttcttatcatcatggcacagattctgtacatgtattaacaatgcagtttgctgcatgcctggaaactgcaagatggggagggagggggcgggtcttgctcgaatgttctcactcactatcttgtctctcatacacatatccatctgcagaccatggtccctaaacctgcagtttcttcctgctggtgcaggtacacacacacacacacacacacacacacacacacacacacactccataccatttccattcaactcaatctgcttagttcgggtttgatccatttttctcctctccatagttctaccacccttcactgctagtgtacagctcacagcatctctcctaccaccctgggaaaagtcacattctaggctggattctactgaagtagaggcctggtggtttaacagccgaagacacacgcctagggatgagcaccctctttgtgacacttcatcctgatgccaagattttttggagaacatctgcactttcttatatatatatataatattaaaaaaagcaactgggtatatatcactaacagctttgtaggaagcacttttaatgttttctctctcacacacaaagattcaaaagaaatgtgcatatatttattctgtaatttcagtgattataaattgtaaaggtaatgtttaatcattgtatagtgattatgcctctggtatagctttcctaataaaaagtttttgaaaaacataaaaaaaaaaaaaaaaaaaaaaaaaaaaaaaaaaaaaaaaaaaaaaaaaaaaaaaaaaaaa

SEQ ID NO: 56557 - DNA, 2930 bp, Homo Sapiens
atgtcagggaaacggaagcgtgtggtgttgactattaaagataagcttgatataataaagaaacttgaagacggaggttcttccaaacaactggcagtgatttatggaattggtgaaacaacagttcgggatataagaaaaaataaggaaaagattataacttatgcaagcagttctgattccacaagtcttttggccaagaggaaatctatgaagccatccatgtatgaggaattggacagggcaatgctggaatggttcaaccagcaaagagcaaaagggaatcccatatctggaccaatttgtgcaaaaagggcagagttcttcttttatgctttgggaatggatggtgattttaacccctctgccggttggctaactcgttttaagcagcggcacagcattagagagattaacattagaaatgaaagattaaatggagatgagactgcggtggaagatttttgtaataactttcgagattttattgaacgagagaatttacagcctgaacaaatctacaatgcagatgaaactggactcttttggaagtgcttgccttctaggatttcagtaatcaaaggtaaatgcactgtccctgggcacaaatcaattgaagaaagagtcacaatcatgtgttgtgccaatgcaacaggtttacacaaacttaaactttgtgttgtggggaaagcaaagaaacctcgctcctttaaatcaactgacaccttaaacctgccagtctcttatttcagccaaaaaggtgcatggatggatctttccattttccgacaatggtttgataaaatttttgtgccgcaagttcgagagtatttaagatctaaaggcttgcaggaaaaggctgtgctcttgttggataattcaccaacacatccaaatgaaaatgtcctaaggtcagatgatggccaaatatttgctaaatatttaccacctaatgtggcctcattgattcagccttcagatcagggagtcatagcaacgatgaagagaaattatcgtgcaggtcttctccagaacaacttggaagaaggtaatgacctgaaatcattctggaagaagctaactctgttggatgcactttatgaaatagcaatggcatggaacttagtaaaaccagttaccattagcagagcatggaagaagattctccctatggtagaggagaaagagagcctggactttgatgttgaagatatttctgtggctactgtggctgccattttacaacacaccaaaggattggaaaatgtgactactgagaaccttgaaaaatggcttgaagtagacagtactgaaccaggctatgaagtgttaactgatagcgaaatcatcagaagagcacaaggccaggcagatgaatccagtgaaaatgaggaggaggaaatagaactaattccagagaaacatattaatcatgcagctgccctccagtggactgaaaatttattggattatctagaacaacaaggtgatatgattctacctgatagactggtaatacgtaaacttcgagccaccatcagaaataaacagaagatgacaaagtcaagtcaataatgtcatttcaattttattgttctgctcattgtgtttgtgacaaactctttgcaatatggcttaattttctttgtgttctgaattctcagacttggtcctgtgaaatacaggcacaaaatgtatctgaagtggtttgaggattatgtgttttcatcatctgtgtcttttgtccttttatttgtacagataatcagaagatgatactgaatagatataaattacatgtacacatgtattcactttttagaatctgcaattataccttctgtaacagtggcattcccttaattttctagtgaaagttagagataactgaacagactgaagcacttttctgaaatcttttgcttgatttatgaaggctgccatagttatcttttcttgtgttaaccatcttaaatgatgttttgtatattttaatagactgataggatgagaaagatttatattattagatttcaggatgatttataataattcaaaaatgaaattcaataatggggaaataattatgaattatagaaattatgccttcattctcttacatttgtgtgggttgcaagagggggagattattctggaaatgaagtaaatatgggaagttattgccaaatgagagagaaactatgggaaagctgatctataaagaggcattctgatcaattcatttgtaggaaactgggaaataaaaacctggggaactttaggttatttatacaagggaataaataggctgattttaatttggtaagttgatctttttattatgaatttggtaatagtataggtttattatttattcatctaattttatagtacaggttttgtaatgttacatgtgatgatatgagctcccaccttatatgggggaacatcttgggaatttgagatttaataagtttttttttttttttttttagtgtttttactgcatactcacaaatgttgtctataatttgaaaaatattgtcatatctggccctttgatgagaaaaggaaattacaataataaagttttatgattttaaataagtcatatgtttgtatcctgttttatgaagaaagcagaaataattactgaaagtgccagacactaaggaatattattgtttattattttaatacatataaaaagggattaatctgctaaaatgtaatctaaatcagaattttgataaattttttttgtaaactaagtatgtttattcaagacattgaaactactttgcacatatgaatattaatgtaacttgtaatttaaaagtaaagtgtttccatgctatttcatgttttggccaaaaatttttaaaaaataaattacaattgttctctattagtaaaaaaaaaaaaaaaaa

SEQ ID NO: 56558 - DNA, 1545 bp, Homo Sapiens
ctcacactggctggcactgctaagcaggtgcggaggggagtcagagacccccggatggaggggtgtggtggacctcagttttgaggccgagagtcctctggcgccccccacagagctcctggagagactgcccagctatgactggcttcttcaagggggcagaggacagatattcttcccacctttggaggccccagggaggccccaggagcaaaggtcctggccctcgttcctggaacacaggagatgccctccccagttggactgctgagggctttaccactaccgtggcctcagtttctcgcctgcacgttgaggaggctggctggcccgcgtgagtccacaggcccttcccagaagcccccgcctctctgttcggtcccctgcagagtccctgcgatgacggaggaggtggcccgggaagccctcctcagctttgtggactctaagtgctgctacagcagcacggtggctggagacctcgtcatccaggagctgaagcggcagaccctctgcaggtaccgtctggagacctttagtgaatccaggataagcgagtggacatttcaaccctttactaaccactctgtggatgggccgcaaagaggcgcctcccccaggctctgggacatcaaggttcaaggtcctccgatgtttcaggaagacaccaggaagttccaggtccctcactcgtcactggtcaaggaatgccacaaatgccatgggcgtgggcggtacaagtgcagcggctgccacggggcgggcacggtgcggtgcccatcctgctgcggagccaagcgcaaagccaagcagtcccggagatgtcagctgtgcgcggggtccggcaggcgaagatgcagcacttgctcagggagagggaacaagacctgcgccacctgcaagggggagaagaagctgttgcacttcatccagcttgtcatcatgtggaagaacagcttgtttgagtttgtgtctgagcaccggctcaactgccccagggagctccttgctaaagccaaaggagaaaacctctttaaggatgaaaactcggtggtgtaccccatcgtggacttccctctgcgagacatctctcttgcctcccagaggggcattgcagagcacagcgctgccttggcctcccgtgcccgcgtcctgcagcagcgccagaccattgagctgatccccctcacagaagttcactattggtaccaaggaaagacttatgtctactacatctatggcactgaccaccaggtgtatgcggtggactatcctgagcggtattgctgtggctgtaccatcgtgtgacatagcatggctgtccccagagcctgccattcacgtttgccaaggaagatggccgacactctctgagtgtgttcactgttggctgcattggacaatcacatacaaaccctggcatgtccttccagaaaaaccagcttatcatctatcaagctccaaccccttatacagctcctctggtggaatccatgactcatatgtttaacctacaataattcagctatacccattcctgtaaaa

SEQ ID NO: 56559 - DNA, 3056 bp, Homo Sapiens
ccgctactctggccctcagggttgtgtagtttccggggccacggcacctgggcacaccaggtggcgtcgcgcctttgctttcctgagccttctgagtaaggtaatgtggtgtccgtggggcgacgcctgcgcacaagaccgcgtcgggcctcacttttcccaggccttctgggtaatgtagtttccgggatcggcacccggcctgtgccagcttgcagagctcaccaggtgcagacccctgcggccagggcgaggacggatctgagcagctgggcagcaggtgccaccgcctgtgggacccagagggcttgaggacatctgcaatgctccagaagcccaagagcgtgaagctgcgggccctgcgcagcccgaggaagttcggcgtggctggccggagctgccaggaggtgctgcgcaagggctgtctccgcttccagctccctgagcgcggttcccggctgtgcctgtacgaggatggcacggagctgacggaagattacttccccagtgttcccgacaacgccgagctggtgctgctcaccttgggccaggcctggcagggctgtgagtggcaaggactttggagatgtgagcgacatcaggcgcttcctcagtgcatttcacgagccacaggtggggctcatccaggccgcccagcagctgctgtgtgatgagcaggccccacagaggcagaggctgctggctgacctcctgcacaacgtcagccagaacatcgcggccgagacccgggctgaggacccgccgtggtttgaaggcttggagtcccgatttcagagcaagtctggctatctgagatacagctgtgagagccggatccggagttacctgagggaggtgagctcctacccctccacggtgggtgcggaggctcaggaggaattcctgcgggtcctcggctccatgtgccagaggctccggtccatgcagtacaatggcagctacttcgacagaggagccaagggcggcagccgcctctgcacaccggaaggctggttctcctgccagggtccctttgacatggacagctgcttatcaagacactccatcaacccctacagtaacagggagagcaggatcctcttcagcacctggaacctggatcacataatagaaaagaaacgcaccatcattcctacactggtggaagcaattaaggaacaagatggaagagaagtggactgggagtatttttatggcctgctttttacctcagagaacctaaaactagtgcacattgtctgccataagaaaaccacccacaagctcaactgtgacccaagcagaatctacaaaccccagacaaggttgaagcggaagcagcctgtgcggaaacgccagtgacacgtacacaccacgtcctggtctttgtttgaggcctgacgtgggcatcattttaacaggtgccttttttgtttttttgtttttcgtttttttggtcactccagtagctcctggaaaaaaccttaaaaaatgtttcctccaaatctgatttcattacatttctgaattgttggggttttttttgttgttttgttttgttttgtagatggagtttcacttttgttgcccaggctggagtgtagtggcgcgatctcggctcagcctcccgagtagctgggattacaggcatgtgccaccacgcccggctaatgtttgtatttttagtagagacggggtttcaccatgttggtcaggctggtctcaaactcctgacctcaggtgatccgcccacctcagcctcccaaagtgctgggatgacaggtgtgagccactgcgcccagcctgaatcatttcttataccttctgacagcccaacttccagaggacagctctggggtactcgttggatgtctgtgagtacctggtcatacgggtcagtagggataagaattgtctctgggctgaggaattcttctgttctctggtttcaccagcgttgggtttgctcatgtaatgtggtcaccatactcaaatggtgtcatggctgaagttggccaccttgcttgagggacaagttgtttatgtatcagctctctgctgggtctccctttccatggcaaatgggcagctccatcctcttgactcttctaaatgcccaaaagaggtgtcatgctttgggggtacgatgtttatactccgtaaagaacatacaaggacattcactgctgatttttttttttgtttgtttgagacagggtctcactctgtcgctcaggctggagtgcagtgatgcaatcttggctcactgcaacctccgcctctcaggttcaagtggttctcctgcctcagcctcccaagtagctgggattacaggcacctaccaccagggccagctaatttttgtatgtttagtagaaacggggtttcaccatgttggccaggctgttctcgaactcctgacctcaggtgatctgcccgcctcggtctcccaaagtgctgggattacaggcatgagccactgcacctgacctgctgaattgtttataatggcaagaaataggaaaccccccaatgtctgttgaacagctatcacgttgaaccacgtgaaactgctgttttctaggccaaaaatggtgagcgatcatttatttcatgattcaacctgatacatttacatagtgcaaaactgtgtcacagtttcaggcttttatgaggaaagcgtttctgtgtagaaactggaagctgttcagggcatcggcagctgaaccctgctccgttggtcagcgttactatcatctcggatcatatggagctcatgtcagccgtgtgggtggcgggtgcacagagacggtctggaaggaaacacgcggatctgaacagcagtaatcctgggggatacgggggttgggctagattacagagggctcattttctacgtcatgtattttatgatacttgaattttttgaaatgggcatttattttataacatgttaaaatgtactttttaaattaagtcattttgtaatatttgaatttttacatttgttgtacaatcaggaaaagcaataaagatttttcaaaaatagaaaaaaa

SEQ ID NO: 56560 - DNA, 1355 bp, Homo Sapiens
gggaggcgtgagccaccgcgcctgtccaggaatcagttttttccaacaagtttttggactccactttgagaaatcctgacctgcactatgcctgaaacactccaaagggggtgctgatctggagacagatctgtcctgggacctgtttcagccctgtcagctcctggtggctgagttgaagggtgtggcccaaaaggcagggcaaagctagcttctgggttccttcagcccctgcaaggtttgggactctgtccacaggtccagacccagtacttattatgaactgttgggggtgcatcctggtgccagcactgaggaagttaaacgagctttcttctccaagtccaaagaggtacccgtacccctgaggtggggagggggagcaggaactttgagccagtgggggtgtgcttcaaattcccaggagtagaccagcatctctggtgggtgccacattttttcagccctcatagggagtggcaggtgctcaatggtaggggaaaggctgtgggcaggagccaggggtcctgtctgatgggctgggcttggttttcttgacctgcctgcctgctcttgagaaacctggaccagggcatatggtgaatgcagggggctggcaggtggggagggcttgaacacaggaggaagcaggagtccatgctctctggccttctgaggagtgggcaggcctgagtgagggtcactgaccaggcagggcctctgggtatgactggagccctggtgggtggatgtcatcagcatgggtcctggggagggacaggcaaagggagataaggggagtcctgccccaccccagctgcacccagaccgggaccctgggaacccaagcctgcacagccgctttgtggagctgagcgaggcataccgtgtgctcagccgtgagcagagccgccgcagctatgatgaccagctccgctcaggtagtcccccaaagtctccacgaaccacagtccatgacaagtctgcccaccaaacacacagctcctggacaccccccaacgcacagtactggtcccagtttcacagcgtgaggccacaggggccccagttgaggcagcagcaacacaaacaaaacaaacaagtgctggggtactgcctcctcctcatgctggcgggcatgggcctgcactacattgccttcaggtgatgcctgttctccccggggtgatgggcaaagggcaggagggtgggtgaattccagtgtggtcagccagtcctccacagcacctcgtggcccgtactcttgtgtctctcaagctaaaactgcttgaagttggtctctggacctctccttacttattaaaggcagcgctgcaccaaaaaaaaaaaaaaaa

SEQ ID NO: 56561 - DNA, 1261 bp, Homo Sapiens
gcagttatcatagagcacagtccctcacatcacacagctgcagagatgagtaaacaaagaggaaccttctcagaagtgagtctggcccaggacccaaagcggcagcaaaggaaacctaaaggcaataaaagctccatttcaggaaccgaacaggaaatattccaagtagaattaaatcttcaaaatccttccctgaatcatcaagggattgataaaatatatgactgccaaggtttactgccacctccagagaagctcactgccgaggtcctaggaatcatttgcattgtcctgatggccactgtgttaaaaacaatagttcttattcctttcctggagcagaacaattcttccccgaatacaagaacgcagaaagcacgtcattgtggccattgtcctgaggagtggattacatattccaacagttgttattacattggtaaggaaagaagaacttgggaagagagtttgctggcctgtacttcgaagaactccagtctgctttctatagataatgaagaagaaataaaatttctggccagcattttaccttcctcatggattggtgtgtttcgtaacagcagtcatcatccatgggtgacaataaatggtttggctttcaaacataagataaaagactcagataatgctgaacttaactgtgcagtgctacaagtaaatcgacttaaatcagcccagtgtggatcttcaatgatatatcattgtaagcataagctttagaagtaaagcatttgcgtttacagtgcatcagatacattttatatttcttaaaatagaaatattatgattgcataaatctgaaaatgaattatgttatttgctctaatacaaaaattctaaatcaattattgaaataggatgcacacaattactaaagtacagacatcctagcatttgtgtcgggctcattttgctcaacatggtatttgtggttttcagcctttctaaaagttgcatgttatgtgagtcagcttataggaagtaccaagaacagtcaaacccatggagacagaaagtagaatagtggttgccaatgtctcagggaggttgaaataggagatgaccactaattgatagaacgtttctttgtgtcgtgatgaaaactttctaaatttcagtaatggtgatggttgtaactttgcgaatatactaaacatcattgatttttaatcattttaagtgcatgaaatgtatgctttgtacatgacacttcaataaagctatccagaaaaaaaaaaaa

SEQ ID NO: 56562 - DNA, 4395 bp, Homo Sapiens
cggcgagaggatgcgcaaggtggagagccgcggggaagggggcagagaggaactgggaagtaacagccctccacagagaaactggaagggaattgctattgctctgctggtgattttagttgtatgctcactcatcactatgtcagtcatcctcttaaccccagatgaactcacaaattcgtcagaaaccagattgtctttggaagacctctttaggaaagactttgtgcttcacgatccagaggctcggtggatcaatgatacagatgtggtgtataaaagcgagaatggacatgtcattaaactgaatatagaaacaaatgctaccacattattattggaaaacacaacttttgtaaccttcaaagcatcaagacattcagtttcaccagatttaaaatatgtccttctggcatatgatgtcaaacagatttttcattattcgtatactgcttcatatgtgatttacaacatacacactagggaagtttgggagttaaatcctccagaagtagaggactccgtcttgcagtacgcggcctggggtgtccaagggcagcagctgatttatatttttgaaaataatatctactatcaacctgatataaagagcagttcattgcgactgacatcttctggaaaagaagaaataatttttaatgggattgctgactggttatatgaagaggaactcctgcattctcacatcgcccactggtggtcaccagatggagaaagacttgccttcctgatgataaatgactctttggtacccaccatggttatccctcggtttactggagcgttgtatcccaaaggaaagcagtatccgtatcctaaggcaggtcaagtgaacccaacaataaaattatatgttgtaaacctgtatggaccaactcacactttggagctcatgccacctgacagctttaaatcaagagaatactatatcactatggttaaatgggtaagcaataccaagactgtggtaagatggttaaaccgagctcagaacatctccatcctcacagtctgtgagaccactacaggtgcttgtagtaaaaaatatgagatgacatcagatacgtggctctctcagcagaatgaggagcccgtgttttctagagacggcagcaaattctttatgacagtgcctgttaagcaagggggacgtggagaatttcaccacatagctatgttcctcatccagagtaaaagtgagcaaattaccgtgcggcatctgacatcaggaaactgggaagtgataaagatcttggcatacgatgaaactactcaaaaaatttactttctgagcactgaatcttctcccagaggaaggcagctgtacagtgcttctactgaaggattattgaatcgccaatgcatttcatgtaatttcatgaaagaacaatgtacatattttgatgccagttttagtcccatgaatcaacatttcttattattctgtgaaggtccaagggtcccagtggtcagcctacatagtacggacaacccagcaaaatattttatattggaaagcaattctatgctgaaggaagctatcctgaagaagaagataggaaagccagaaattaaaatccttcatattgacgactatgaacttcctttacagttgtcccttcccaaagattttatggaccgaaaccagtatgctcttctgttaataatggatgaagaaccaggaggccagctggttacagataagttccatattgactgggattccgtactcattgacatggataatgtcattgtagcaagatttgatggcagaggaagtggattccagggtctgaaaattttgcaggagattcatcgaagattaggttcagtagaagtaaaggaccaaataacagctgtgaaatttttgctgaaactgccttacattgactccaaaagattaagcatttttggaaagggttatggtggctatattgcatcaatgatcttaaaatcagatgaaaagctttttaaatgtggatccgtggttgcacctatcacagacttgaaattgtatgcctcagctctctctgaaagataccttgggatgccatctaaggaagaaagcacttaccaggcagccagtgtgctacataatgttcatggcttgaaagaagaaaatatattaataattcatggaactgctgacacaaaagttcatttccaacactcagcagaattaatcaagcacctaataaaagctggagtgaattatactatgcaggtctacccagatgaaggtcataacgtatctgagaagagcaagtatcatctctacagcacaatcctcaaattcttcagtgattgtttgaaggaagaaatatctgtgctaccacaggaaccagaagaagatgaataatggactgtatttatacagaactgaagggaatattgaggctcaatgaaacctgacaaagagactgtaatattgtagttgctccagaatgtcaagggcagcttacggagatgtcactggagcagcacgctcagagacagtgaactagcatttgaatacacaagtccaagtctactgtgttgctaggggtgcagaacccgtttctttgtatgagagaggtcaaagggttggtttcctgggagaaattagttttgcattaaagtaggagtagtgcatgttttcttctgttatccccctgtttgttctgtaactagttgctctcattttaatttcactggccaccatcatctttgcatataatgcacaatctatcatctgtcctacagtccctgatctttcatggctgagctgcaatctaacactttactgtacctttataataagtgcaattctttcattgtctattattatgcttaagaaaatattcagttaataaaaaacagagtattttatgtaatttctgtttttaaaaagacattattaaatgggtcaaaggacatatagaaatgtggatttcagcaccttccaaagttcagccagttatcagtagatacaatatctttaaatgaacacacgagtgtatgtctcacaatatatatacacaagtgtgcatatacagttaatgaaactatctttaaatgttattcatgctataaagagtaaacgtttgatgaattagaagagatgctcttttccaagctataatggatgctttgtttaatgagccaaatatgatgaaacattttttccaattcaaattctagctattgctttcctataaatgtttgggttgtgtttggtattgtttttagtggttaatagttttccagttgcatttaattttttgaatatgataccttgtcacatgtaaattagatacttaaatattaaattatagtttctgataaagaaattttgttaacaatgcaatgccactgagtgctattttgctcttttggtggagaaggcttttttcaaaactcttggtccttttacttctttctctcagtgcagaatcaattctcattttcatcgtaaaagcaaatagctggattatttcatttgccagtttctatttagtattccatgcctgcccaattcatctgttactgtttaatttcaattcttctggtgagaattagaaatgaaatattttttattcattggccaaaaagttcacagacagcagtgtttgctatttactttgaattgaaggcacaaaatgcatcaattcctgtgctgtgttgacttgcagtagtaagtaactgagagcataaaataaacctgactgtatgaagtcaatttaagtgatgagaacatttaactttggtgactaaagtcagaatatcttctcacttcacttaagggatcttccagaagatatctaaaagtctgtaataagcttagaagttcagataaatctaggcaggatactgcatttttgtggttttaaaaaagtccttaggacagactgaattatcataacttatggcatcaggaggaaactttaaaatatcaaggaatcactcagtcaccctcctgttttgttgaaggatcaaccccaaattctgggtatttgagtacatgtgaatcatggatttggtattcaactttttccctggatgctttggaatcgtgtcttccatgctccactgggttcaatttaaaataggagaggctttctcttctgaaagatccattttaggtctttttcaagaatagtgaacacattttttaacaaaataagttgtaattttaaaaggaaagttttgcctattttattaagatggaaatttctttttaggctaatttgaaatccaactgaagctttttaaccaatattttaaatttgaaccactagagttttttatgatgcaaatgattatgttgtctgaaaggtgtggttttattgaatgtctatttgagtatcatttaaaaagtatttgccttttactgtc

SEQ ID NO: 56563 - DNA, 1461 bp, Homo Sapiens
gggggcttccccaccggcaatggagcggttgacgttgcctctcggcggcgcggcggcggtggacgagtacctggagcaccggagaattgttggtgaggatgatggagggaaactttttactcctgaagaatatgaagaatacaaaagaaaagttttacctctgcgcttacaaaacagattatttgtgagctggcggtcaccaacagggatggattgtaaacttgtgggcccagagacactgtgtttttgtacacataggtataaacaacataaaactgacttggaagcgattcctcagcagtgccccattgatctgccctgccaagtgactggctgccagtgcagggcttacctttatgtccccttgaatggtagccagcccattcgctgcaggtgcaaacgctttgctgatcagcacagtgctgcgcctggctttacatgcaatacatgttccaagtgttcaggattccatagctgcttcacttgtgcttgtggtcagcctgcatatgcccatgacacagtagtggaaactaagcaagaaagattggctcaggaaaaaccagtgggacaggacattccttatgcagccatgggaggattaactggtttcagctcgctggcggaaggctacatgcggttagatgacagtgggattggtgtaccttcagttgaatttttagaatctcccattacggcagtagacagcccattcctaaaagcatttcaagcatcatctagttcttctccagaaacgttaacagatgtaggtacaagtagtcaagtttcttcattaaggagacctgaagaggatgatatggctttctttgaaagacgataccaggaaaggatgaaaatggaaaaggctgctaagtggaaaggaaaagctccattgccatcagctacaaaaccttcatgaagactattggagaaattaaaaccatcatccaagtatctttttcatgtttatttaaatgtaataatacagtttatttttcctgaaattatttactttttttttttactgtataaatgtcttttgggatgtttccttaatttatttaaataactaaaaatgtctattacttttgtcaaaactcataatttactactttgtatgtacctttctttctcctgacaaatgaggttattttatatgagtctgtctgagagtacagtaaatgttttagtacataataatttaactgtttcaggtatttaaaaaattaaagatattatcaagggttttggacaaacatatgagccatttttttgtcattcaaaatagtaagttaaaaacaagagaacaaaagaaaaaaatagttaaaatcattaatttttttatttttcaaactttgtaatgttatgttttcaaataaaaactatctcaaaattttacaaccaaaaaaaaaaaaaaaaaaaaaaaaaaaaaacaaaaaaaaaaaaaaaaaaaaaaaaaaaaaa

SEQ ID NO: 56564 - DNA, 3495 bp, Homo Sapiens
ccagtctgcggaccgttcggagcaacgtggcggcccttgcccgccagcaatgcctaggagcagccaagcagggacccgtcggaaacccttcatccagcctttctctggcgcatggagaacctgggggtcggcgaaggggcagaggcttgcagcaggttgagtcgctctcgcggccgccacagcatgaccagagccccgaagcacctgtggcggcaaccccggcgccccatccgcatccaacagcgcttctattcggatccggacaagtccgcgggctgccgcgagagggacctgagcccgcggccggagctcaggaagtcgcggctctcctggcccgtttcctcctgcaggcgctttgacctggaaaatgggctctcgtgtgggaggagggccctggaccctcagtccagccctggcctgggccggattatgcaggctccagtcccgcacagccagcggcgcgagtccttcctgtaccgctcagatagcgactatgaactctcgcccaaggccatgtctcggaactcctctgtggccagcgacctacatggagaggacatgattgtgacgccctttgcccaggtcctggccagtctgcggaccgttcggagcaacgtggcggcccttgcccgccagcaatgcctaggagcagccaagcagggacccgtcggaaacccttcatccagcaatcagctccctcctgcagaggacacggggcagaagctggcattggagacgctagacgagctggactggtgcctggatcagttggagacgctgcagacccggcactcggtgggggagatggcctccaacaagttcaagcggatcctgaaccgggagttgacccacctgtccgaaaccagccgctccgggaaccaggtgtccgagtacatctcccggaccttcctggaccagcagaccgaggtggagctgcccaaggtgaccgctgaggaggccccacagcccatgtcccggatcagtggcctacatgggctctgccacagtgccagcctctcctcagccactgtcccacgctttggggtccagactgaccaggaggagcaactggccaaggagctagaagacaccaacaagtggggacttgatgtgttcaaggtggcggacgtaagtgggaaccggcccctcacagctatcatattcagcatttttcaggagcgggacctgctgaagacattccagatcccagcagacacactggccacctacctgctgatgctggagggtcactaccacgccaatgtggcctaccacaacagcctacatgccgccgacgtggcccagtccacgcatgtgctgctggctacgcccgccctcgaggctgtgttcacagacttggaaatcctggctgccctctttgcaagcgccatccacgacgtggaccatcctggggtctccaaccagtttctgattaacaccaactcagacgtggcgcttatgtacaacgacgcctcggtgctggagaaccatcacctggctgtgggcttcaagctgctgcaggcagagaactgcgatatcttccagaacctcagcgccaagcagcgactgagtctgcgcaggatggtcattgacatggtgctggccacagacatgtccaaacacatgaacctcctggccgacctcaagaccatggtggagaccaagaaggtgacaagcctcggtgtcctcctcctggacaactattccgaccgaatccaggtcttgcagaacctggtgcactgtgctgatctgagcaaccccaccaagccgctgcccctgtaccgccagtggacggaccgcatcatggccgagttcttccagcagggagaccgcgagcgtgagtcgggcctggacatcagtcccatgtgtgacaagcatacggcctcagtggagaagtcccaggtgggtttcattgactacattgctcacccactgtgggagacttgggctgacctggtccacccagatgcacaggacctgctggacacgctggaggacaatcgagagtggtaccagagcaagatcccccgaagtccctcagacctcaccaaccccgagcgggacgggcctgacagattccagtttgaactgactctggaggaggcagaggaagaggatgaggaggaagaagaggagggggaagagacagctttagccaaagaggccttggagttgcctgacactgaactcctgtcccctgaagccggcccagaccctggggacttacccctcgacaaccagaggacttagggccagccctgcgtgaactgcaggggcaatggatggtaaagccctttggctcttggcaggcagactttccaggaagaggctccatgtggctcctgcttcactttcccacccatttagggagacaatcaagctcttagttataggtggctcccagggtctaattggaggcacctggctggggtccactctgaccctagacttgcctaaaagagctctctaaggggcagcctcttacgatgccctggtgtctttctcctgggcttctatccctgtgaggagaggtgctgtctgctggagcctctagtccaccctctccagtggtcactcttgagtcacatctgtcacttaattatttccttctttatcaaatatttattgctcatctacttcgggccagctttctgcctctgtagtagccctgcacaaagggtggggagtcaggagaccatcccaaaggcatctccctgtcttcctctaccaagcggctctctgcaagagcatggaaatgtgagtggggaaaattttcagcaccaaagcttcactcatacccagttttgtttctgaaactacggtagggggcaggaagaggagcagaaaagaagggctgggcaaggcatagtggcttatgcctgtaatcccggtactttgggaggctgaggtgggaggactgcttaagctcaggagtttgagaccagcctgggcaacatagcaagacccccaccatctctgaaaaaaaaaattagccaggcatggtggtgtgcacctgagaatcccagctactcagaaggttgagacaaaggggatcgcttgagcccaggagttggaggctgaagagagctatgactgcatcactgcactccagcctgggcaacacagcaagatcctgtctaaaaataaaaagaaaagagaaggaaaggaaagagacggggctctgaggccgagcacagtggcccatgcctataatcccagcactttgggaggctgaggcaggtggatcacctgaggttaggagttcgagaccagcctggccaacatggtgaaaccccatctctactaaaaatacaaaaattggctgggcatggtggcgggtgcctgtaatcccagctactggggaggctgaggcaggagaatcacttgaattcaggaggtggaggttgcagtgagccgacatcatgccactgcactccagcctggggctgacagagcaagacactgtctcaaaaaagaaaaaaaaaaaaaaaaaaa

SEQ ID NO: 56565 - DNA, 2743 bp, Homo Sapiens
ggaccccgcaggtgcttgggggcgtagcctggagtgagggtttggctggtgtagcttggagtgaggccccctggcgtggagtcttgaggcctgctgagggcgtgagctggcatgaggcgaagagagggccatggcaccgactccgagatgggtcaaggacccgtacgggagtcgcaatcctcagaccctcccgcgctccagttccggataagcgagtataagccgctgaacatggcgggagtggagcagcccccgagccccgagctgcggcaggaaggcgtgaccgaatacgaagatggcggggccccggcgggagatggcgaggcgggcccccaacaggcggaggaccacccccagaatcctccagaagatcccaatcaggaccccccagaggatgatagcacctgtcagtgccaggcgtgcgggcctcaccaagccgcgggtccagatcttggttcctctaatgatggctgccctcagctgttccaggagcggtcagtcatagtggagaactcctcaggctctaccagcgcttctgagctcctcaaacccatgaagaagaggaagcgcagggaataccagagcccatcagaggaggagtcggagccagaggccatggagaagcaagaagaaggaaaggacccagagggacaacccactgctagcaccccagagagtgaggagtggagcagcagccagcctgcaacaggtgagaagaaggaatgctggtcgtgggagtcctacctagaggagcagaaggccattactgctccagtcagcctcttccaggactcccaggcagtcactcacaacaagaatggcttcaaactgggcatgaagttggaaggcattgaccctcaacacccgtccatgtacttcatcctcaccgtggctgaggtatgtggctatcgcctacgcctgcactttgatgggtattctgagtgccatgacttctgggtcaatgccaactcccctgacattcaccctgctggctggttcgagaagacgggccacaagctgcagcctcccaaaggttacaaggaggaggagttcagctggagccagtacctgcgcagcacaagagctcaggctgcccccaagcacctgtttgtgagccagagccacagtcccccacccctgggcttccaggtgggcatgaagctggaggctgttgaccgcatgaacccgtcccttgtctgcgtggccagtgtgaccgatgtggtggacagccgcttcctggtgcactttgacaactgggatgatacttatgactactggtgtgatcccagcagcccctacatccacccagtgggctggtgccagaagcaaggaaagcccctcacccctccacaagactacccagaccctgataacttctgttgggagaaatatctggaagaaactggggcctctgctgtccccacctgggccttcaaggtgcgaccccctcacagcttcctggtcaatatgaagctggaggctgtggaccgcaggaacccagccctgattcgcgtggccagcgtggaggatgtggaggaccatcggataaagatccactttgatggctggagtcatggctatgatttctggatcgacgctgaccacccagacatccaccctgccggctggtgctccaagacaggacatcccctgcagcctcctctcggacccagagagcccagctctgcctcccctgggggctgtccccctctcagctataggagcctgccccacactaggacctccaaatacagctttcaccaccggaagtgccccactcctggttgcgacggctctggccatgtcacaggcaagttcacagctcaccattgcctctcaggctgcccactggctgagaggaaccagagccggctgaaagcggagctgtctgacccggaggcctcagcccgcaagaagaacctctcaggcttctccccaaggaagaagcctcgccatcacggccgaattggacgccctccgaagtatcgaaagattccgcaggaagatttccagaccctcacgcccgatgtcgtgcaccagtccctcttcatgtcagccctgtcggcccaccctgaccgctcactctcagtgtgctgggagcagcactgcaagctcctgccaggagtagcgggcatctcagcctcgacagtcgccaagtggaccatcgatgaggtcttcggctttgttcagaccctgacaggttgtgaggaccaagcacgcctcttcaaagacgaggtaaggtgcaagtgcagagtgggagacagagccggggtcactgtccttaagacggcaggaagcaggtgccctccccagcgtcacttctgctaaggagggacccgtgttgccccaccaggtaaggtgcaagtgcagagtgggagacagagccggggtcactgtccttaagacggcaggaagcaggtgccctccccagcgtcacttctgctaaggagggacccgtgttgccccaccaggcaagaatagtcagagtgacccatgtatctgggaagactctagtctggactgtggcccagcttggggaccttgtgtgctcagatcatcttcaggaaggaaaaggcatcctggagacaggagtccattcactcctctgctctctacccactcatttgcttgccaaacttagctttgccagtgatagtcaatattaaagtgtacttttttcccctttaatccaatatagttgataattaaagtgtattttgaatgacaaaaaaaaaaaaaaaaa

SEQ ID NO: 56566 - DNA, 3388 bp, Homo Sapiens
gtttgttaccgttttaatcctattaattaaaacgttaacctgattgggtagaaagcgctgtcccaacaggcgagtcttcttcataataacctactcagagataatgatgtaaaagactcccccgtctgtggcggcggctgtttgatgggtccggaaatctcttgaaggtgaatccaagcaagataaacggtgcggagaggaggcgcggggctgggctcagagcggcggcggcggcggctccactccctccgcgcccaccctcccaccatgcggggccgcggcccatggtgagccccagcagccagcaccatcggctggagacgaagaagaagaagaagaggaggcggcgagcgcgggggaaggcgaaaaagaaaaagaaagaaggggagagggctcccggcagcaccaggaccgacgcgcgcaccagctccggagcccagctcgcgcgcgtctgtggggccgcctgactccggggccgaggcggcggcggcggcagcgggcgcggcggcccgggctgcgcgccggcgcgggaccatggagcgcgggatgcacctcggtgcagcggccgccggcgaggacgacctcttcctgcacaagagcctgagcgcctccacctccaagcgcttggaagcggctttccgctccacgcccccgggcatggacctgtccctggcgccgccgcctcgggaacgcccggcgtcctcctcctcgtcgcccctgggctgcttcgagccggctgaccccgagggggcagggctgctgttgccgccgcctggaggaggcggcggcggcagcgcgggaagtggcggcggcggcggcggcggggtgggtgtccccgggctgctagtaggttcagccggcgttgggggcgaccctagcctaagcagcctgccggccggggccgccctttgcctcaagtacggcgaaagcgcgagccggggctcggtggccgagagcagcggcggcgagcagagccccgacgacgacagcgacggtcgctgcgagctcgtgctgcgggccggagtagccgacccgcgggcctccccgggagcgggaggtggtggcgcgaaggcagccgagggctgctccaatgcccacctccacggcggcgccagcgtccccccggggggcctgggcggcggcggcggcgggggtagcagcagcggtagcagtggcggcggtggcggtagcggtagcggcagcggcggcagcagcagcagcagcagcagcagcagcaagaaatccaaagagcaaaaggcgctgcggcttaacatcaatgcccgagagcgccggcggatgcacgacctgaacgacgcgctggacgagctgcgcgcggtgatcccctacgcgcacagcccctcggtgcgaaagctctccaagatcgccacgctgctgctcgccaagaactacatcctcatgcaggcgcaggccctggaggagatgcggcgcctagtcgcctacctcaaccagggccaggccatctcggctgcctccctgcccagctcggcggctgcagcggcagcagctgctgccctgcacccggcgctcggcgcctacgagcaggcagccggctacccgttcagcgccggactgcccccggctgcctcctgcccggagaagtgcgccctgtttaacagcgtctcctccagcctctgcaaacagtgcacggagaagccttaaacacacccccgaaaaacacaagaccgacccaaaatctagaggaaagcgaaaagctgctccccaccccctttattttggtcctctcgtagttgtgaaacacttgcagagcaaacaaagcagaggcaagaactgaggagaagtatcagagacaaacgggacttttagccttgacatccccagaatctcggtctttggggtggggagggagggaggagggaggtggagttgggatggagtatggatgtcttttttttctcagaaaagtggcaactttggtggcagcctagaccgcgaggaagtggaatcttccttaaaggtgaaacataagttgagaagtagtgcttggttattaagcctggagagtgtttgaatggcaaaatactaatcctactaataattgtggatttggctagtgctgagggggagaggaggggttaggggttgggtagcatgagagatggaatattcattcagacaaatcagaaagggcacttgaaaataaattttgattctgagccaggagaaaaacttgaaatgttgacttaagtgagggggaaataaaacccagagagagagagagagcgagagagagagacatgttactatgaaagacttgtattttttattgtctctgaactttaatcctgtgaaaatgctcaaagttttggcgagagtgatataaaaaaactgactgtggctgaaagaattgcatttaaaaatatttatgtgcaccttgttactttctactctgcaatgatgtattaacaattcatggtatttatttgttattcttcaatgacccttccacatcaacagtatttatcatgtgttaaagtcatgggtcttatgtgcagatttttttaatgcctctaaaattgttttatagattacttatgctgtgtgccaagtgtttaaaggtttatttgccaacaagtatgaagagaaatattgatgtatctgagctgcttaggtttatgaaaggtcacctggatattttcagttgcatcatccctgtatttaaattgagctttaataaattgcttcagtccaaaaattacaggaaaggtgtattcttaattgatgaatgaattgatctcttttttgaaaggggactcctttacattccaaaagggaaaaacatcacagcaatagttgctatacgtaagaacatgctaagcaaatatttttccaggctgtgctgtgcatttttaaaaggtctaatttaattgcttttaatatatatgtacatatatgttattttaactgtggagaattatttaagttaaaagactggtttgatttgcctatggtgtgaaatcctttgttatttttctaaaaaaataaaatttaaaaagaaagaaaactaaggaagaacaagaagctatttacccaaagtgagctttcagttttagttttgcatggctgtttgactgcctttccgccctatgaaaatcaagaaaatcttttttaaaaatggagtcctgctattttccactccttgcagataatacaaattcagtttgtcaggttggatggtgagttgggagctgtgatggatctgttggcgggttttggatgtgtaaagaatgatatatatattaaataggtcaatcagactatgacagctatgtacgaccatttgtatgtgtatctatgtcagaaagaatctttattaaaatattttgatcaaacaaaaaaaaaaaaaaaa

SEQ ID NO: 56567 - DNA, 2649 bp, Homo Sapiens
ttcagcgctctgtgtcctctgctcctagaggtccaggctctgtggccctgtgacctgcaggtattgggagatctacagctaagacgccaggaacccctggaagcctagaaatggagaacctgaagtctggagtgtatcctctcaaggaagcaagtggatgccctggggctgacaggaatcttctggtgtactctttttatgaaaaggggccattgacatttagggatgtggccatagaattttctctggaggagtggcaatgcctggacactgctcagcaggatttgtatagaaaagtgatgttagagaactacagaaacctggtcttcttggcaggtattgctgtttctaagccagacctgatcacctgtctagagcaaggaaaagagccctggaatatgaagagacatgcgatggtagatcaacccccagttacatattctcattttgcccaagacctttggccagagcagggcataaaagattctttccaagaagtcatattgagaagatatggaaaatgtggacatgaagatttacagttaagaacaggctgtagaagtgtggatgagtgtaatctgcacaaagaatgttatgatgaactaaaccagtgtttgacaactacccagagtgaaatatttcaatatgataaatatgtgaatgtcttttataaattttcaaatccaaatatacaaaagataagacatactggaaagaagcctttcaaatgtaaaaaatgtgacaaatcgttttgcatgcttttacacctaactcaacataaaagaattcatattagggaaaattcttaccaatgtgaagaatgtggtaaagtctttaactggttctcaacccttactagacacagaagaattcatactggagagaaaccctacaaatgtgaacaatgtggcaaagcttttaagcagtcctcaacccttactacacataagataattcatactggagagaaaccctacagatgtgaagaatgtggcaaaacctttaaccggtcctcacaccttactacacataaaagaattcatactggagagaaaccctacagatgtgaagaatgtggcagagcttttaaccggtcctcacaccttactacacataagattattcatactggagagaaaccctacaaatgtgaagaatgtggcaaagcttttaaccaatcctcaacccttactacacataagataattcatgctggagagaaaccttacaaatgtgaagaatgtggcaaagctttttaccgattctcataccttactaaacataagataattcatactggagagaaattctacaaatgtgaagaatgtggcaaaggctttaattggtcctcgacccttactaaacataaaagaattcatactggagagaaaccctacaaatgtgaacaatgtggcaaagcttttaatgagtcctcaaaccttactgcacataagataattcatactggagagaaaccctacaaatgtgaagaatgtggcaaagcctttaaccggtccccaaaacttactgcacataaggtaattcattctggagagaaaccctacaaatgtgaagaatgtggcaaagcttttaaccaattctcaaaccttactaaacataagataactcatattggagatacatcttacaaatacctagaatgtgataaagcctttagccagtcttcaactcttactaaacataaggtaattcatactggagagaaaccctacaactgtgaagaatacggcaaagctttcaaccagtcctcaaaccttattgaacaaagtaattcatactggagagaaaccctacaaatgtgaagattgtggcaaagcctctaacccgtcctgaattcttactaaacataagaacattcatactgaagaggaaccctatgagtgtgaagaatatggcaaagccttcaacaagtcctcaattcttaccagacataagataattctggctgggtgcggtggctcacacctgtaatcccagcactttgggaggctgagacgggtgaattacatgaggttgggagttcgagaccagcctgaccaacatggtgaaatcctgtctctactaaaaatacaaaattagccatgcgtagtggtgcatgcctgtaatcccagctactcgggaggctgaggcaggagaattgcttgaacccgggaggcagaggttgaagtgagctgagatcgcgccattgcactccagcctgggcaacaagagtggcactccatctcagaaaaaaaaaaaaaagataattcatactgaaaagaaactctacaaacttgaaagatgtgacagtgcttttgacaacacctaaaacttttaaacataaaaaatcatactggtgagaaatcctagaaatgtaaagaatgtgacaaggcctttaaatggttgtcacacttcattataggtaagatagttcatactgaagaaaacttctacaagtgtgaacagtgtggcaaaacttttaatgaatgctcacaccttattgcacaggagagcatttatacttgaaaaaaaatgtacaaatataaagaccatgaaaaagccattaatatctattcacatcttaccactggagagttcatacttaataaaaggaatataagtgcaattactgtcaaaagatctttcaga

SEQ ID NO: 56568 - DNA, 2882 bp, Homo Sapiens
tagaagcaggcaagttgggtaacggctctcggcaaagttcgagaagtgcctatggccatgagtgagctgggcactcggaagcccagcgatggcactgtttctcatctgctcaatgtggtggagagtgagcttcaggcagggagggaaaaaggcgaccctacggagaagcaacttcagatcatcctggaggatgcacctctctggcagagattcaaggaagtcactaatgagatgattgtgaccaagaatggcagacggatgtttccagtcctaaagattagtgtcacagggttggaccccaatgccatgtactccctcctgctggactttgtccctacggacagtcaccgctggaagtacgtcaacggggaatgggtgcccgctggcaagccagaggtctccagccacagctgcgtctacattcacccggactcccccaactttggggcccactggatgaaagctcccatctccttcagcaaagtgaagctgaccaacaagctcaatggaggcgggcagataatgttgaattctctgcataaatatgaaccccaggttcacatagtgcgtgttggaagtgcccatcgaatggtaacaaactgctccttccctgaaacccagttcatagccgtgactgcctatcagaatgaggagataacggctctcaaaatcaagtacaatccttttgccaaagccttcttggatgccaaggaaagaaatcacctaagagacgtaccggaggctatctctgagagccagcatgtgacctattctcacttgggaggctggatcttttccaatccagatggagtgtgcacagcaggaaactccaattaccagtatgccgctcctctgcctctgcctgctccccacacccaccatggctgtgagcactattcgggtctccgaggacaccggcaggctccctacccttctgcgtacatgcacagaaaccattctccctcagtgaatttgatagaaagctcaagcaataatctgcaagttttctcgggacctgacagctggacttccttatcctccacaccccatgccagcatcctgtctgtaccccacaccaacggaccaatcaatccagggcccagcccctacccgtgcctgtggaccatcagcaatggtgccggaggccccagtgggccaggcccggaggtgcacgccagcaccccaggagcatttctcctcggaaacccagctgtgacttcacccccttctgtgctctccacccaagcacccacttcggctggtgtggaggttctgggggagccctcgctaaccagcattgctgtgtccacctggacagcagtggcctcgcatcccttcgcgggctggggtggcccaggagcgggtgggcaccattctccttcctcactggatggttaagcaggatcctaggagcctctttgcacagcgatccttccatgtgtagagtgcttagaaaccccatcaactgatctagtgagtcagactgtggaatctcccttcccactagctggaggtggaggtgggttattacagaagtcatactgggagagggttcagtttggatgatgctagttagatcatttgcatctctccaccattttcttctgcactcccattttctctgcagcttattcttgccatgcttaggtgacagaagtttgttaagtaccatccttgtgccctgcctcttattctcaaatcgttctggaaagcctcacttccttttctgtggagaaggtgcaaagctgttaaatgagctcagagtttacctagctaaggccactgcttcctgctttgtgaagcctggaaagtatgtgtggccacagggctcaggttcacacttctgctttgagaccaggatggggtgtaagccatagagtaaggttaacaaaaagaataaagctaatcatgtattacaaacagcagtgtgcccagacttgtggaaatgaagtcatgtcactcctctgctcagaaaccttcaatggttcaccattaccagtggaatgaagtcaattctcctcactataactgggtgtggtagtttaagcctataatctcagcccttttggaggccaaggtaagaggatcgcttgaggtcaggagttcgagaccagcttgtgcaacaaagtgagagcctgtctctacaaaaaatagtcatgcacacaaaattagctgggcatggtggcctgtgcctatagtcccaactacttagaggaggatcgcttgatctcaggaggttgaggctgcagtgaattatgattgtggcattgcactccagcctgggtggtagatcaaggctttgtttcatttgaaaaaaaagaaagaaagaaagaaagaaaggaatcctactacgagcgatcacaccatctggcctgaaaccacttccccagcttaggtccctctgttatcctgttggcctcctatgtattggtcaaggcaggcatctctgttctctgaacattcattgcactttcccacctctataccttgcctgtgccttagtgtcctcttttttccagttcacctgtgcgaatccgacccacctcccagagcctggctgaaacgtcactccctgcatccaacatctgatctgctgagatatgtctgatctatctctgctcgctgttctcccgttgtttttgcctctgccatagagctcacctcattttgccttgtatttttgttacctgtgagtgtgtctctccctattagactgtaagcctctcgagggtgaggcctagccttcttgtctttgtaacccacagcagctggtactgtgccttgcctattgtaggtgcccaataaacatttgctgaactgaaaaaaaaaaaaaaaaaaaaaaaaaaaaaaaaaaaaaaaaaaaaaaaaaaaaaaaaaaaaaa

SEQ ID NO: 56569 - DNA, 4293 bp, Homo Sapiens
ggctgagccggaccgagccgagaggacccgagtggggccgaggccagtagccccggggccctgagcagaggccgtagcttgcgccgcacccgcggccaggcggagccaaagatgccggcctctgctgcgcggccccgcccgggtcccgggcagcctacagcctcgcccttcccgctactgctgctggcggtgctgagcggcccggtatccggccgcgtcccccgctcggtgcccagaacctcgcttccaatctctgaggctgactcctgtctcacccggttcgcagtccctcacacatacaattactctgttctccttgtggatcctgcctcccacacactttatgttggcgcccgggacaccatcttcgctttatccctgcccttctcaggggagagaccccgcaggattgactggatggttcctgaggctcacagacagaactgtaggaagaaaggcaagaaagaggacgaatgtcacaattttgtccagattctcgccattgccaatgcctctcacctcctcacttgtggcaccttcgcttttgatccgaagtgcggggttattgatgtgtccaggttccagcaggttgaaagacttgagagtggccgggggaaatgtccttttgagccagctcagcggtcagcagctgtaatggctgggggggtcctctatgctgccactgtgaaaaactacctggggacggagccaattatcaccagagcagtgggtcgtgccgaggactggattcggacagataccttgccttcctggctgaacgccccagcctttgtcgcagccgtggccttgagcccagccgaatggggggatgaagatggagacgacgaaatctacttcttctttacggagacttcccgagcatttgactcatacgagcgcattaaagtcccacgggtggcccgtgtgtgtgcgggggacctcgggggccggaagaccctccagcagagatggacgacgtttttgaaagctgacctgctctgtccagggcctgagcatggccgggcctccagtgtcctgcaggatgttgctgtgcttcgacctgagcttggggcagggactcccatcttttatggcatcttttcttcccagtgggagggggctactatctctgctgtctgtgccttccgaccacaagacattcggacagtgctgaatggtcccttcagagaactaaaacatgactgcaacagaggactgcctgtcgtggacaatgatgtgccccagcccagacctggagagtgcatcaccaacaacatgaagctccggcactttggctcatctctctccctgcctgaccgcgtactcaccttcatccgggaccacccactcatggacaggccagtgtttccagctgatggccaccccctgctggtcactacagatacagcctatctcagagtcgtggcccacagggtgaccagcctctcagggaaagagtatgatgtgctctacctggggacagaggatggacacctccaccgagcagtgcggatcggagctcagctcagcgttcttgaagatctggccttattcccagagccacagccagttgagaacatgaaattgtaccacagctggctcctggttggctcccgtactgaggtgacacaagtgaatacaaccaactgtggccgtctccagagctgctcagagtgcatcctggcccaggacccagtctgtgcctggagcttccggctggatgagtgtgtggcccatgccggggagcaccgagggttggtccaagacatagagtcagcagatgtctcctctttgtgtcctaaagagcctggagaacgtccagtagtgtttgaagttcccgtggctacagctgcgcatgtggtcttgccatgttctccaagctcagcatgggcatcctgtgtgtggcaccagcccagtggagtgactgcactcaccccccggcgggatggactggaggtggtggtgaccccaggggccatgggcgcttatgcctgtgaatgtcaggagggtggggcagcccatgtggtagcagcttacagcttggtatggggcagccagcgagatgctccgagccgggcccacacagtgggggcgggactggctggcttcttcttggggattctcgcagcatccctgactctcattctgattggtcggcgtcagcagcgacggcgacagagggaacttctggctagagacaaggtgggcctggacctgggggctccaccttctgggaccacaagctacagccaagaccctccctccccctctcctgaagatgagcggttgccgctggccctggccaagaggggcagtggctttggtggattctcaccacccttcctgcttgatccttgcccaagcccagcccacattcggctaactggggctcctctagccacatgtgatgaaacatccatctagagctgggcaaatgaccactagtgtataagtgatcactggaacggagtgaccactgagatgctgggggtcactgggcctggaagaccatcccagcctctgagttctctttgagtatgagtgattacttggattttagtatctgttctctctgagcctggatgggcttggggccagacctttgcctgattcctgattcccatgagaaatcagaactgctttctgcagcaaatcagggcttccccctaacatctgaactcctgtaaaccttcatccctggccccctatcttgggcccattagttttggggatggggcacagggcatagctatgactttgctttctggttggagcctggccggaaggaagagccctggaggtggttgggggcaaatgtgccctgagtccttggggtggttctgcttattcttcaagtttatctgaatctgtggggagtgcatgatccccatgttgcaatatggagtctctgccctgagatcttccccatctcagttttccttccatgaaagagtacgtgtaaatacatagtgttcataagagacctggccacatgtgcatgaatgactgggccgatgcttaggaatatttatgagggatggggagggagacaattggaatgggggcgttgcctgcagaactttagaccctgtagccatagagggaatggcgttcctttctaaaaggaactgaaacactgcccctctccccattgccccacaaccttactctaaatttgagtagagaaaagctcctaaagtgaccttccgggtgggaagggcagcagtacacatgaccccatccttttctttgtttttaccccctggctgccaccactgccatgtcacagctgctttctctggctggagtgtaggctgtaccccatttccttggctcccattaaaaatcaacaacattctaatgattagggaacaacagaaggggaacagtcataggatatacgagcagtataaagatacgtttgcaatcagtgactactcagggtgacacccttgccctaaagcaggagtcccccctacctggggtccatggactccctgaaattgtatgcaaaatgttgtttgtacatgtgtgtctgtatgtctctgtggggaggttttatggcttttgtcagattttcaaggccttaacaaagttaaaggaccactgccctgaggttactgcactgaggccaagttaggatggcatcactctgtggcagctctccctggacttgccctgcctggaacagggtgatttgctggaatggagttaccactgagatgccaaaggttgctgggtctggaagactgttgtggcctctcagttctctttgagtctgactgactgtggccagtccctggactggtagctgctggaggccttcttgtttctccagtccctggaagctgagctctatgtgtatttgatgacattgtcagctcttaccaaacgtcaagacctcttcctgcttgaccactcgcacatggctctaggcttctcctgctgagtcctggtcttggcctgtgaatgtgcctcgttcatccctggtgcttgagcccctcaagctccagtcaatgatccagtccttcccctttgaagttttctgctctactttccttggcagcagcctgtgaactactcaaaagagtccccttgggtttggaattatcagtggctttgccactagtaaatgtgtgatcttcggcaagtaacctaacctagggacatcagtttactcatctgcgaagtggggataataaaacctacctcagggttgcttcaaggattaaatgagaaaatatgtcaacaataaagacctgtctgtaccaatgaaaaaaaaaaaaaaaaaaa

SEQ ID NO: 56570 - DNA, 1869 bp, Homo Sapiens
ggggagggtggggatgggaggggagagacagaagttgagggcatctctctcttccttcccgaccctctggcccccaaggggcaggaggaatgcaggagcaggagttgagcttgggagctgcagatgcctccgcccctcctctctcccaggctcttcctcctgcccccttcttgcaactctccttaattttgtttggcttttggatgattataattatttttatttttgaatttatataaagtatatgtgtgtgtgtgtggagctgagacaggctcggcagcggcacagaatgagggaagacgagaaagagagtgggagagagagaggcagagagggagagagggagagtgacagcagcgctcggacgtcctccccaacgtcgccctcaattccaccgcctatgatccagtgaggcatttctcgacctatggagcggccgttgcccagaaccggatctactcgactcccttttattcgccacaggagaatgtcgtgttcagttccagccgggggccgtatgactatggatctaattccttttaccaggagaaagacatgctctcaaactgcagacaaaacaccttaggacataacacacagacctcaatcgctcaggattttagttctgagcagggcaggactgcgccccaggaccagaaagccagtatccagatttacccctggatgcagcgaatgaattcgcacagtggggtcggctacggagcggaccggaggcgcggccgccagatctactcgcggtaccagaccctggaactggagaaggaatttcacttcaatcgctacctaacgcggcgccggcgcatcgagatcgccaacgcgctttgcctgaccgagcgacagatcaaaatctggttccagaaccgccggatgaagtggaaaaaagaatctaatctcacatccactctctcggggggcggcggaggggccaccgccgacagcctgggcggaaaagaggaaaagcgggaagagacagaagaggagaagcagaaagagtgaccaggactgtccctgccacccctctctccctttctccctcgctccccaccaactctcccctaatcacacactctgtatttatcactggcacaattgatgtgttttgattccctaaaacaaaattagggagtcaaacgtggacctgaaagtcagctctggaccccctccctcaccgcacaactctctttcaccacgcgcctcctcctcctcgctcccttgctagctcgttctcggcttgtctacaggcccttttccccgtccaggccttgggggctcggaccctgaactcagactctacagattgccctccaagtgaggacttggctcccccactccttcgacgcccccacccccgccccccgtgcagagagccggctcctgggcctgctggggcctctgctccagggcctcagggcccggcctggcagccggggagggccggaggcccaaggagggcgcgccttggccccacaccaacccccagggcctccccgcagtccctgcctagcccctctgccccagcaaatgcccagcccaggcaaattgtatttaaagaatcctgggggtcattatggcattttacaaactgtgaccgtttctgtgtgaagatttttagctgtatttgtggtctctgtatttatatttatgtttagcaccgtcagtgttcctatccaatttcaaaaaaggaaaaaaaagagggaaaattacaaaaagagagaaaaaaagtgaatgacgtttgtttagccagtaggagaaaataaataaataaataaatcccttcgtgttaccctcctgtataaatccaacctctgggtccgttctcgaatatttaataaaactgatattattttt

SEQ ID NO: 56571 - DNA, 1789 bp, Homo Sapiens
tcgatgctccacgtaggagctggctcggctgccggctgcggtcagggccaccgtataaagagggcggcagacccgagcgcctaggactcgccgctgcccgcgccccgccgccgctgctgcccccagccccggccccaggcgtcccagccatggtccgcccaatgctcttgctcagcctcggcctcctggctggtctgctgccggcgctggccgcctgcccccagaactgccactgccacagcgacctgcagcacgtcatctgcgacaaggtggggctgcagaagatccccaaggtgtcagagaagaccaagctgctcaacctacagcgcaacaacttcccggtgctggctgccaattcgttccgggccatgccgaacctcgtgtcattgcacctgcagcactgccagatccgcgaggtggccgccggtgccttccgcggcctcaagcaacttatctacttgtacctgtcccataacgacatccgcgtcgtgcgtgccggtgccttcgacgacctgaccgagctgacctacctctacctggaccacaacaaggtcactgagctgccccgggggttgctctccccgctggtcaacctcttcatcttgcagctcaacaacaacaagatccgtgagctgcgcgcagggcccttccagggagccaaggacctgcgctggctctacctgtcggaaaacgcgttgagctccctgcagcccggggccctggacgacgtggagaacctcgccaaattccacgtggacaggaaccagctgtccagctacccctcagctgccctgagcaagctacgggtggtggaggagctgaagctgtcccacaaccccctgaaaagcatcccggacaatgccttccagtcctttggcagatacctggagaccctctggctggacaacaccaacctggagaagttctcagatggtgccttcctgggtgtaaccacgctgaaacacgtccatttggagaacaaccgcttgaaccagctaccctcgaacttccccttcgacagcctggagaccctcgcccttaccaataacccctggaagtgtacctgccagctccggggccttcggcggtggctggaagccaaggcctcccgcccagatgccacctgtgcctcacctgccaagttcaagggccagcacatccgtgacacggacgccttccgcagctgcaagttccccaccaagaggtccaagaaagctggccgccattaaacaggttctgacccagccagtcctggtgactggcctctgccttccaccggagagactactgaccttctcacctccgacccataccttctccccacagcctctgctgatgcacagagctgcctacacctagacacgtcctggcagggggcctcgggcactccactaccaacccagctccacccagcagtgtcctggggagaaggaaggctgagcctctccccagccttcatgccttccccaccctccagctcctcttggagaagctgttgctgagaccccccccccccccccaagtcaatcagaaccacaacaggttggtcatcaggatggccaccctcccaggatcatccttcctctgttctctttccctgccacgtggaaacaatcatcagatccttgccccaccccttgcttccagaaagggttttaaagcccatgccccaactctgccagcccccacctgccaggacgttctagcaggtcatcggtgctttgctgtccatcttcccatgctgcaatttcttcctgagatttctataaatataaatgtatgtatgtat

SEQ ID NO: 56572 - DNA, 8497 bp, Homo Sapiens; identical to SEQ ID NO: 29152

SEQ ID NO: 56573 - DNA, 1002 bp, Homo Sapiens; identical to SEQ ID NO: 28813

SEQ ID NO: 56574 - DNA, 1901 bp, Homo Sapiens
atgaggctcaagctgaccaggccgagccggaggaacgctggggcttggcagcagaagggatgggaccagagagaagggtgtggaggagaccccagtgagggccaggacatttcaggctccacgcacgcacagacaccacggctcccggatgctgtggctccccgatcggggctcctgcagcgccagaagcccctccgggatgcttcgaggggctcccggtgggtggagggaaattctcaagaatacgctctacaaatctacgtgcgcatcattttcacctcgcgtcgcgcccgggaggaaggaacgaggcaaggagctaaagcagcgtgcgttcagccctggggtaagttcgtcgggtggggaagccggtcccgcaggactttgggatgggaattttgctctcctttgcgatctcagggcgtgaagaaggcgtcccctccgctgccggcggagctgatcggctggctagtcaatttccccttagcacgccccgtgcgcccaccctcgctcagcccggggccccctcgccgtcccccggaaggggtctgcggttcctggccaggacgttcggaaggcgagcgggggaaggtagggctgtcgcgggaacccggcttaaaggacgcggtgtctcggttctccactggaatcagcaactccctggaactcgggcctctggccccgtccctcttttctccggcagggacgcaggatgccttggtgcactctagagacggggaccggagggtgcagcgcgcctgggtggggcgaagggcgccggtctcctcacgccctctgactttaggataccagacagtgtctcttcaaccccaccccaggcgcaggtttccagaaggcggggtgggtggggcccccgatttccagaaggcgagttacctagcaggtgtgtggggtgggcattgctattcggagaaaaatcaagacgttcccttcagtcctccctcggtgttaacgtctgctccagctcgcagcccgctgctgggaggaaaatggaagaaacggagatacttttagtgaagcagaataaaccactgaacaggaaaaatgaggaagctgtgagtaccagtggaaggaacgagccaggaagagggactggaaccatctcagaagccatgcccctcaggctggaacttgccctgtctcctcgcagatgagctacctcttgtgtttaagaattaaaggaagatgagctaggaatcaagaaatacgcagaactgattcctgtcactggcgccaccctgccacttgcccagagctgtggtataaatttttttaataggctgaaataaaaatatgaatagcattttggtattaagcattaaattgataaaggctatgagatacacctgctctcaaccatgttaattttttattattggtattaataaattattacttactaacatattaacaagaattgcattgagaaacaaagcatccacaggccaaatcttctgaatttcaaatgtttatattaatgcgttgtattctagaaaagtagaattgtcttaagtagctttgtaatataaagtcatctatcagcccattacacctattagaatgttttaacctttatttcccacttttttgtttctagactgagtgtacttggtctggtatttgtggcataacttacggaacacataagaatgatacagatactatttaatgatgacctaatacaagcttagatagctaaggtgaaagcttctatggccttaacattttcctcttgaagaatgtattttctgtaataaaatacagtggctacttgaaatctataaacttatgtgaggtctggataaatctgagcaactttcttctttgtgctccaggaacctacgcactatatatataaataaagcttaagtaaacatcactgc

SEQ ID NO: 56575 - DNA, 2272 bp, Homo Sapiens
gcgcggccaggactgtctgaggggaagttcgcgagcgctggctatgggtcctggggcgcggctggcggcgctgctggcggtgctggcgctcgggacaggagacccagaaagggctgcggctcggggcgacacgttctcggcgctgaccagcgtggcgcgcgccctggcgcccgagcgccggctgctggggctgctgaggcggtacctgcgcggggaggaggcgcggctgcgggacctgactagattctacgacaaggtactttctttgcatgaggattcaacaacccctgtggctaaccctctgcttgcatttactctcatcaaacgcctgcagtctgactggaggaatgtggtacatagtctggaggccagtgagaacatccgagctctgaaggatggctatgagaaggtggagcaagaccttccagcctttgaggaccttgagggagcagcaagggccctgatgcggctgcaggacgtgtacatgctcaatgtgaaaggcctggcccgaggtgtctttcagagagtcactggctctgccatcactgacctgtacagccccaaacggctcttttctctcacaggggatgactgcttccaagttggcaaggtggcctatgacatgggggattattaccatgccattccatggctggaggaggctgtcagtctcttccgaggatcttacggagagtggaagacagaggatgaggcaagtctagaagatgccttggatcacttggcctttgcttatttccgggcaggaaatgtttcgtgtgccctcagcctctctcgggagtttcttctctacagcccagataataagaggatggccaggaatgtcttgaaatatgaaaggctcttggcagagagccccaaccacgtggtagctgaggctgtcatccagaggcccaatataccccacctgcagaccagagacacctacgaggggctatgtcagaccctgggttcccagcccactctctaccagatccctagcctctactgttcctatgagaccaattccaacgcctacctgctgctccagcccatccggaaggaggtcatccacctggagccctacattgctctctaccatgacttcgtcagtgactcagaggctcagaaaattagagaacttgcagaaccatggctacagaggtcagtggtggcatcaggggagaagcagttacaagtggagtaccgcatcagcaaaagtgcctggctgaaggacactgttgacccaaaactggtgaccctcaaccaccgcattgctgccctcacaggccttgatgtccggcctccctatgcagagtatctgcaggtggtgaactatggcatcggaggacactatgagcctcactttgaccatgctacgtcaccaagcagccccctctacagaatgaagtcaggaaaccgagttgcaacatttatgatctatctgagctcggtggaagctggaggagccacagccttcatctatgccaacctcagcgtgcctgtggttaggaatgcagcactgttttggtggaacctgcacaggagtggtgaaggggacagtgacacacttcatgctggctgtcctgtcctggtgggagataagtgggtggccaacaagtggatacatgagtatggacaggaattccgcagaccctgcagctccagccctgaagactgaactgttggcagagagaagctggtggagtcctgtggctttccagagaagccaggagccaaaagctggggtaggagaggagaaagcagagcagcctcctggaagaaggccttgtcagctttgtctgtgcctcgcaaatcagaggcaagggagaggttgttaccaggggacactgagaatgtacatttgatctgccccagccacggaagtcagagtaggatgcacagtacaaaggaggggggagtggaggcctgagagggaagtttctggagttcagatactctctgttgggaacaggacatctcaacagtctcaggttcgatcagtgggtcttttggcactttgaaccttgaccacagggaccaagaagtggcaatgaggacacctgcaggaggggctagcctgactcccagaactttaagactttctccccactgccttctgctgcagcccaagcagggagtgtccccctcccagaagcatatcccagatgagtggtacattatataaggattttttttaagttgaaaacaactttcttttctttttgtatgatggttttttaacacagtcattaaaaatgtttataaatcaaaa

SEQ ID NO: 56576 - DNA, 1043 bp, Homo Sapiens
tgttaatgaaagcagattcaaagcaacaccaccaccactgaagtatttttagttatataagattggaactaccaagcatgtggctcctggtcagtgtaattctaatctcacggatatcctctgttgggggagaagcaatgttctgtgattttccaaaaataaaccatggaattctatatgatgaagaaaaatataagccattttcccaagttcctacaggggaagttttctattactcctgtgaatataattttgtgtctccttcaaaatccttttggactcgcataacgtgcgcagaagaaggatggtcaccaacaccaaagtgtctcagactgtgtttctttccttttgtggaaaatggtcattctgaatcttcaggacaaacacatctggaaggtgatactgtacaaattatttgcaacacaggatacagacttcaaaacaatgagaacaacatttcatgtgtagaacggggctggtccactcctcccaaatgcaggtccactatttctgcagaaaaatgtgggccccctccacctattgacaatggagacattacttcattcctgttgtcagtatatgctccaggttcatcagttgagtaccagtgccagaacttgtatcaacttgagggtaacaatcaaataacatgtagaaacggacaatggtcagaaccaccaaaatgcttagatccatgtgtaatatcacaagaaattatggaaaaatataacataaaattaaagtggacaaaccaacaaaagctttattcaagaacaggtgacatagttgaatttgtttgtaaatctggatatcatccaacaaaatctcattcatttcgagcaatgtgtcagaatgggaaactggtatatcccagttgtgaagaaaaatagaatcaatggcattactattagtaaaatgcacacctttttctgaatttactattatatttgttttcaatttcatttttcaagtactgttttactcatttttattcataaataaagttttgtgttgatttgtgaaaatgcaattacaagagccaa

SEQ ID NO: 56577 - DNA, 2314 bp, Homo Sapiens; identical to SEQ ID NO: 29570

SEQ ID NO: 56578 - DNA, 2266 bp, Homo Sapiens
gctgtgctgcgcgcgcgtcccggaagcagaagcctgtgtggccttcccggcggctgattcgagggcttgtttggtcagaaggggggcgtcagagaagctgccccttagccaaccatgccgtctgagggtcgctgctgggagaccttgaaggccctacgcagttccgacaaaggtcgcctttgctactaccgcgactggctgctgcggcgcgaggatgttttagaagaatgtatgtctcttcccaagctatcttcttattctggatgggtggtagagcacgtcctaccccatatgcaggagaaccaacctctgtctgagacttcgccatcctctacgtcagcttcagccctagatcaaccctcatttgttcccaaatctcctgacgcaagctctgccttttccccagcctcccctgcaacaccaaatggaaccaagggcaaagatgagtcccagcacacagaatctatggtacttcagtcctcacgggggatcaaagtggaaggctgcgtccgaatgtacgaactggtacacagaatgaaaggaacagagggcctgaggctatggcaggaggagcaggagaggaaggtgcaagccctctcggagatggcatctgaacaactgaagcggtttgatgaatggaaggaactgaagcagcataaagaattccaggacttgcgggaagtaatggagaagagctccagagaagccttgggacaccaagagaagctaaaagctgagcaccgtcacagagcaaagattctcaacctgaagctgcgggaagcagagcagcagcgcgtgaagcaagcagaacaggagcggcttcggaaggaagaaggccagatccgcctgcgggccctctatgctctgcaggaggagatgctgcagctcagccagcagctggatgcctctgagcagcacaaagccctgcttaaggtcgacctggctgccttccagacccgaggcaaccagctgtgcagcctcatctcagggatcatccgggcctcttcagagagcagctatcccacagcagagagtcaagctgaggctgagcgagctctgcgggaaatgcgggacctcctgatgaacttggggcaggagatcaccagagcctgcgaagacaagaggaggcaggatgaagaagaggcccaggtaaagctgcaagaggcacagatgcagcagggaccagaggcccacaaagagcccccagctcccagccagggcccaggagggaaacagaatgaagacctccaggtgaaggtacaagacattacaatgcagtggtaccagcagctgcaggatgcttccatgcagtgtgtgttgacctttgagggcctgaccaacagcaaggacagtcaggccaaaaagataaagatggacctccagaaggctgctaccatcccagtgagccaaatctctaccattgcaggctcaaaactgaaggagatctttgacaagatccacagcctgctctctggaaaacctgttcaatctggtgggcgctctgtgtctgtcacacttaacccacaggggctggactttgttcaatacaaactggcagagaaatttgtgaaacaaggcgaggaggaagtggcctctcaccatgaagcagcattccccattgcagttgtggcatccgggatctgggagctccaccccagagtgggggacctcattcttgctcatctacataagaagtgtccttactctgttcctttctatcccactttcaaggagggaatggctttggaagactatcagaggatgcttggttaccaagtaaaggattccaaagtggagcagcaagacaactttctaaaacgcatgtcagggatgatccgtctctacgctgctatcatccagctccggtggccatatggaaaccgacaggagattcaccctcatggcttaaatcatggatggcgctggttggcacagatcttaaacatggagcccttgtcagatgtgacagccaccctcctctttgacttcctggaggtgtgtgggaatgccctcatgaagcaataccaggttcagttctggaagatgctaattctcatcaaagaggactactttcccaggtatcaggcttgttgagcagacagcaggggattaagtaactcataaccaggcctcagatacccaagggtgctattacctgctggttttgattcaagttaaaaacacctgtactaagtatgacatctttcctactccagtccctctcgttgatatttgaataaatgcttttgaaccttaaaaaaaaaaa

SEQ ID NO: 56579 - DNA, 6371 bp, Homo Sapiens
ctcttatgtgaggagctgaagaggaattaaaatatacaggatgaaaagatggcaatgttgcctcccccaggacctcagagctttgtccatttcacaaaacagtctcttgccctcattgaacaacgcattgctgaaagaaaatcaaaggaacccaaagaagaaaagaaagatgatgatgaagaagccccaaagccaagcagtgacttggaagctggcaaacaactgcccttcatctatggggacattcctcccggcatggtgtcagagcccctggaggacttggacccctactatgcagacaaaaagactttcatagtattgaacaaagggaaaacaatcttccgtttcaatgccacacctgctttatatatgctttctcctttcagtcctctaagaagaatatctattaagattttagtacactccttattcagcatgctcatcatgtgcactattctgacaaactgcatatttatgaccatgaataacccgccggactggaccaaaaatgtcgagtacacttttactggaatatatacttttgaatcacttgtaaaaatccttgcaagaggcttctgtgtaggagaattcacttttcttcgtgacccgtggaactggctggattttgtcgtcattgtttttgcgtatttaacagaatttgtaaacctaggcaatgtttcagctcttcgaactttcagagtattgagagctttgaaaactatttctgtaatcccaggcctgaagacaattgtaggggctttgatccagtcagtgaagaagctttctgatgtcatgatcctgactgtgttctgtctgagtgtgtttgcactaattggactacagctgttcatgggaaacctgaagcataaatgttttcgaaattcacttgaaaataatgaaacattagaaagcataatgaataccctagagagtgaagaagactttagaaaatatttttattacttggaaggatccaaagatgctctcctttgtggtttcagcacagattcaggtcagtgtccagaggggtacacctgtgtgaaaattggcagaaaccctgattatggctacacgagctttgacactttcagctgggccttcttagccttgtttaggctaatgacccaagattactgggaaaacctttaccaacagacgctgcgtgctgctggcaaaacctacatgatcttctttgtcgtagtgattttcctgggctccttttatctaataaacttgatcctggctgtggttgccatggcatatgaagaacagaaccaggcaaacattgaagaagctaaacagaaagaattagaatttcaacagatgttagaccgtcttaaaaaagagcaagaagaagctgaggcaattgcagcggcagcggctgaatatacaagtattaggagaagcagaattatgggcctctcagagagttcttctgaaacatccaaactgagctctaaaagtgctaaagaaagaagaaacagaagaaagaaaaagaatcaaaagaagctctccagtggagaggaaaagggagatgctgagaaattgtcgaaatcagaatcagaggacagcatcagaagaaaaagtttccaccttggtgtcgaagggcataggcgagcacatgaaaagaggttgtctacccccaatcagtcaccactcagcattcgtggctccttgttttctgcaaggcgaagcagcagaacaagtctttttagtttcaaaggcagaggaagagatataggatctgagactgaatttgccgatgatgagcacagcatttttggagacaatgagagcagaaggggctcactgtttgtgccccacagaccccaggagcgacgcagcagtaacatcagccaagccagtaggtccccaccaatgctgccggtgaacgggaaaatgcacagtgctgtggactgcaacggtgtggtctccctggttgatggacgctcagccctcatgctccccaatggacagcttctgccagagggcacgaccaatcaaatacacaagaaaaggcgttgtagttcctatctcctttcagaggatatgctgaatgatcccaacctcagacagagagcaatgagtagagcaagcatattaacaaacactgtggaagaacttgaagagtccagacaaaaatgtccaccttggtggtacagatttgcacacaaattcttgatctggaattgctctccatattggataaaattcaaaaagtgtatctattttattgtaatggatccttttgtagatcttgcaattaccatttgcatagttttaaacacattatttatggctatggaacaccacccaatgactgaggaattcaaaaatgtacttgctataggaaatttggtctttactggaatctttgcagctgaaatggtattaaaactgattgccatggatccatatgagtatttccaagtaggctggaatatttttgacagccttattgtgactttaagtttagtggagctctttctagcagatgtggaaggattgtcagttctgcgatcattcagactgctccgagtcttcaagttggcaaaatcctggccaacattgaacatgctgattaagatcattggtaactcagtaggggctctaggtaacctcaccttagtgttggccatcatcgtcttcatttttgctgtggtcggcatgcagctctttggtaagagctacaaagaatgtgtctgcaagatcaatgatgactgtacgctcccacggtggcacatgaacgacttcttccactccttcctgattgtgttccgcgtgctgtgtggagagtggatagagaccatgtgggactgtatggaggtcgctggtcaagctatgtgccttattgtttacatgatggtcatggtcattggaaacctggtggtcctaaacctatttctggccttattattgagctcatttagttcagacaatcttacagcaattgaagaagaccctgatgcaaacaacctccagattgcagtgactagaattaaaaagggaataaattatgtgaaacaaaccttacgtgaatttattctaaaagcattttccaaaaagccaaagatttccagggagataagacaagcagaagatctgaatactaagaaggaaaactatatttctaaccatacacttgctgaaatgagcaaaggtcacaatttcctcaaggaaaaagataaaatcagtggttttggaagcagcgtggacaaacacttgatggaagacagtgatggtcaatcatttattcacaatcccagcctcacagtgacagtgccaattgcacctggggaatccgatttggaaaatatgaatgctgaggaacttagcagtgattcggatagtgaatacagcaaagtgagattaaaccggtcaagctcctcagagtgcagcacagttgataaccctttgcctggagaaggagaagaagcagaggctgaacctatgaattccgatgagccagaggcctgtttcacagatggttgtgtacggaggttctcatgctgccaagttaacatagagtcagggaaaggaaaaatctggtggaacatcaggaaaacctgctacaagattgttgaacacagttggtttgaaagcttcattgtcctcatgatcctgctcagcagtggtgccctggcttttgaagatatttatattgaaaggaaaaagaccattaagattatcctggagtatgcagacaagatcttcacttacatcttcattctggaaatgcttctaaaatggatagcatatggttataaaacatatttcaccaatgcctggtgttggctggatttcctaattgttgatgtttctttggttactttagtggcaaacactcttggctactcagatcttggccccattaaatcccttcggacactgagagctttaagacctctaagagccttatctagatttgaaggaatgagggtcgttgtgaatgcactcataggagcaattccttccatcatgaatgtgctacttgtgtgtcttatattctggctgatattcagcatcatgggagtaaatttgtttgctggcaagttctatgagtgtattaacaccacagatgggtcacggtttcctgcaagtcaagttccaaatcgttccgaatgttttgcccttatgaatgttagtcaaaatgtgcgatggaaaaacctgaaagtgaactttgataatgtcggacttggttacctatctctgcttcaagttgcaacttttaagggatggacgattattatgtatgcagcagtggattctgttaatgtagacaagcagcccaaatatgaatatagcctctacatgtatatttattttgtcgtctttatcatctttgggtcattcttcactttgaacttgttcattggtgtcatcatagataatttcaaccaacagaaaaagaagcttggaggtcaagacatctttatgacagaagaacagaagaaatactataatgcaatgaaaaagctggggtccaagaagccacaaaagccaattcctcgaccagggaacaaaatccaaggatgtatatttgacctagtgacaaatcaagcctttgatattagtatcatggttcttatctgtctcaacatggtaaccatgatggtagaaaaggagggtcaaagtcaacatatgactgaagttttatattggataaatgtggtttttataatccttttcactggagaatgtgtgctaaaactgatctccctcagacactactacttcactgtaggatggaatatttttgattttgtggttgtgattatctccattgtaggtatgtttctagctgatttgattgaaacgtattttgtgtcccctaccctgttccgagtgatccgtcttgccaggattggccgaatcctacgtctagtcaaaggagcaaaggggatccgcacgctgctctttgctttgatgatgtcccttcctgcgttgtttaacatcggcctcctgctcttcctggtcatgttcatctacgccatctttggaatgtccaactttgcctatgttaaaaaggaagatggaattaatgacatgttcaattttgagacctttggcaacagtatgatttgcctgttccaaattacaacctctgctggctgggatggattgctagcacctattcttaacagtaagccacccgactgtgacccaaaaaaagttcatcctggaagttcagttgaaggagactgtggtaacccatctgttggaatattctactttgttagttatatcatcatatccttcctggttgtggtgaacatgtacattgcagtcatactggagaattttagtgttgccactgaagaaagtactgaacctctgagtgaggatgactttgagatgttctatgaggtttgggagaagtttgatcccgatgcgacccagtttatagagttctctaaactctctgattttgcagctgccctggatcctcctcttctcatagcaaaacccaacaaagtccagctcattgccatggatctgcccatggttagtggtgaccggatccattgtcttgacatcttatttgcttttacaaagcgtgttttgggtgagagtggggagatggattctcttcgttcacagatggaagaaaggttcatgtctgcaaatccttccaaagtgtcctatgaacccatcacaaccacactaaaacggaaacaagaggatgtgtctgctactgtcattcagcgtgcttatagacgttaccgcttaaggcaaaatgtcaaaaatatatcaagtatatacataaaagatggagacagagatgatgatttactcaataaaaaagatatggcttttgataatgttaatgagaactcaagtccagaaaaaacagatgccacttcatccaccacctctccaccttcatatgatagtgtaacaaagccagacaaagagaaatatgaacaagacagaacagaaaaggaagacaaagggaaagacagcaaggaaagcaaaaaatagagcttcatttttgatatattgtttacagcctgtgaaagtgatttatttgtgttaataaaactcttttgaggaagtctatgccaaaatcctttttatcaaaatattctcgaaggcagtgcagtcactaactctgatttcctaagaaaggtgggcagcattagcagatggttatttttgcactgatgattctttaagaatcgtaagagaactctgtaggaattattgattatagcatacaaaagtgattgattcagttttttggtttttaataaatcagaagaccatgtagaaaacttttacatctgccttgtcatcttttcacaggattgtaattagtcttgtttcccatgtaaataaacaacacacgcatacagaaaaaaaaaaaaaaa

SEQ ID NO: 56580 - DNA, 3591 bp, Homo Sapiens; identical to SEQ ID NO: 27132

SEQ ID NO: 56581 - DNA, 1440 bp, Homo Sapiens
gttacccagcattgtgagtgacagagcctggatctgaacgctgatcccataatgcatcctcaagtggtcatcttaagcctcatcctacatctggcagattctgtagctggttctgtaaaggttggtggagaggcaggtccatctgtcacactaccctgccactacagtggagctgtcacatcaatgtgctggaatagaggctcatgttctctattcacatgccaaaatggcattgtctggaccaatggaacccacgtcacctatcggaaggacacacgctataagctattgggggacctttcaagaagggatgtctctttgaccatagaaaatacagctgtgtctgacagtggcgtatattgttgccgtgttgagcaccgtgggtggttcaatgacatgaaaatcaccgtatcattggagattgtgccacccaaggtcacgactactccaattgtcacaactgttccaaccgtcacgactgttcgaacgagcaccactgttccaacgacaacgactgttccaacgacaactgttccaacaacaatgagcattccaacgacaacgactgttccgacgacaatgactgtttcaacgacaacgagcgttccaacgacaacgagcattccaacaacaacaagtgttccagtgacaacaacggtctctacctttgttcctccaatgcctttgcccaggcagaaccatgaaccagtagccacttcaccatcttcacctcagccagcagaaacccaccctacgacactgcagggagcaataaggagagaacccaccagctcaccattgtactcttacacaacagatgggaatgacaccgtgacagagtcttcagatggcctttggaataacaatcaaactcaactgttcctagaacatagtctactgacggccaataccactaaaggaatctatgctggagtctgtatttctgtcttggtgcttcttgctcttttgggtgtcatcattgccaaaaagtatttcttcaaaaaggaggttcaacaactaagtgtttcatttagcagccttcaaattaaagctttgcaaaatgcagttgaaaaggaagtccaagcagaagacaatatctacattgagaatagtctttatgccacggactaagacccagtggtgctctttgagagtttacgcccatgactgcagaagactgaacaggtatcagcacatcagatgtcttttagactccaagacaatttttctgtttcagtttcatctggcattccaacatgtcagtgatactgggtagagtaactctcccactccaaactgtgtatagtcaacctcatcattaatgtagtcctaatttgttttgctaaaactggctcaatccttctgatcattgcagagttttctctcaaacatgaacactttagaattgtatgttctctttagaccccataaatcctgtat

SEQ ID NO: 56582 - DNA, 4793 bp, Homo Sapiens; identical to SEQ ID NO: 29186

SEQ ID NO: 56583 - DNA, 1505 bp, Homo Sapiens; identical to SEQ ID NO: 23068

SEQ ID NO: 56584 - DNA, 2749 bp, Homo Sapiens
cacacacacacatacacagaatcctcagataacaggaggcaataaatccaacagcacatccacgttcagagaacagtgtccctgctgtcttgctaacagctgccaatacctcactgagtgcctcacaccaacatgggctccaagtgagtttccttcgtctgggcagactccctcccctcttccataaaggctgcaggagacctgtagctgtcacaggaccttccctaagagcccgcagggaaagactgccccagtccggccatcaccatgctccggaccattctggatgctccccagcggttgctgaaggaggggagagcgtcccggcagctggtgctggtggtggtattcgtcgctttgctcctggacaacatgctgtttactgtggtggtgccaattgtgcccaccttcctatatgacatggagttcaaagaagtcaactcttctctgcacctcggccatgccggaagttccccacatgccctcgcctctcctgccttttccaccatcttctccttcttcaacaacaacaccgtggctgttgaagaaagcgtacctagtggaatagcatggatgaatgacactgccagcaccatcccacctccagccactgaagccatctcagctcataaaaacaactgcttgcaaggcacaggtttcttggaggaagagattacccgggtcggggttctgtttgcttcaaaggctgtgatgcaacttctggtcaacccattcgtgggccctctcaccaacaggattggatatcatatccccatgtttgctggctttgttatcatgtttctctccacagttatgtttgctttttctgggacctatactctactctttgtggcccgaacccttcaaggcattggatcttcattttcatctgttgcaggtcttggaatgctggccagtgtctacactgatgaccatgagagaggacgagccatgggaactgctctggggggcctggccttggggttgctggtgggagctccctttggaagtgtaatgtacgagtttgttgggaagtctgcacccttcctcatcctggccttcctggcactactggatggagcactccagctttgcatcctacagccttccaaagtctctcctgagagtgccaaggggactcccctctttatgcttctcaaagacccttacatcctggtggctgcagggtccatctgctttgccaacatgggggtggccatcctggagcccacactgcccatctggatgatgcagaccatgtgctcccccaagtggcagctgggtctagctttcttgcctgccagtgtgtcctacctcattggcaccaacctctttggtgtgttggccaacaagatgggtcggtggctgtgttccctaatcgggatgctggtagtaggtaccagcttgctctgtgttcctctggctcacaatatttttggtctcattggccccaatgcagggcttggccttgccataggcatggtggattcttctatgatgcccatcatggggcacctggtggatctacgccacacctcggtgtatgggagtgtctacgccatcgctgatgtggctttttgcatgggctttgctataggtccatccaccggtggtgccattgtaaaggccatcggttttccctggctcatggtcatcactggggtcatcaacatcgtctatgctccactctgctactacctgcggagccccccggcaaaggaagagaagcttgctattctgagtcaggactgccccatggagacccggatgtatgcaacccagaagcccacgaaggaatttcctctgggggaggacagtgatgaggagcctgaccatgaggagtagcagcagaaggtgctccttgaattcatgatgcctcagtgaccacctctttccctgggaccagatcaccatggctgagcccacggctcagtgggcttcacatacctctgcctgggaatcttctttcctcccctcccatggacactgtccctgatactcttctcacctgtgtaacttgtagctcttcctctatgccttggtgccgcagtggcccatcttttatgggaagacagagtgatgcaccttcccgctgctgtgaggttgattaaacttgagctgtgacgggttctgcaaggggtgactcattgcatagaggtggtagtgagtaatgtgcccctgaaaccagtggggtgactgacaagcctctttaatctgttgcctgattttctctggcatagtcccaacagatcggaagagtgttaccctcttttcctcaacgtgttctttcccgggttttcccagccgagttgagaaaatgttctcagcattgtcttgctgccaaatgccagcttgaagagttttgttttgttttttttccatttattttttttttttaataaagtgagtgatttttctgtggctaaatctagagctgctaaaagggctttaccctcagtgaaaagtgtcttctattttcattatctttcagaaacaggagcccatttctcttctgctggagttattgacattctcctgacctcccctgtgtgttcctaccttttctgaacctcttagactcttagaaataaaagtagaagaaagacagaaaaaataactgattagacccaagatttcatgggaagaagttaaaagaaactgccttgaaatccctcctgattgtagatttcctaataggaggggtgtaatgtgacattgttcatacttgctaataaatacattattgcct

SEQ ID NO: 56585 - DNA, 1837 bp, Homo Sapiens; identical to SEQ ID NO: 31594

SEQ ID NO: 56586 - DNA, 4612 bp, Homo Sapiens
tggggctgggagccgggcgccactgtggccgctgcttttctgagggaaaagagcgcggagtgggccaggttttgcaggccgggccaaggtggagaaaaggttcctgtggagcctcaggccggtgtgctttttttcccgggactgagcttctgcagccctgaggcctggaggcccgggcggtagtaactgtgccggaccaggttcgtgggtgcggcctgtggtgcagttggagaccgaggccccgcgcatcctcgtccgcgcttcagccacttaggcttggccgtagcgaaaaggcccaagagggaagtcagaggtggcggttagttggggccagggaagcgtggagggtgggttccaatcgagtcaagaaaagcctggggtgtcctgaactctgcctgcttccccagccctgccagtttccagagaaggcgcttgagaaggagaaacgaatcgctgctgctcttctaaaagccggttccctctctggtgtctgtggaccctgcttctgaagtacatgaaccttgaggaaaattgaccagttctagcagttctaaaatcatggctcgtgatttggtgatgttcagagatgtggctgtagacttttctcaggaagaatgggaatgcctgaactcatatcagaggaatttgtacagagatgtgatattagagaactatagcaacttggtgtcactggcaggatgttctatttctaagccagatgtgatcaccctattggaacaagggaaagagccctggatggttgtgagggatgagaaaagaagatggactctagatttggaatccagatatgacactaaaaagttatttcaaggaaaggatatttatgaaatgaacttatctcagtggaaggtaatggaaagaattaaaagctgtggacttgaagaacaagaaagtcctcatgaggtgtgtttcaggcaagtgacaaaaaccacctctgaaaaaatgcctacttacagaaaactcacatctcttcctctgtatcagaaaagtcataacagagagaaaccctacgaatgtggggaatgtgggaaggcttttagagtacgacaacaacttactttccatcaaagaattcatactggtgagaaaccctatgaatgtaaagaatgtggaaaagcctttagacagtgtgcccacctcagtcgacatcagagaattcatacttctgacaaactctatgaatgtaaaaaatgtggaaagatcttcacatgtggctcagaccttcgagtacatcagagaattcatattggtgagaagccgtatgaatgtaaagaatgtgggaaagcctttagagttagaggacaacttaatctccatcaaaggattcacacgggtgagaaaccctatgaatgtaaagaatgtgggaaggcctttaggcagtatgcacaccttactcgacatcagagactgaacattgctgagaagtgctatgagtgtaaggaatgtggtcaggcctttctgtgtagtacaggccttcgactacatcacaaacttcatactggagaaaaaccctatgaatgtaaggagtgtggaaaggcctttagagtgcggcagcaacttactctccatcagagaattcacactggtgagaagccttatgattgtaaggaatgtgggaagactttcagtcgtggctatcatctaactctccatcagagaatacatactggtgaaaagccctatgaatgtaaggaatgtcagaagttctttcgtcgttactcagaacttatttcacatcagggtattcacattggagagaaaccttatgaatgtaaggaatgtgggaaggcatttaggctgttctcacagcttactcaacatcagagtattcattttggtgagaaaccctttaagtgtaaggaatgtgagaagacttttagactgctttcacaacttacccaacatcaaagtattcatactggtgaaaagccctatgactgtaaggaatgtggaaaggcctttagacttcattcatcactgattcaacatcagagaattcattctggtgagaaaccatacaaatgtaaggaatgtaaaaaggcatttagacaacattcacatcttacttaccatcagcgaattcataatgtaacttaataattattagaactcttcctttgcgaattttatgttgagcataggaagtacattctagaggaaaggtttttgaacgtgggaatcccttttgcttcatgctcacaactaagcataggaagttttatttaaaggaaagaatatgttaatgaacatatagaagcctttcatcacctttgaaaccatgttaaactttaggaaattcatcctagaaaagaactttattacaggactgaatgtggaaaagcttttgatcttacctattattatctccatattcttccatctgtgtatatacacacgaaggttgctagggaaccacttcattctgaaaatgtgtaaatgaaaggaaagtcatttagtctgcatttcctgtaggaactgtatttcagggcaaccagaagttaaggaggtaaagttcttctttattagaaaattccaggctaatgaatgcagaaagaataatagaaaattatattagaaaaactattgtgtaacacataatgaaataatggatctaggcatgattctctgtacaggttgacaccattcagtgaaggttgtgaactttatagtgaatagatgagactgacaacgtctgaacccactcatcatctcaacttcacaaaaagcaagagagtaaaaattacgtgcctcctaatgtgctacagtaagatatacacatcttgccaaaaatattgaacctgaatttaagcctcaagagccaactcccagtttagagaaaattcaaggaatggaagagtaaattacatgacacaaaaaggagcaattaaatctaaaataagggtaattctacaagaggaatcacctggtttcccaaccaataaaatggcattttaagaaataaggtggaactcctaggtattgacagacttgagacatcagtcaaatgcaatgaaacagtggtttttacttagatcatgagttgaacaaacatgtaaaagaagagatacttaacaataattgggagaatggaatattgacaatattagataatattaagaaactttgttatgtgtgataatagcattgtggttatgtaaaagtgtatttgttagagataatttctgaagtctatacacaggagatgatatatctggaatgtccttttgttcatacaaaagaaaaatgaggatgaataacaagtttggcaaaatgatggtaacctaagtcttggatacatggtttttatttgttttgtttttgctattctacttttgtgtatttaaaattttccatgatgttcttttaaagatcaaattatccatgaaattatagccagtttaaaatgaattattttaaaaaaaatttctggctgggcccggtggctcgtgcctgtagtcccagcactttgggaggccggtgggcagatcatgaggtcaggagtttgagaccagcctgaccatcatggtgaaacctcatctccgctaaaaatgcaaaaattagccaggcgtggtcacatgcgcctgtaatcccagctactcgggcagctgagacaggagaatcacttgggcccgggaggcagaggttgcagtgagccgagatcacgccattgcactccagcctgggcaacaagagcaaaactctatctcaaagaaaaaaagaaaatttctacatattaaaacttgtggatgttgccaaagctctacacattgggattggaatattaattacactataatgacgataatgtattcaggaagttaaaatgtaggtccacattttatttagttgacctctctatctctatattatagtacccatggtatgcacctttttttttttttttttttgagacggagtctcgctctttcgcccaggctggcgtgcagtggcacagtctcggctcactgcaagctctgcctcccgggttcaagccattctcctccctcagacttccgagtggctgggattacaggcgcccgccaccacaccaggttgatttttgtatttttagtggagatggggtttcaccatgttggccaggctggtctcaactcctgacctcaggtgatccacctgcctcggcctcccaaggtgctgggattgcaggcgtgagccaccatgcccggctctcacttcatatgtttaaagaatgagtaaaagaaagcaattactactgctaaatgtgggaaataatggactagacctgtactaatatatggtagtcactagcaacctgttgagcacttgaaattgagttattgagcactgaaatgtggctagtccaaattcaaatggtgtttttttgtaaaacacaagattctgaagacttagttattttaaaaaagttaagtatctcaatttttcatattgagtacatattgaaataatattttagatatattggttcaaataaaatacattaaaatgaataacacttttttgtttttaaaattgttataggaaaatttatatatgtagctcacgtatttctattgtcagcgctggcataaacaataaaaagtagacttgg

SEQ ID NO: 56587 - DNA, 2564 bp, Homo Sapiens
aatagcaatagctttatagcagctccggttacctgttttaaacatggaaggagagtcgctcccagatagccctcacgagtggccctggagcagggagtggtggagcagatcttccttgtttgggaggagcctgaggtggacctcgcgtcctgagtctggaaggcacctatggggacctgctggggtgatatctcagaaaatgtgagagtagaagttcccaatacagactgcagcctacctaccaaagtcttctggattgctggaattgtaaaattagcaggttacaatgcccttttaagatatgaaggatttgaaaatgactctggtctggacttctggtgcaatatatgtggttctgatatccatccagttggttggtgtgcagccagcggaaaacctcttgttcctcctagaactattcagcataaatatacaaactggaaagcttttctagtgaaacgacttactggtgccaaaacactgcctcctgatttctcccaaaaggtttcagagagtatgcagtatcctttcaaaccttgcatgagagtagaagtggttgacaagaggcatttgtgtcgaacacgagtagcagtggtggaaagtgtaattggaggaagattaagactagtgtatgaagaaagcgaagatagaacagatgacttctggtgccatatgcacagcccattaatacatcatattggttggtctcgaagcataggtcatcgattcaaaagatctgatattacaaagaaacaggatggacattttgatacaccaccacatttatttgctaaggtaaaagaagtagaccagagtggggaatggttcaaggaaggaatgaaattggaagctatagacccattaaatctttctacaatatgtgtcgcaaccattagaaaggtgctagctgacggattcctgatgattgggatcgatggctcagaagcagcagacggatctgactggttctgttaccatgcaacctctccttctattttccctgtcggtttctgtgaaattaacatgattgaacttactccacccagaggttacacaaaacttccttttaaatggtttgactacctcagggaaactggctccattgcagcaccagtaaaactatttaataaggatgttccaaatcacggatttcgtgtaggaatgaaattagaagcagtagatctcatggagccacgtttaatatgtgtagccacagtaactcgaattattcatcgtctcttgaggatacattttgatggatgggaagaagagtatgatcagtgggtagactgtgagtcacctgacctctatcctgtagggtggtgtcagttaactggatatcaactacagcctccagcatcacagtgtaagttggtatacagaaaaggtgtccttttgtaaaaatcagcaattctccagaggactatctcacataagtcatcttatgagctcacaggacaagaatatacctatgtctgattggttgccaggtaagacattaagactcaacaacaatatcacagaatcagaccatgtgtcccatggcaatgtgaatccaatagtcaattacataatgactatagaaacacaacagtcaccaaattaaactagacttactattttagtgagttaaaaattacatactaaaagtttattggtaggtaataaatgcttttgagtaaatagtggaaaatgtctcatgttgaggctatggttttgtaggaacaagtacccttattttcagagcatcatgtacttaagtataatggtcttggtaaagatagttcatataagttgtatctagacaactgtatcgtctaaattgtaaacaattatctagtaccaattttccctttttatttttcagcatcaagagaaaaccaatcagcttcatcaaaacagaagaaaaaggctaagtcccagcaatacaaaggacataagaaaagtgggtcaccacgtggtgttcacatacattttctaattgttaactaattggagtcacagtattcttggacagaaaatgatatatcttgtgagaactgatgattgtgcattatgtattatgcttaaaggtgcagtatgccataaaaggcaaacccttgcaataatgagaaacactgatattttactaacaggagaaatgattaccacagtatttaaagtatacgtggtaaagaatagagtctgtgaatgattcttgaaataatatgtaaaacctactgaaagttaatcctttttaaaaactttatttaaaaagaaaaattagcagccaggtgcagtggctcacgcctgtaatcccagcactttaggaggccgaggctggcagatcacaaggtcaggagatcgagaccatcctggctaacacggtgaaaccctgtctccaccaaaaatacaaaaaatctgccgggcgtggtggcacacgcctgaagtcccagctactcaggaggctgaggcaagagaatcacttgaacccaggaggcagaggttgcagtgggccaagatcacgccactacattccagctgggcaacacagcaagactctgtctcaaaaaaaaaaaaaaaaa

SEQ ID NO: 56588 - DNA, 3238 bp, Homo Sapiens
catggcggccttagcaagctatagctgcgagatttgaattactccactcgtagctattgcattcctgacgatggcctctgtggcttcgtgcgattcgcgtccgagctcagacgagctccctggagacccctcttcacaagaagaagatgaggactatgattttgaagatcgggtcagcgactcgggttcatattcctcagcgagtagcgattatgatgatcttgagcctgaatggctggacagtgtgcagaaaaatggagagctgttttatttggaattgagtgaggatgaagaagaaagcctccttcctgagacaccaactgtgaaccatgtcaggttcagtgaaaatgagattatcattgaagatgactacaaagaaagaaaaaagtatgaacccaaactcaagcagtttaccaaaattttaagaaggaaaagacttttacccaagcgctgcaataaaaaaaatagcaatgacaatggaccagtatccattctaaagcatcagtccaatcagaagacaggagtcattgtccaacagcggtacaaagatgtgaatgtttatgtaaaccccaaaaagctaactgttatcaaagccaaagagcagctcaagcttctggaagtgctggttggaattattcatcagaccaagtggagctggagaagaaccggaaagcagggtgatggagagaggcttgtggttcatggcctgctgccagggggatctgctatgaagagcggtcaggtactcattggtgatgtccttgttgctgtgaatgatgtcgatgttactactgaaaacatcgagagagttctgtcttgcattcctggacctatgcaggtgaaactgacatttgaaaatgcatatgatgtgaaaagggagacatcccatccaagacagaaaaagacacagtccaacacaagtgatttagtcaagcttctctggggagaagaggttgaaggtatccagcagagtggcctaaacactcctcatatcattatgtatctcacactacagctcgactcagaaacctcaaaggaagagcaggaaattctttatcattatccaatgtctgaagcatctcagaaacttaaaagtgtgagagggatttttctcacactctgtgacatgctggaaaacgtaactgggacacaagttactagttcatccctccttttaaatggaaaacaaattcatgtggcttattggaaagaatctgacaagttgttgctaattggcctgcctgctgaagaagttcctcttcctcgtctaaggaacatgatagaaaatgtcatccaaaccttaaaatttatgtatggttctttagatagtgccttttgccagattgagaatgttcctcgtttggatcatttttttaacttgttctttcaaagagcacttcagcctgcgaaactgcattccagcgccagtcccagtgctcagcagtacgatgcttccagtgcagtacttttagacaacctccctggagtccggtggctcacacttccactggaaatcaagatggaattagacatggcattaagtgacttggaggctgcagattttgcagaactgtccgaggattactatgacatgaggcggctgtatacaattttggggtcttctctattttacaagggttatttgatatgcagtcatttgcccaaggatgatcttattgatattgccgtatactgtcgccactattgcctgctgcctttagcagcaaaacaaagaattggtcagttgatcatatggagagaagtgtttcctcagcatcacctccgacctttggcagactcaagcactgaagtctttccggaacctgaaggaagatattttttgctagttgttggcttgaaacattatatgctatgtgtactattagaagctggaggttgcgcatccaaagctattgggagtcctggaccagactgtgtatatgtggatcaagtcaaaacaactcttcaccagctggatggagtagattctcgcatagatgaacggctagcatcttctccagtcccctgtttgtcttgtgctgactggttccttactggatcacgtgaaaaaacagatagcttgaccacttcgcctattctcagtaggctacaaggtacttccaaagtagcaacttctccaacatgcagaagaacgctttttggtgactattccttaaagacacgcaagcctagtccttcctgtagtagtggaggatctgacaatggttgtgaaggtggagaagatgatggctttagcccccatactacaccggatgcagtacggaagcaaagagaatctcagggctctgatggtttagaagaaagtgggaccttgcttaaggtcactaaaaagaagtctactcttccaaatccatttcatttgggaaacttgaaaaaggaccttccagaaaaagaattagaaatatataacacagtgaaactgacatctggtcctgagaacacacttttccactacgttgccttagaaacagtgcaaggaatctttattactcctacccttgaagaggtggcacagctaagtggctctatccaccctcagctaataaagaatttccatcagtgttgtctttccattcgtgcagttttccaacagacattggtggaagagaaaaagaaaggactaaatagtggagaccattcagattctgcaaagtcagtgtcttctcttaaccctgttaaagaacatggtgtgttgtttgaatgttcacctggaaactggactgatcagaaaaaagcaccaccagttatggcttactgggtagtagggagactttttcttcatccaaaacctcaagaactttatgtctgttttcatgactcagtcacagaaattgccattgaaatagcttttaaattgttctttgggttaaccttgtagctgtgctttcttgatgcgtagaaacacgtgcatggaggatcaaacactgtcagaattgctgaaatcaatacacaaagagataaagtttagcttctttttactattcaatattgaacataatattgttaaatattgagatgaaatgctgttggatttgatacattaaatcttaatgtaatattgtaagacttttgagaatatacttgattaaaatgtgaaagaagggattgttaacttattgctattttggtatataatgttaatttattgactagtttgaaataatgtgaagtgttttttatatcagattaatataggaaatgtttattcttgaaaaat

SEQ ID NO: 56589 - DNA, 3016 bp, Homo Sapiens
gaattcgggtgagccagctccgggagaacagcatgtacaccagcctcagtgttacagagtgtgggtacatcaaggtgaatggtgagcagaaactataacctgttagtccttctacacctcatctgctacaagttctggcttagacatggatattctttgtgaagaaaatacttctttgagctcaactacgaactccctaatgcaattaaatgatgacaccaggctctacagtaatgactttaactctggagaagctaacacttctgatgcatttaactggacagtcgactctgaaaatcgaaccaacctttcctgtgaagggtgcctctcaccgtcgtgtctctccttacttcatctccaggaaaaaaactggtctgctttactgacagccgtagtgattattctaactattgctggaaacatactcgtcatcatggcagtgtccctagagaaaaagctgcagaatgccaccaactatttcctgatgtcacttgccatagctgatatgctgctgggtttccttgtcatgcccgtgtccatgttaaccatcctgtatgggtaccggtggcctctgccgagcaagctttgtgcagtctggatttacctggacgtgctcttctccacggcctccatcatgcacctctgcgccatctcgctggaccgctacgtcgccatccagaatcccatccaccacagccgcttcaactccagaactaaggcatttctgaaaatcattgctgtttggaccatatcagtaggtatatccatgccaataccagtctttgggctacaggacgattcgaaggtctttaaggaggggagttgcttactcgccgatgataactttgtcctgatcggctcttttgtgtcatttttcattcccttaaccatcatggtgatcacctactttctaactatcaagtcactccagaaagaagctactttgtgtgtaagtgatcttggcacacgggccaaattagcttctttcagcttcctccctcagagttctttgtcttcagaaaagctcttccagcggtcgatccatagggagccagggtcctacacaggcaggaggactatgcagtccatcagcaatgagcaaaaggcatgcaaggtgctgggcatcgtcttcttcctgtttgtggtgatgtggtgccctttcttcatcacaaacatcatggccgtcatctgcaaagagtcctgcaatgaggatgtcattggggccctgctcaatgtgtttgtttggatcggttatctctcttcagcagtcaacccactagtctacacactgttcaacaagacctataggtcagccttttcacggtatattcagtgtcagtacaaggaaaacaaaaaaccattgcagttaattttagtgaacacaataccggctttggcctacaagtctagccaacttcaaatgggacaaaaaaagaattcaaagcaagatgccaagacaacagataatgactgctcaatggttgctctaggaaagcagcattctgaagaggcttctaaagacaatagcgacggagtgaatgaaaaggtgagctgtgtgtgataggctagttgccgtggcaactgtggaaggcacactgagcaagttttcacctatctggaaaaaaaaaatatgagattggaaaaaattagacaagtctagtggaaccaacgatcatatctgtatgcctcattttattctgtcaatgaaaagcggggttcaatgctacaaaatgtgtgcttggaaaatgttctgacagcatttcagctgtgagctttctgatacttatttataacattgtaaatgatatgtctttaaaatgattcacttttattgtataattatgaagccctaagtaaatctaaattaacttctattttcaagtggaaaccttgctgctatgctgttcattgatgacatgggattgagttggttacctattgccgtaaataaaaatagctataaatagtgaaaattttattgaatataatggcctcttaaaaattatctttaaaacttactatggtatatattttgaaaggagaaaaaaaaaaagccactaaggtcagtgttataaaatctgtattgctaagataattaaatgaaatacttgacaacatttttcatagataccattttgaaatattcacaaggttgctggcatttgctgcatttcaagttaattctcagaagtgaaaaagacttcaaatgttattcaataactattgctgctttctcttctacttcttgtgctttactctgaatttccagtgtggtcttgtttaatatttgttcctctaggtaaactagcaaaaggatgatttaacattaccaaatgcctttctagcaattgcttctctaaaacagcactatcgaggtatttggtaacttgctgtgaaatgactgcatcatgcatgcactcttttgagcagtaaatgtatattgatgtaactgtgtcaggattgaggatgaactcaggtttccggctactgacagtggtagagtcctaggacatctctgtaaaaagcaggtgactttcctatgacactcatcaggtaaactgatgctttcagatccatcggtttatactatttattaaaaccattctgcttggttccacaatcatctattgagtgtacatttatgtgtgaagcaaatttctagatatgagaaatataaaaataattaaaacaaaatccttgccttcaaacgaaatggctcggccaggcacggaggctcgtgcatgtaatcctagcactttgggaggctgagatgggaggatcacttgaggccaagagtttgagaccaacctgggtaacaaagtgagacctccctgtctctacaaaaaaaatcaaaaaattatctgatccttgtggcacacaactgtggtcccagctacaggggaggctgagacgcaaggatcacttgagcccagaagctcaaggctgcagtgagccaagttcacaccactgccatttcctcctgggcaacagagtgagaccctatcaccccgaattc

SEQ ID NO: 56590 - DNA, 2929 bp, Homo Sapiens; identical to SEQ ID NO: 31313

SEQ ID NO: 56591 - DNA, 4335 bp, Homo Sapiens
ttcttaaccctttccagctttcccaccctctttggctttagccatggccttctgatctgtgtttctcaggggacctgcaggccccagatatagccccatgctgtcctcctaccccagagcacactgttcaggctacttccactggtactgaaatccagtatttcacttactcttttcctttccaatatcctcatgacattcaatatttcacttactctaggtcctccctgcctaaggcccaagtcaactttctgtccagtgggatttgtaatccaatgcctcctagccctagcagaatcccatgtggataatcagaaatgtgactggaaaaaggacagagctctatggctgtgggtcccagtccccactgctggcagtaagtccccagcagtgagctgtgtaagcaccttacattctgcgcttggttgaaaacagcaaggcaagcatccacttgagaaatgtcaacccctaggaaatcccagcctcaagtctttctcatcccttgggaagtgcaaattggatagagaagaaaccaattaaaaacaaaacaaacaaatcatacttagatattctggcttttctcaccagggctggattaaagcatgtacttcaaaataataacaacttaagtcaataaataaatgtaaggaagtccaaatgttcacctgaagacaactgtggtcattttttggcaatcccaggttctcttttctacctgtttgctcaatcgtggtctccctctccctctcttgttggggcccatgcccctgctttactgttgccagaggcttgtacttgtttgccttttaggtaggagcagttacttccactcccctcacctgccataaagcatctttataaacaaagcaagtagaagaaacacatcctggtatccaccacattcggcttttgttgattctgttcacttgggagcacctgctgctagggaataagaaggttgaggctgaagagtgaggactcttcagctcccctctggcaggacccgggagaggaaagagccctcagctggtccatcctccccactcctggtcagccttctgttctgagatcaaagtggtggggtcacattctcgagaactgtgctcagccccctcatctcacaccctttccctctccctgtgtgcctgcccccctcttacataaccatgctggtgattggcaccgtcataaatcaatactttgctcactttcacatcaagtaacactatccagggaggtggtttcaacaaaggaggaagtataaggagatctaggttcaaattaatgttgcccctagtggtaaaggacagagaccctcagactgatgaaatgcactcagaattacttagacaaagcggatatttgccactctcttccccttttcctgtgtttttgtagtgaagagacctgaaagaaaaaagtagggagaacataatgagaacaaatacggtaatctcttcatttgctagttcaagtgctggacttgggacttaggaggggcaatggagccgcttagtgcctacatctgacttggactgaaatataggtgagagacaagattgtctcatatccggggaaatcataacctatgactaggacgggaagaggaagcactgcctttacttcagtgggaatctcggcctcagcctgcaagccaagtgttcacagtgagaaaagcaagagaataagctaatactcctgtcctgaacaaggcagcggctccttggtaaagctactccttgatcgatcctttgcaccggattgttcaaagtggaccccaggggagaagtcggagcaaagaacttaccaccaagcagtccaagaggcccagaagcaaacctggaggtgagacccaaagaaagctggaaccatgctgactttgtacactgtgaggacacagagtctgttcctggaaagcccagtgtcaacgcagatgaggaagtcggaggtccccaaatctgccgtgtatgtggggacaaggccactggctatcacttcaatgtcatgacatgtgaaggatgcaagggctttttcaggagggccatgaaacgcaacgcccggctgaggtgccccttccggaagggcgcctgcgagatcacccggaagacccggcgacagtgccaggcctgccgcctgcgcaagtgcctggagagcggcatgaagaaggagatgatcatgtccgacgaggccgtggaggagaggcgggccttgatcaagcggaagaaaagtgaacggacagggactcagccactgggagtgcaggggctgacagaggagcagcggatgatgatcagggagctgatggacgctcagatgaaaacctttgacactaccttctcccatttcaagaatttccgggtctctctgcagctgcggggggaggatggcagtgtctggaactacaaacccccagccgacagtggcgggaaagagatcttctccctgctgccccacatggctgacatgtcaacctacatgttcaaaggcatcatcagctttgccaaagtcatctcctacttcagggacttgcccatcgaggaccagatctccctgctgaagggggccgctttcgagctgtgtcaactgagattcaacacagtgttcaacgcggagactggaacctgggagtgtggccggctgtcctactgcttggaagacactgcaggtggcttccagcaacttctactggagcccatgctgaaattccactacatgctgaagaagctgcagctgcatgaggaggagtatgtgctgatgcaggccatctccctcttctccccagaccgcccaggtgtgctgcagcaccgcgtggtggaccagctgcaggagcaattcgccattactctgaagtcctacattgaatgcaatcggccccagcctgctcataggttcttgttcctgaagatcatggctatgctcaccgagctccgcagcatcaatgctcagcacacccagcggctgctgcgcatccaggacatacacccctttgctacgcccctcatgcaggagttgttcggcatcacaggtagctgagcggctgcccttgggtgacacctccgagaggcagccagacccagagccctctgagccgccactcccgggccaagacagatggacactgccaagagccgacaatgccctgctggcctgtctccctagggaattcctgctatgacagctggctagcattcctcaggaaggacatgggtgccccccacccccagttcagtctgtagggagtgaagccacagactcttacgtggagagtgcactgacctgtaggtcaggaccatcagagaggcaaggttgccctttccttttaaaaggccctgtggtctggggagaaatccctcagatcccactaaagtgtcaaggtgtggaagggaccaagcgaccaaggataggccatctggggtctatgcccacatacccacgtttgttcgcttcctgagtcttttcattgctacctctaatagtcctgtctcccacttcccactcgttcccctcctcttccgagctgctttgtgggctccaggcctgtactcatcggcaggtgcatgagtatctgtgggagtcctctagagagatgagaagccaggaggcctgcaccaaatgtcagaagcttggcatgacctcattccggccacatcattctgtgtctctgcatccatttgaacacattattaagcaccgataataggtagcctgctgtggggtatacagcattgactcagatatagatcctgagctcacagagtttatagttaaaaaaacaaacagaaacacaaacaatttggatcaaaaggagaaatgataagtgacaaaagcagcacaaggaatttccctgtgtggatgctgagctgtgatggcgggcactgggtacccaagtgaaggttcccgaggacatgagtctgtaggagcaagggcacaaactgcagctgtgagtgcgtgtgtgtgatttggtgtaggtaggtctgtttgccacttgatggggcctgggtttgttcctggggctggaatgctgggtatgctctgtgacaaggctacgctgacaatcagttaaacacaccggagaagaaccatttacatgcaccttatatttctgtgtacacatctattctcaaagctaaagggtatgaaagtgcctgccttgtttatagccacttgtgagtaaaaatttttttgcattttcacaaattatactttatataaggcattccacacctaagaactagttttgggaaatgtagccctgggtttaatgtcaaatcaaggcaaaaggaattaaataatgtacttttggctaaaaaaaaaaaaaaaaaaaaaaaaaaaaaa

SEQ ID NO: 56592 - DNA, 3486 bp, Homo Sapiens
agcaatcatctggggggctaaatgtgacaaaccgagaagatggccaagatcaacacccaatactcccacccctccaggacccacctcaaggtaaagacctcagaccgagatctcaatcgcgctgaaaatggcctcagcagagcccactcgtcaagtgaggagacatcgtcagtgctgcagccggggatcgccatggagaccagaggactggctgactccgggcagggctccttcaccggccaggggatcgccaggctgtcgcgcctcatcttcttgctgcgcaggtgggctgccaggcatgtgcaccaccaggaccagggaccggactcttttcctgatcgtttccgtggagccgagcttaaggaggtgtccagccaagaaagcaatgcccaggcaaatgtgggcagccaggagccagcagacagagggagaagcgcctggcccctggccaaatgcaacactaacaccagcaacaacacggaggaggagaagaagacgaaaaagaaggatgcgatcgtggtggacccgtccagcaacctgtactaccgctggctgaccgccatcgccctgcctgtcttctataactggtatctgcttatttgcagggcctgtttcgatgagctgcagtccgagtacctgatgctgtggctggtcctggactactcggcagatgtcctgtatgtcttggatgtgcttgtacgagctcggacaggttttctcgagcaaggcttaatggtcagtgataccaacaggctgtggcagcattacaagacgaccacgcagttcaagctggatgtgttgtccctggtccccaccgacctggcttacttaaaggtgggcacaaactacccagaagtgaggttcaaccgcctactgaagttttcccggctctttgaattctttgaccgcacagagacaaggaccaactaccccaatatgttcaggattgggaacttggtcttgtacattctcatcatcatccactggaatgcctgcatctactttgccatttccaagttcattggttttgggacagactcctgggtctacccaaacatctcaatcccagagcatgggcgcctctccaggaagtacatttacagtctctactggtccaccttgacccttaccaccattggtgagaccccaccccccgtgaaagatgaggagtatctctttgtggtcgtagacttcttggtgggtgttctgatttttgccaccattgtgggcaatgtgggctccatgatctcgaatatgaatgcctcacgggcagagttccaggccaagattgattccatcaagcagtacatgcagttccgcaaggtcaccaaggacttggagacgcgggttatccggtggtttgactacctgtgggccaacaagaagacggtggatgagaaggaggtgctcaagagcctcccagacaagctgaaggctgagatcgccatcaacgtgcacctggacacgctgaagaaggttcgcatcttccaggactgtgaggcagggctgctggtggagctggtgctgaagctgcgacccactgtgttcagccctggggattatatctgcaagaagggagatattgggaaggagatgtacatcatcaacgagggcaagctggccgtggtggctgatgatggggtcacccagttcgtggtcctcagcgatggcagctacttcggggagatcagcattctgaacatcaaggggagcaagtcggggaaccgcaggacggccaacatccgcagcattggctactcagacctgttctgcctctcaaaggacgatctcatggaggccctcaccgagtaccccgaagccaagaaggccctggaggagaaaggacggcagatcctgatgaaagacaacctgatcgatgaggagctggccagggcgggcgcggaccccaaggaccttgaggagaaagtggagcagctggggtcctccctggacaccctgcagaccaggtttgcacgcctcctggctgagtacaacgccacccagatgaagatgaagcagcgtctcagccaactggaaagccaggtgaagggtggtggggacaagcccctggctgatggggaagttcccggggatgctacaaaaacagaggacaaacaacagtgaaaatgcagcatctgtctcctgcttcacagggtcgactgtcagggtgaccgtatgtggccgcagctgtgtggcatggaacttggtcagggttgaattccagctctactcaccctttgaaagctgtgtgactgcctgagagaacctgtttcttcacctaaaaaatgggactttttgtctcagtcccagtgaagtgccaggtttgattgtgaagtccgcatgaaacactgcaccaggcagggctttgcaaagtgcaaggtatccccagtccaagtatatgaaaacgtgcacacaggactctcattacttttttatggaatctgcaaggtgtttttaggctttttaatctgattttcttataaatgaaagattatttagtcacctttctcctgtccaacttcaccaccacctgataatgggtatataacaggaagctgaaggtacaacatagtgactaaaattcagacttacacaagacagtttgaggcatatttcttaatctggtatcacctcgtgtgttctttggggccctagaaaccctggcttttgggagtgctatggcaagtagaagttctgccggatggaaagaggctgccccatttgaggtcatttaaaatctgtgaagcaaatccagactccttgccgttcagccactgtgaaaccagaatctgcttcacagaaaaaagcatctcagttaggagaagagacatcccctccttctcacttgccaaagagattcaaagacagcccctatcctccattcttgagtcagggccctaggtgacctattctaactcaaggaggagagctatgtacagggagagcattttagattgaaggttggaatggtgtactaaaccaaaaaagctgacaactgagagttttagaagattagaccattaggaacgtatctttgcaaactgcccattcacccatgaagaggaagcctcaagatcccttggaattgcatcccaaggcaaagcttttggctcaccgaaagctcacagattgcagaaattagcttttttaaaaaacaaaccccagtaaatataatttcattaacattttataacagatttatatttttgagttccgtgattgcaaattatgacctcaaattccatccttcacttatgtaacatgttgcaaattacccaaagatgagtctttcttctttctttcctttttcctttcttcttcctttccttttttctttcttcttccttctttcttcctttttctctctcctcttttcctcctcaaaatgtatatattttaaaagccttaactgttagttatgcctgcattcatatttgcacaggaaaaataaagacctggatttaaaaataaaaaaaaaaaaaaaaa

SEQ ID NO: 56593 - DNA, 3072 bp, Homo Sapiens; identical to SEQ ID NO: 31486

SEQ ID NO: 56594 - DNA, 2885 bp, Homo Sapiens
gttgtcgtgatgattccgcggccagcggatcgctgcgagtggccttgaaggcagctgctgcaggtgaagagtaggcggcggggcagagagcggcctccgagggtcacctgaatggttgagcatggaccctgttgctacccacagctgccatctgctccagcaactgcatgagcagcgaatccaaggcctgctttgtgactgtatgttggtggtaaaaggagtctgctttaaagcgcataagaatgtcctggcagcattcagccagtattttaggagcctctttcagaattcttcaagccagaagaatgatgtttttcacttggatgttaaaaatgtcagtggcatagggcagatcctggacttcatgtacacttctcatctagatcttaaccaggacaatatacaagtaatgctggacacagcacagtgtttgcaagttcaaaatgttctgagtctgtgtcacacatttttaaaatcagccactgtagtacagccacctggcatgccttgtaatagtacattgtctctacaaagcaccctgaccccagatgccacttgtgttatcagtgaaaactacccccctcatttactgcaggaatgttcagcagatgcacagcagaacaaaacgttggatgaatcgcatccgcatgcttcaccatcagttaatcgtcatcactccgcaggtgaaatctcaaaacaagctcctgatacttcagatggcagctgcacagaactgcctttcaaacagccaaattactattacaaactcagaaacttttacagtaagcagtaccataaacacgcagctggtcccagtcaggagagagttgttgagcagccttttgctttcagcacctctacagaccttaccacggtagagagccagccttgtgccgtcagtcattctgaatgcatcctggagtctcccgagcacttaccttccaacttcctggcccagcctgtgaatgactctgccccacatcctgagtcagacgccacatgccaacaacctgtcaagcagatgaggctcaaaaaggccattcatctgaagaagctcaatttcctgaagtcacagaaatacgcagagcaagtatctgaacccaagtcagatgatggtttgacaaagaggttggaatctgctagtaaaaataccctagagaaagctagcagccaaagtgctgaagaaaaagaaagtgaagaagtcgtcagttgtgagaattttaattgcattagtgagacggagaggcctgaagacccggctgccctggaagaccagtcccagacacttcagtcccagagacaatacgcgtgtgaattatgcgggaaaccttttaaacacccaagcaacttggagcttcacaaacggtctcatacaggtgagaaaccttttgaatgtaacatttgtgggaaacatttctctcaggcaggtaacttgcagactcacttacgacggcattctggtgaagaaccatacatctgcgagatctgtggaaagaggtttgcagcctctggcgacgtccagcgtcacattattattcactcaggagaaaaaccacacttgtgtgacatctgtggtcgagggtttagtaacttcagtaatttgaaggagcacaaaaagacacacacggctgataaaatcttcacctgtgatgagtgtggaaagtcttttaatatgcaaaggaagttagtaaagcacagaattcggcacacgggggagcggccttacagctgctctgcctgcgggaaatgtttcgggggatcaggtgacctccgcaggcatgtccgcactcacactggggagaagccgtacacatgtgagatctgtaacaagtgctttacccgctctgcggtgctccggcggcacaagaagatgcactgcaaagctggtgacgagagcccagatgtgctggaggagctcagccaagccatcgagacctccgacctcgagaaatctcagagctcagactctttctcccaagacacgtctgtgacgctgatgccagtgtcggttaaactccctgtccacccagtggaaaattctgtggcagaatttgatagccactctggcggctcctattgtaagttacggtccatgatccaacctcatggagttagtgaccaggagaagctgagtttggatcctggtaaacttgccaagccccagatgcagcagacacagcctcaggcctatgcttactcggatgtggacaccccagccggtggcgaaccactgcaggccgatggcatggccatgatccgttcctctctggctgctttggacaaccacggcggtgaccccctgggcagtcgagcatcttccaccacttataggaactcagagggtcagtttttctccagcatgactctctgggggctagcgatgaagacgctgcagaatgaaaacgagttagaccagtgatgtaccgcgcttctccacggtagaggcgtgttctcagtttagcaggctggtgttaaggctgtaggaggacccagtttccccatgacagtgccttctaactagccagagaataggtagcttccctcctgatgatggctcataatctgaagcatcttgagctgggggtgtgagggggagggcctgctggctcaccgtgaggcagccgcgggagggagcgctgacgtcacagaagcgaaggcttgatgctgtctcagcagcctcagctgtgggggggaagcgcgtgtgcatcgtgtcaactactgtacatgttggtcatgtgaaaggaattatatatgtatagtattacaagtatttttgcatttttacaagattgaaatttgtagcattttgtattatttacacagaatttatttgtatatgaaactcataccataatttaattcgaataaatgaaacttttctatat

SEQ ID NO: 56595 - DNA, 4266 bp, Homo Sapiens
tggggtgacatgagtgactccaaggaaccaagactgcagcagctgggcctcctggaggaggaacagctgagaggccttggattccgacagactcgaggatacaagagcttagcagggtgtcttggccatggtcccctggtgctgcaactcctctccttcacgctcttggctgggctccttgtccaagtgtccaaggtccccagctccataagtcaggaacaatccaggcaagacgcgatctaccagaacctgacccagcttaaagctgcagtgggtgagctctcagagaaatccaagctgcaggagatctaccaggagctgacccagctgaaggctgcagtgggtgagcttccagagaaatctaagctgcaggagatctaccaggagctgacccggctgaaggctgcagtgggtgagcttccagagaaatctaagctgcaggagatctaccaggagctgacctggctgaaggctgcagtgggtgagcttccagagaaatctaagatgcaggagatctaccaggagctgactcggctgaaggctgcagtgggtgagcttccagagaaatctaagcagcaggagatctaccaggagctgacccggctgaaggctgcagtgggtgagcttccagagaaatctaagcagcaggagatctaccaggagctgacccggctgaaggctgcagtgggtgagcttccagagaaatctaagcagcaggagatctaccaggagctgacccagctgaaggctgcagtggaacgcctgtgccacccctgtccctgggaatggacattcttccaaggaaactgttacttcatgtctaactcccagcggaactggcacgactccatcaccgcctgcaaagaagtgggggcccagctcgtcgtaatcaaaagtgctgaggagcagaacttcctacagctgcagtcttccagaagtaaccgcttcacctggatgggactttcagatctaaatcaggaaggcacgtggcaatgggtggacggctcacctctgttgcccagcttcaagcagtattggaacagaggagagcccaacaacgttggggaggaagactgcgcggaatttagtggcaatggctggaacgacgacaaatgtaatcttgccaaattctggatctgcaaaaagtccgcagcctcctgctccagggatgaagaacagtttctttctccagcccctgccaccccaaacccccctcctgcgtagcagaacttcacccccttttaagctacagttccttctctccatccttcgaccttcacaaaatctctgggactgttctttgtcagattcttcctcctttagaaggctgggtcccattctgtccttcttgtcatgcctccaatttcccctggtgtagagcttgtttttctggcccatccttggagctttatgagtgagctggtgtgggatgcctttgggggtggacttgtgttccaagaatccactctctcttccttttggagattaggatatttgggttgccatgtgtagctgctatgtcccctggggcgttatctcatacatgcaaacctaccatctgttcaacttccacctaccacctcctgcacccctttgatcggggacttactggttgcaagagctcattttgcaggctggaagcaccagggaattaattcccccagtctaccaatggcacccagagagggcatggaggctccacgcaaccccttccacccccacatcttcctttgtcttatacatggcttccatttggctgtttctaagttgtattctttattttattattattattactatttttcgagatggagtttcactcttgtcgctcaggctggagtgccatggcgcgatcttggctcactgcaacctctgcctcccgggttcaagtgattctcctgcctcagcctcacgagtagctggaattacaggcaggcgccaccaggcccggctaattttttgtatttttagtacagacggggtttctccgtgttggtcaggctggtcttgaactcccgacctcagatgatctgcccgcctcggcctcccaaaattgctgggattacaggtgtgagccaccgcgcctggcctattattttttgtaagaataaaacaggtttactgggatttgggactctgaacagttctgtctctactacctgatctcctcctaccacgactttgggatctagaggagctttggctccggctgtgacggctccggccgttctcactgcggctgcaccggcccccgctgcggtcactatttcttcctctgcttggtgaattgtgcctctcctggctctttgacatgtgctagtgagatttcttccttttcctttcggattccccatttcttttgtaggaatggtctggactagggttctccttccccgcagcctgtagtattcatcgtggtggcccatcctctctctccccttggagctcttgccaaaggaggagacaagcagaggtctctattggatttctcaacacctgaagaaagttgcagtgttttcctcttggacattgttgtatttcaaataaaccacaaatcatcattttccaccgagccactgggcagaattcacactgaagctgtcgtcctgcgtacataccatcgtccgttaaacagagaaagagctgcttggcattcttcttccgactggtactgaacatatatacttgcccctcaggtgaggttccaagttgcaactgaccttgaactgaatcactctccccacgttattttttaattactatttttttttaaagatggggtcttgctctgtcgccaggctggagtgcagtggcgcgatctaggctcactgcaacttccgcctcccgggttcaagcgattctcctgcctcagcctcccgagtagctgggactctactaaaagtacaaaaattagctggcgtgcaccaccgcgcccagctaattcttgtatttttggtagagacggggtttcaacatgttgaccaggatggtctcgatctcttgacctcgtgattcgcccgccgcgtcctcccaaagtgctgggattacaggcctgagccaccgcgcccagtctctccccacgttcttgaactcgggcagcacatcctcacagaaatctaggaactgttggtaggtttcttcctcgctgtactccaggcttgcttcggagtcatagtcatccctcctgcactgctcctttccaaacactgtaaacatgcttttaataagaagggtaggactggatgttgggaaatcatgtgaacatctatctccaaatctgcaagctcctgttttactgtagaagggacaattaactccatccttctccatgactctgaaatccaagggggggttccgggttttgccatgtggcgccattttccaactcattttcagcctgatccagcatcttctggacagcttccggtttttgtttcttctgtcgtttctgttcctcctcctctctctctttcctctgctgttcttcccattgttcctttaactttcgctcttgttcttgccgttttctagccacctcttccttttccttctttattctgaattcttcttgtgccttctgctctctcagcaaccactcctcatgtaatctttgcctctctcttccccatagcttttctagttgttgtttttcaataaaagtgtcctcctctttctgtgagagtcctgagtccctcagtggagcaagttcctgctggcgtttctttcgtttctccttcttcagggcggccctgtactttttgtggcttggtttctctggaaatgtcaccttttcgggcgcagccatcttgccggcaccgccccgcccctctagttgtatcctttataataaaatggtaaacattgtaaccgcagattcagcccaatctggttcaactttgtgtaataaaatggcgagttgtttttcagttgtcgtggacccccaggttgcaagttacataccctgggcatgtccagatgaacgaagcgtgcaaatccacgtggaacctaagtgctcagactgaggaacagggactgagttaagaagtggacaccacgtggcatgatccttgatccaatcagattgagccctggcgtgatccagtcagatcaagcctcctgaatcccctcattacaagatccaatcatatcatgcctcactaccctctgtatataaaatctgccccagcctccaacttggagagacagatttgggccagactcctgtgtccttgcttggctgccttgcaataaatttttctctctaca

SEQ ID NO: 56596 - DNA, 2302 bp, Homo Sapiens
gacttactcctggacttaaatggtgtgaccaggatctagtttctttctctctactctggctttattttctagtgcaggctctgttcacaagcaggctccatcctgtagtcccaagatggttgccccaggtccctggcccccttggactatggacatccagcagaaaagaggatgcttttctgcttaccatggcccggatatatcagtctcactggcgtgattgatcatgacttggatcatgtgcttctcccgctggtgttggagaatctcatgtgctgttaacttctaaacaggatgcaccccttagagtgaaagtttggtcagtctcaaccaaacaagttggctagaaagattggaatataacagaaaagaggaagaggagaatggatgttgggggtacagctaacaatgtactacagaaaaactattcagctgctttaggataatttgtctcttgagtggtgttgatttaaagatctttcttgagctggcctgaatgaatgattaatcagtcactctagaattggggcttcattatcattcattaacatggaactctatggagatcatgaccctggcttgtgctagtaaagtgatttgtattttaatctctcacctctttttcttgtattttcatttgagtctttaggccagtatgctagtgatggccagttacctttgatcttgagtcttactttctgattccaggctatgtattatctcctttctaaaggaccattttgtttgcaaactacagaacagttccttgttctttgcatgtggtctttcctacagtttgagaggagagcctccagctgtccttagtatccatcatttgtcttaacctttctaggatgtttacctaggtccctcagtaactgtagtcataataatagcaagcactcaatatagtacttatactgtgtgccaggcactgtgggaaatgccggcatatattaacagttaatcccataacaatcatatgagagagattattactgtctacattgtatagatgataaaacaggttccagagagattaagaagcttgcccaagggcttactgctgctaagtggctgaaggcatactaactctgcagtgtatactctttttcagtattcagtaaagtaaaaaaaaaaaaaagatgtaaagctcattggcagagagcattgctagtgaggtaattcaaacatgttaaaaagatctttggaattctcaggaatgcatcctgtggtctagaagaaaccagggcaaaatattgaaaaggaaagatgctgcttccaggttaaatgatactggatgggggggcaggaattgcattcagtgaatttacaagataccaggaaacccatctgttggaggaaggtaatgaaggagattatcttatcctacttattattttacttccttattctgtgggacagaagaatctcttgagtcctctaaaaaactatatgctgatagcaggagttacagaacaattcagtagtgtctggaatagaacagtggtttgaaaagtagagggcttgttaaagcacgggatgctgattcagtaggccttgagtggggataatttacatatccaacaggccaggtgatgccctggcttggggatcacattttgtgactgatgcagagtactgatggtcatccagtccccttccttcggtgtttgagaccacttcatctggaccgagctaaagtctaggaagaaataaagtttcaaacccagtagagttacctcaaagatacacttgagacccttttcagaagatggcaccgaaagtgaagaaggaagctcctggcccgcctaaagctgaagccaaagcaaaggctttaaaggccaagaaggtagtgttgaaaggtgtccacggccacaaaaaaaagaagatccgcatgtcacccaccttccagcggcccaagacactgagactctggaggccgcccagatatcctcggaagaccacccccaggagaaacaagcttgaccactatgctatcatcaagtttcctctgaccactgagtttgctatgaagaagataaaagacaacaacacccttgtgttcactgtggatgttaaagccaacaagcaccagatcaaacaggctgtgaagaagctctgtgacattgatggggccaaggtcaacaccctgatggagagatgaaggcatatgttccactggctcctgattatgatgctttggatgttgccaacaaaattgggatcatccaaactgagtccatctggctaattctaaatatacatatctcttttcaccaaaaaaaaaaaaaaaaaaaaa

SEQ ID NO: 56597 - DNA, 2015 bp, Homo Sapiens; identical to SEQ ID NO: 27948

SEQ ID NO: 56598 - DNA, 1271 bp, Homo Sapiens
cagcgtggaggctccaaggaccaagtcctgcgcctctttggcggggtgtgtgcaggaggaggggggataaataggaggctccctcctcccggcgacattcacggagccggccggcctcccgccctgggtgtttccctgccttgtagccagggtgccagcctgggaagtagtttcgtttccttctgcctccgggattagtttccaggcaccctctcaggcgcccgaggcccgggaagggggcgaagaaggagggagacttgtctaggggctgcccggcccggcagagcggggttgatggaccgggccgcccggtgcagcggcgccagctccctgccactgctcctggcccttgccctgggtctagtgatccttcactgtgtggtggcagatgggaattccaccagaagtcctgaaactaatggcctcctctgtggagaccctgaggaaaactgtgcagctaccaccacacaatcaaagcggaaaggccacttctctaggtgccccaagcaatacaagcattactgcatcaaagggagatgccgcttcgtggtggccgagcagacgccctcctgtgtctgtgatgaaggctacattggagcaaggtgtgagagagttgacttgttttacctaagaggagacagaggacagattctggtgatttgtttgatagcagttatggtagtttttattattttggtcatcggtgtctgcacatgctgtcaccctcttcggaaacgtcgtaaaagaaagaagaaagaagaagaaatggaaactctgggtaaagatataactcctatcaatgaagatattgaagagacaaatattgcttaaaaggctatgaagttacctccaggttggtggcaagctgcaaagtgccttgctcatttgaaaatggacagaatgtgtctcaggaaaaacagctagtagacatgaattttaaataatgtatttactttttatttgcaactttagtttgtgttattattttttaataagaacattaattatatgtatattgtctagtaattgggaaaaaagcaactggttaggtagcaacaacagaagggaaatttcaataacctttcacttaagtattgtcaccaggattactagtcaaacaaaaaagaaaagtagaaaggaggttaggtcttaggaattgaattaataataaagctaccatttatcaagcatttaccatgtgctaataagtttgaaatatattatttcctttattcctttcagcaatccatgagatagctattataatcctc

SEQ ID NO: 56599 - DNA, 3109 bp, Homo Sapiens; identical to SEQ ID NO: 31060

SEQ ID NO: 56600 - DNA, 4201 bp, Homo Sapiens
cgcagccccggggccgcgccgcagagtcgggcttcctggatacatagaggcttgtgccaggcggggtgggaagactggattttgcagtggaagcagcatctcttccgtctgggacctggctgagggcgtccccaccctggggggagcagaggaccagccctgacctagccgggcccagcctcgtcctgcccggcctgagcgccccgcccagcagccggctctggcccaccggggtccgggagcgcgggcgccatggacaagatcttggaggcggtggtgacgtcgtcatacccggtcagcgtgaagcaggggctggttcggcgcgtgctggaggcggcgcggcagccgctggagcgtgagcagtgcctggcgctgctggcgctgggcgcgcgcctctacgtgggcggcgcggaggagctgccgcgccgcgtgggctgccagctgctgcacgtggccggccgccaccaccccgacgtcttcgccgagttcttcagcgcgcgtcgcgtgctgcgcctgctgcagggtggcgccggccccccgggcccccgcgcgctcgcctgcgtgcagctgggtctgcagctgctgcccgaggggcctgcggccgacgaggtgttcgcgctgctgcggcgcgaggtgctgcgcaccgtgtgcgagcgcccgggccccgcggcctgcgcgcaggtggcacggctgctggctcgccacccgcgctgtgtgcccgacggaccccaccgcctgctcttctgccagcagctggtgcgttgcctcggccgcttccgctgcccagccgaaggcgaggagggcgccgtggagttcctagagcaggcccagcaggtgagcgggctcctggcgcagctgtggcgcgcacagcccgccgccatcctgccctgcctcaaagagctgttcgcagtcatctcctgcgcaggaggagccaccatctagcgccctggccagcgtggtccagcacctcccattggagctcatggatggtgttgtccggaacctcagcaatgatgacagtgtgacagactcgcagatgctgactgccattagcaggatgattgactgggtgtcctggcccctggggaagaatattgacaagtggatcattgcactgctgaagggcctggctgctgttaagaagttcagcatcttgatcgaggtttcgctcaccaaaattgagaaggttttctctaagctgctgtaccccatcgtccggggagctgccttgtctgtgctcaagtacatgctcctgaccttccagcactcccacgaagccttccacctgctcctccctcacatcccccccatggtggcctctctggtcaaggaggactcgaactcggggaccagctgcctggagcagctggcggagctggtccactgcatggtgttccggttcccgggcttcccggatctgtatgagcctgtcatggaggccatcaaggacctccatgttcccaatgaggaccgcatcaagcagctgctggggcaggatgcctggacttcgcagaagagcgagctggcgggtttctatccccggctcatggccaagtcagacacgggcaagattggtctcatcaacctgggcaacacatgctatgtcaacagcatccttcaggccttattcatggcgtctgacttcagacattgtgtgctccgcttgactgagaacaactcacagcccctgatgaccaagctgcagtggctctttggcttcctagaacacagccagcggcctgccatttccccagagaacttcctctccgcatcctggacgccctggttcagccctggcacccagcaggactgctcggagtatctgaagtacctgctggatcggctgcacgaagaggagaaaacgggcacaaggatctgccagaaactcaagcagtccagctcgccctctccgcccgaggagcccccggccccaagttcaacctctgtggaaaaaatgtttggaggcaagatagtgactcggatctgctgtctctgctgcctcaacgtctcctcccgggaggaggccttcacggacctctctctcgccttccctcctcctgagcgctgtcgccgccgccgcctgggctctgtgatgcgccccacagaagacatcacagcccgggagttgcccccaccaaccagtgcacaggggccaggcagggtgggtcctcggaggcaaaggaaacactgcatcacagaggacaccccccccaccagcctgtacatcgaaggcctggactccaaggaagctggtgggcagagcagtcaggaggaaaggatagagagggaggaagaagggaaggaggagagaacggagaaggaagaagtgggggaggaggaggaaagcaccagaggggaaggagagagggagaaagaggaggaggtggaagaggaagaagagaaggtggagaaggagacagaaaaggaggctgagcaggaaaaggaagaagacagcctgggagcggggacccacccggatgctgccatcccctccggggagcggacatgtggctctgagggctcccgctccgtcctggacctggttaactacttcctgtcccccgagaagctgacagcagaaaaccgctactactgcgagtcgtgtgcctccctgcaggatgccgagaaggtggtggagctgagccaagggccgtgctacctcatcctcacactgctgcgcttctctttcgacctgcgcaccatgcggcgccgcaagatcctggatgacgtctccatccccctgctgctccgcctgccactggctggtggccgtggccaggcctatgacctctgcagtgtggtggtgcactctggagtgtcttcggagagtggtcactactactgctatgcccgtgagggcgctgcccgccctgccgcttctctgggaactgccgataggccagagcccgagaaccagtggtacctgttcaatgacactcgggtgtccttctcttccttcgaatctgtcagcaacgtcacctccttcttccctaaggacacagcctatgtgctgttttaccggcagcggcccagggaggggcccgaggctgagttgggctcttctagagtccggacagagcccaccctgcacaaggacttgatggaagccatttccaaagacaacatcctttacctacaggagcaggagaaggaggcccggagcagggcggcctacatctctgcactccccacatctccgcactgggggaggggctttgatgaagacaaggatgaggatgaaggctctccagggggctgcaatcctgcaggtggcaatggtggtgacttccacagactggtcttctaatgtgaacctgctgccaacctgaccccttccctccaggagccaggtagggcctgagggaagctgtggaggcaggccctaccaagaggaaggatggtacagctcatggcaccttagtcctcagcctgatgaagggtacacagagattctctcagatatggaagtaagacctaagtccctttcattggggatcagtcccattaaaactttacacccaagtgtcctggttaacttgaagcagccgagatgggcacacacgggtctttgcctccccctccttccctagcaggctccccatgcgggaagatctgatgatgttcaggaaacaggctagacctcagctccaatgttttgacatcaagtactattttccttccgactgctgtacggtataaagcacagcaggatccaagccttgcacaaaggggtggggggggcagtgtctcctctggctgtcctgtttgtttgtttctcatatgggggtggggggtacctgcactgtctgtacctttctgagaagaacagagaccgagacctgcccccttaccaagcgccactgcatggttttgggggggggggcggggggctagcttctcacagcaggaggcctttgcccccacagcccctccacgcctgcctcagggcctgagaagccaccacttgtatcccccttgtggttagagtcctgattttactgcaaaggtgttcatgttccttgtgaagtgtgggctcttaggaagcctgtgggctcctctgagcagttggcctttgtagctgcaacagcagccacctgcaggttgggtgaagtgccctgacactgctgtagcccccttctaacttctaaccgaagacaagacagacacccatgttcataaataaataaaagtaagcctaagc

SEQ ID NO: 56601 - DNA, 2090 bp, Homo Sapiens
ttcggcacgagtaagaccaggatgtctctgaaatggacgtcagtctttctgctgatacagctcagttgttactttagctctggaagctgtggaaaggtgctagtgtggcccacagaatacagccattggataaatatgaagacaatcctggaagagcttgttcagaggggtcatgaggtgactgtgttgacatcttcggcttctactcttgtcaatgccagtaaatcatctgctattaaattagaagtttatcctacatctttaactaaaaatgatttggaagattctcttctgaaaattctcgatagatggatatatggtgtttcaaaaaatacattttggtcatatttttcacaattacaagaattgtgttgggaatattatgactacagtaacaagctctgtaaagatgcagttttgaataagaaacttatgatgaaactacaagagtcaaagtttgatgtcattctggcagatgcccttaatccctgtggtgagctactggctgaactatttaacataccctttctgtacagtcttcgattctctgttggctacacatttgagaagaatggtggaggatttctgttccctccttcctatgtacctgttgttatgtcagaattaagtgatcaaatgattttcatggagaggataaaaaatatgatacatatgctttattttgacttttggtttcaaatttatgatctgaagaagtgggaccagttttatagtgaagttctaggaagacccactacattatttgagacaatggggaaagctgaaatgtggctcattcgaacctattgggattttgaatttcctcgcccattcttaccaaatgttgattttgttggaggacttcactgtaaaccagccaaacccctgcctaaggaaatggaagagtttgtgcagagctctggagaaaatggtattgtggtgttttctctggggtcgatgatcagtaacatgtcagaagaaagtgccaacatgattgcatcagcccttgcccagatcccacaaaaggttctatggagatttgatggcaagaagccaaatacattaggttccaatactcgactgtacaagtggttaccccagaatgaccttcttggtcatcccaaaaccaaagcttttataactcatggtggaaccaatggcatctatgaggcgatctaccatgggatccctatggtgggcattcccttgtttgcggatcaacatgataacattgctcacatgaaagccaagggagcagccctcagtgtggacatcaggaccatgtcaagtagagatttgctcaatgcattgaagtcagtcattaatgaccctgtctataaagagaatgtcatgaaattatcaagaattcatcatgaccaaccaatgaagcccctggatcgagcagtcttctggattgagtttgtcatgcgccacaaaggagccaagcaccttcgagtcgcagctcacaacctcacctggatccagtaccactctttggatgtgatagcattcctgctggcctgcgtggcaactgtgatatttatcatcacaaaattttgcctgttttgtttccgaaagcttgccaaaacaggaaagaagaagaaaagagattagttatatcaaaagcctgaagtggaatgactgaaagatgggactcctcctttatttcagcatggagggttttaaatggaggatttcctttttcctgtgacaaaacatcttttcacaacttaccttgttaagacaaaatttattttccagggatttaatacgtactttagttggaattattctatgtcaatgatttttaagctatgaaaaatacaatggggggaaggatagcatttggagatatacctaatgttaaatgacgagttactggatgcagcacgcaacatggcacatgtgtatacatatgtagctaacccttcgttgtgcacatgtaccctaaaacttaaagtataatttaaaaaaagcaaaaaaaaaaaataccaactcttttttttaaaccaggaaggaaaatgtgaacatggaaacaacttctagtattggatctgaaaataaagtgtcatccaagccataaaaaaaaa

SEQ ID NO: 56602 - DNA, 3088 bp, Homo Sapiens
ccccttttccagaatcacttgcactgtcttgttcttgaatgagaaaggaagaaaagagcctcccattactcagacccgtgtaaacattattccccccaggagaaaatggtgttattcaaatgaatcataataaaatagcctctaaacagtttctaagcgggagcctccgtggaactcagcgctccgctcctcccagttcctaagaggtcccgggattcttgagctgtgcccagctgacgagcttttgaagatggcacaataaccgtccagtgatgcctgaccatgacagcacagccctcttaagccggcaaaccaagaggagaagagttgacattggagtgaaaaggacggtagggacagcatctgcattttttgctaaggcaagagcaacgttttttagtgccatgaatccccaaggttctgagcaggatgttgagtattcagtggtgcagcatgcagatggggaaaagtcaaatgtactccgcaagctgctgaagagggcgaactcgtatgaagatgccatgatgccttttccaggagcaaccataatttcccagctgttgaaaaataacatgaacaaaaatggtggcacggagcccagtttccaagccagcggtctctctagtacaggctccgaagtacatcaggaggatatatgcagcaactcttcaagagacagccccccagagtgtctttccccttttggcaggcctactatgagccagtttgatatggatcgcttatgtgatgagcacctgagagcaaagcgcgcccgggttgagaatataattcggggtatgagccattcccccagtgtggcattaaggggcaatgaaaatgaaagagagatggccccgcagtctgtgagtccccgagaaagttacagagaaaacaaacgcaagcaaaagcttccccagcagcagcaacagagtttccagcagctggtttcagcccgaaaagaacagaagcgagaggagcgccgacagctgaaacagcagctggaggacatgcagaaacagctgcgccagctgcaggaaaagttctaccaaatctatgacagcactgattcggaaaatgatgaagatggtaacctgtctgaagacagcatgcgctcggagatcctggatgccagggcccaggactctgtcggaaggtcagataatgagatgtgcgagctagacccaggacagtttattgaccgagctcgagccctgatcagagagcaggaaatggctgaaaacaagccgaagcgagaaggcaacaacaaagaaagagaccatgggccaaactccttacaaccggaaggcaaacatttggctgagaccttgaaacaggaactgaacactgccatgtcgcaagttgtggacactgtggtcaaagtcttttcggccaagccctcccgccaggttcctcaggtcttcccacctctccagatcccccaggccagatttgcagtcaatggggaaaaccacaatttccacaccgccaaccagcgcctgcagtgctttggcgacgtcatcattccgaaccccctggacacctttggcaatgtgcagatggccagttccactgaccagacagaagcactgcccctggttgtccgcaaaaactcctctgaccagtctgcctccggccctgccgctggcggccaccaccagcccctgcaccagtcgcctctctctgccaccacgggcttcaccacgtccaccttccgccaccccttcccccttcccttgatggcctatccatttcagagcccattaggtgctccctccggctccttctctggaaaagacagagcctctcctgaatccttagacttaactagggataccacgagtctgaggaccaagatgtcatctcaccacctgagccaccacccttgttcaccagcacacccgcccagcaccgccgaagggctctccttgtcgctcataaagtccgagtgcggcgatcttcaagatatgtctgaaatatcaccttattcgggaagtgcaatgcaggaaggattgtcacccaatcacttgaaaaaagcaaagctcatgtttttttatacccgttatcccagctccaatatgctgaagacctacttctccgacgtaaagttcaacagatgcattacctctcagctcatcaagtggtttagcaatttccgtgagttttactacattcagatggagaagtacgcacgtcaagccatcaacgatggggtcaccagtactgaagagctgtctataaccagagactgtgagctgtacagggctctgaacatgcactacaataaagcaaatgactttgaggttccagagagattcctggaagttgctcagatcacattacgggagtttttcaatgccattatcgcaggcaaagatgttgatccttcctggaagaaggccatatacaaggtcatctgcaagctggatagtgaagtccctgagattttcaaatccccgaactgcctacaagagctgcttcatgagtagaaatttcaacaactctttttgaatgtatgaagagtagcagtcccctttggatgtccaagttatatgtgtctagattttgatttcatatatatgtgtatgggaggcatggatatgttatgaaatcagctggtaattcctcctcatcacgtttctctcattttcttttgttttccattgcaaggggatggttgttttctttctgcctttagtttgcttttgcccaaggcccttaacatttggacacttaaaatagggttaattttcagggaaaaagaatgttggcgtgtgtaaagtctctattagcaatgaagggaatttgttaacgatgcatccacttgattgatgacttattgcaaatggcggttggctgaggaaaacccatgacacagcacaactctacagacagtgatgtgtctcttgtttctactgctaagaaggtctgaaaatttaatgaaaccacttcatacatttaagtattttgtttggtttgaactcaatcagtagcttttccttacatgtttaaaaataattccaatgacagatgagcagctcacttttccaaagtaccccaaaaggccaaattaaaaaaaaaaaaaaaaaaa

SEQ ID NO: 56603 - DNA, 1839 bp, Homo Sapiens
cgccatctcccatagctgtcgcctgcagctgagaaagggttgctgtcccagcaggccaggtccagggctgggtataagtaagcaagaagagggcctgggagaagagtctgacgagcaaggggaaggtagccaaggatggagtgaaatacagggtgacctgtgtttttcccctgggtcctttggaaattatgggaaaaaatcaaataccaaggaagaaaaatctataatgaaattagatgtggatttctttttatgtattcagcttgggggcttatgatacttctagtacccaaagagatgcggtcttgctgtgttgcctaggctggtctcaaactcctgctctcaagtgatcctcctgcctcagcctcctgagtacatttatatttaaagtaattattgatggctctgcctgcttaggactctgcccagccaggaaggaaacctacaggaggaagaatggctgcagggtggctgacaacctggtcacagaactcagtaaccttccaggaagtggcagtggacttttcccaggaggagtgggcattgctggaccctgctcaaaaaaatctatacaaagatgtgatgctggagaactttaggaacctggcctcagtagggtatcagctctgcagacacagtctgatctccaaggtggatcaagaacagctgaagacagatgaaagaggaattttacaaggtgactgtgcagactgggaaactcaacttaaaccaaaagatacaattgctatgcagaacattcctgggggaaaaacatccaatggcataaacatgaactgtgtcagaactcactctggagagatgccctatgaatgcagtgactgtgggaaagccttcatttttcagtcttcccttaagaaacacatgagatctcatactggagagaagccttatgagtgtgatcactgtggaaaatcctttagccagagctctcatctgaatgtgcacaaaagaactcacactggagagaaaccctatgactgtaaggaatgtgggaaggctttcactgttccttcatcccttcagaaacatgtgagaacccacactggagagaaaccctatgaatgcagtgactgtggaaaagccttcattgatcagtcatcccttaagaaacacacacgctctcacactggagagaagccttatgagtgtaaccagtgtggaaagtccttcagcacaggctcttaccttattgtgcacaagagaactcacactggtgagaaaacctatgagtgtaaagaatgtgggaaggcctttaggaattcctcttgcctgagggtacacgtgagaactcacactggagagaagccttataaatgttttcagtgtgaaaaagcctttagcacaagcactaaccttataatgcacaagcgaatccacaatggccagaaactccatgaatgaaatgactcagggaagtgtttgttgcccctcatgcctcctttctcactttagaacatatattggagagaagccctgttatggtcacctggaaacagccttctggcccaactctggatgcctgttatactgggacaaaccttataaatgttatagctatgattgtttttatcagtgagtatttcattcttatatgtgtcacaactgtagatcctatgaatattttagttatcttttcagtttaattgcattgtgaacagaacacatggtcttcaatatgtagattctgtgtgacatagatttgaacataattgctggacactgactgatgtactgtggcagacagaactagttgctgtctcaatatccattcctcccttctttcttaaagtaataaaatttaccatttagttcaaaaaa

SEQ ID NO: 56604 - DNA, 3031 bp, Homo Sapiens
cagcgtgtgtcatgtcttggctgcgtttctggggcccatggcccctccttacgtggcaactattgtctttactagtcaaggaggctcagcctctggtgtgggtcaaggacccgctccagctgacctctaaccccctggggccacctgagccctggtcttcccgctcctcccatctcccatgggaatctccccatgcacctgctcccccagcagccccgggggactttgattacctggggccctctgcttcttcgcagatgtcagccctgcctcaggaaccaactgaaaatttggctccattcctgaaggaattggattcagctggagagctgcccctggggccagagccgttcttggctgcacatcaggacttaaatgacaagcggactccagaagaaaggctcccagaggtggttccgcttctcaaccgggatcagaaccaggccctagttcagcttcctcgcctcaagtgggttcaaactacagatctagatcgggctgcaggtcatcaggcagatgaaatacttgttccactagacagtaaggtttcaagaccaaccaaatttgttgtttcgcccaagaacctgaagaaagatctagctgaacgttggagccttcctgagattgttgggattccacaccaattatccaaacctcagcgtcagaaacagactttgccagatgattatttgagtatggacacactgtatcccggcagcctacctccagaactccgggtgaacgcagatgagcctccagggcctcctgagcaagttggactttctcaattccatctagagcccaaaagtcaaaatccagagacccttgaagacatccagtcctcttcactccaggaagaagccccagcgcagcttctacagctccctcaggaggtagaaccttcaacccagcaggaggccccagctctgcctccagagtcctctatggagagtctagctcaaactccactgaatcatgaagtgacagttcaacctccaggtgaggatcaagctcattataatttgcccaagtttacagtcaaacctgcagatgtggaggttaccatgacttcagagcctaaaaatgagacagaatctacccaagcccagcaggaggccccaattcagcctcccgaggaggcggaaccttcttctacagccctgaggactacagatcctcctccagaacaccctgaggtgacacttccaccttcagacaagggtcaggctcagcattcacacctgactgaagccacagttcaacctctggacctggagcttagcataactacagagcctactacagaggttaaaccgtctccaaccacggaggaaacctcagctcagcctccagacccggggcttgccataactccagaacccactacagagattggacattccacagccctggagaagactagagctcctcatccagaccaggttcagactctgcatcgaagcctgactgaagtcacaggtccacctacaaagttagaatcttcgcaggattcattggtgcagtctgaaactgcaccagaggaacagaaggcctccacaagcaccaacatatgtgagctctgcacctgcggagatgagactctgtcatgtgttggtctcagcccaaagcagaggctccgccaagtgcctgtgccagagcccgacacctacaatggcatcttcaccaccttaaatttccaaggaaactatatttcataccttgatggaaatgtatggaaagcatacagttggaccgagaaactaattctcagtgaaaattatttgactgaattacctaaggattcatttgaaggcctgctatacctccagtatttagatttatcctgcaataaaatacgatatattgaaagacaaacatttgaatcactaccatttttgcagtatataaatctgggctgcaatttaattacaaaactgagccttggaacatttcaggcctggcacggaatgcagtttttacacaacttaattctcaatcgcaatcctctgactactgtcgaagatccatatctctttgaactgccggcattaaaatatctagacatgggaacaacacacatcacacttacaacacttaagaacattctcacgatgactgttgaactggaaaaactgatcttacctagccatatggcctgctgcctctgccaatttaaaaatagcattgaggctgtctgcaagacagtcaagctgcattgcaacactgcatgtctgactaacagcatacattgtcctgaagaagcatctgtagggaatccagaaggagcgttcatgaagatgttacaagcccggaagcagcacatgagcactcagctgactattgagtcggaggcgccctcagacagcagtggcatcaacttgtcaggctttgggggtgatcagcttgaaattcagctaaccgagcagctacggtccctcatccccaacgaggatgtgagaaagttcatgtctcatgttatccggaccttgaaaatggaatgttcagaaacacatgtgcaagggagctgtgccaagctcatgttgcgaacaggcctcctgatgaagcttctcagcgagcagcaggaagcaaaggcattgaatgtagaatgggatacggaccaacaaaaaacaaattatattaatgagaacatggaacagaatgaacagaaagagcagaagtcaagtgagctcatgaaagaagttccaggagatgactataagaacaaactcatcttcgcaatatctgtgactgtaatactaataattttgattataattttttgtcttatagaggtgaattcacataaaagggcatcagaaaaatacaaagacaacccatcaatatcaggagcctgagcatgagttaaagcatgtggatggcctggagctatgtttttaaaattgttattaaatattggttttttacttaaatcaatgaaaactttctttactttgtggttgtgttcctcaaaatgagaatttttaacaataataaaaataaagcttgttagatcatttttaatggtaaaaaa

SEQ ID NO: 56605 - DNA, 8519 bp, Homo Sapiens
cggcggcggagccaggacccagacatctgggactgttgttctctcgcggcgcgaccgcctcagtcacttcgcccagagacccggacctggtccgctggggagcaggcggccataaaccccctctctcccggttccctgacgccgcggcaggagctgttacaaacaccctgcggttggtctccgatgcccttcagtgaggtggggacgcctggaccctggtgagcgaaccccaagccaccccccaccccaactcagtgtcttcgccggcccccggcccgtacgcctgtctggtcgccatggctgaaaacacagagggggatctgaactccaacctgctccacgccccctaccacaccggggaccctcagctggacacggccatcgggcagtggctccgctgggataagaatcccaaaacaaaagagcagattgaaaacctgttacggaatgggatgaacaaggagctgcgagatcgtctttgttgccgaatgacttttgggactgcaggacttcgttctgccatgggggcagggttttgctatattaatgaccttacagtaatacagtcaacacaggggatgtacaaataccttgagagatgtttctcagacttcaagcagagaggctttgtggttgggtatgacactcggggtcaagtaactagcagctgcagcagccagaggcttgctaaactcactgctgcagtcttgctggccaaagatgttcctgtgtaccttttttcaagatatgttcctacaccttttgtaccatatgcagttcagaagctcaaagcagttgcaggtgtgatgattactgcctctcacaaccgcaaggaagacaatggatacaaggtttactgggaaactggtgctcagatcacatctcctcatgataaagaaattctaaaatgtatagaagaatgtgtggaaccctggaatggttcctggaatgataatttagtggataccagcccgctgaagagagaccctctgcaggacatttgcaggagatacatggaagatctgaaaaagatctgtttttacagggagttaaactcgaagaccaccttgaaatttgtgcacacatcttttcatggggtcggacatgactatgtgcagttggcttttaaagtgtttggttttaagcctccaattccagtaccagaacaaaaagatcctgatccagacttttctaccgttaaatgtccaaatcctgaagaaggagaatctgtgctggaactttccttgagactggcagagaaagaaaatgcccgggtagtgctagccacagatcctgatgcagacagactggcagcagcagaacttcaggagaatggttgttggaaagttttcacagggaatgagttggcagctttgtttggatggtggatgtttgattgctggaagaaaaataaatcaagaaatgctgatgtgaagaacgtttatatgttagccaccacagtctcttctaaaattctgaaggcaattgcacttaaagaaggatttcattttgaagaaacattaccaggttttaaatggattggaagtaggataatagacctcctggaaaatgggaaagaagtcctttttgcatttgaagagtctattggttttctctgtggaacttcagttttggataaagatggggtgagtgcagctgttgtggttgctgagatggcatcttacctggaaaccatgaatataacattgaaacagcaactggttaaggtttatgaaaaatatggttatcatatttcaaaaacttcctatttcttgtgttatgaaccacctaccatcaaaagtatatttgaaaggcttcgtaattttgattctccaaaagaatatccaaaattttgtggaacatttgctatattgcatgtacgggacgttaccactggatatgacagtagccagcctaataagaaatcagtgctgcctgtgagtaaaaacagccaaatgattacatttacttttcaaaatggctgtgttgctacccttcggacaagtggaacagaaccaaagataaagtattatgcagagatgtgtgcgtcacctgaccagagtgacactgctttactggaggaagaactgaagaaactcattgatgctctgatagagaattttcttcagcctagtaagaatggactgatctggcgttctgtttaggggtacaccaatatgtcatgacactgtgtgggcatatggaacagagcaaccgagaactgcatacattgaaccttgtgttagcattctctctctatctcatctggccgagtatctttttccttttattttctttctttttggtcaactggctagactaaacaaagtataagtttgaaatgaaatggtctagagggaaatgattcaaattttttcataattcaaacaaaagttattacactaaaagtattatagtaacgtattgtccttccgttaacagaaacatcacaattcaaaagtgagttttcttattatagtgtgattaagcctagttctgtatctcgtaattgtgtatagcatggtaaaagaaaaaaaaaaagacaggtaaatgttatataattgtagggttagttaaggaaattagtccataaaattggcaagaaaatggtactttccttgattgttatgaaaaagtgtcattgtgacatcacaggtattaatttacaaattagagtatttgaaataggatatttagcatttctgtagtttagaacagatgttacagtgtgtggttttggcatgtctgtttcaggtgcccttggtgcagtataaatttactgtatgtatttaaaattctgatgtttactgaacataaaacaatagtggcaacactcctattggctttgttcttatcaaatttctcagtgccttctcagggtctggtatgaacagaaaaaacagtgttcctgcatttaccataatttaatcagtcaatttgcagatagctaaggaaaatcttccaaaatctgtaggtgcttcctctatatcaagtgagtttgctgattttaaaatcttaggaatataaataaagatcttaataaaagcaagcttaatgtagttaaggatcttcatattagaattgtgtcatttatcaaaccttttattacagaaaaaaatctgaactgagaaaggagctctgaatttatttgacagtctaacttttgaattacatttttgtaagtagatttattcttttattttatgaagtaatgttaattttactaagaataaaacatccaaattttaagtattatgaaatactaaaactacatgttttaaaacagaggtccagtttattctaacatcttgctgacttctgtagaatttctgattgcatgactattatttatcttcttttagtgtagaaaataattttttacaaaaagtcacttttgggctgggcgcagtggctcacgcctgtaatcccagcactttgggaggctgaggcaggtggatcacaatgtcaggagtttgagactagcctggccaatatggtgaaaccctgtctctactaaaaatacaaaaattagccgggtgtggtggtgggcacctgtagtcccagctactcgggaggctgaggcaggagaattgcttgaacctaggaggctgagattgcagtgagccgaaatcacgccactacactccagcctgggcaacagagggagactccatctcaaaaaaaaaaaaagtcacttttggctaatcatgcagtcttctgaaaaggtttaatagagaaatgctgtttaggctgggcttggtggctcacatctgtaataccagcgctttgggaggctgaggcaggaggattgcttgaggccaggagtttaagttacagaactatgatcacactgccgcactgaagcctggatgacagagtgagaccttatctcaaaaaaaaaaaaaaaaagagagagagagagaaaaagaaatgctgtgtttaatcttcttaaaatgtatcttgtcctacatagttctcagaatacatatggggtatagttaggagataacaataacaagacctaaacaaattgcttatgggagatagcactgtaattagagaatttatttcatataaaataataatataaagtttgaactgattagaatgttccttaaatcatggtttcgtttgttgcagctgtcagctaacatttggttgagctcatataatccaaacctaattgtccaactattgtattgccactattgttaatttgttccttccttactttcttattgttggatcttatatgactgtatgactgtagataatagacagctagctaaatgtagagcaccatttttctcaatgagtttgttttcaaaggctttgcactggagaagatatgtgtagaatttttgttttatttttaaaatgtgtaaaacatcttttgttttatatgcttttaagaatgtagattgtaatttaggaaatggcatatattctgcaaagtggtataatgttgtatatatgaaaaacaggtatatttggtttagttctgtgtttcagtgactgataaacaaaaatgaagctaaaatgaatcaacggctcattcatagttactaaagccatgtcatgactgtcattctattatgaagaaaacagttttatttgagtgctttaatataatgcaacatttaagtcatcttaaggtgaaaagttattgaagtgttcttctctcaagttaacaaaattttacaaatgttcctgaagtgtatcgattgagggaattattttattctagcctgtcatgagtctgtctgagcatgatacttaacatgaacttgatgtagtaggtgcacatttgcctaacaggataaattcagtgatagcccaagctggtcaggagagacagaagtgctggctaggaggtctcagcctcgggcactacaatgtttatctttttctttttgaacaatattgtgaaaatgattgcattctcattgagcatgaaagtcaaaactggaattttctaaagctttggagaaaaggagagaattagtagggcaagatcaaagcatacattggaaataaacagtagaaataagcaaacaatataaagagacacgggaaatgcttctcgtgaagggcaaatgtaacaccataacagtagggaataaactgtgtcccacctgtttacttgtgtttatttgttgttatgatgagtatgcacctaccattttcctttattgtgatcactaaaatgaggccaaggtttaggaggtgagaaaaagtatcccttttacggattcagttcctgctaggatgttgtatcagaatcatgtgagaactcaggaagaggtagagcagaaataaaaaggaagaaaatgtagattagaaaataagacttctgagaaaaagttcaaggaataaagattgtttgactctggagaggagaaagctgttgagatagtttgctaagtttgctaataaagctttattgagtcttttattgaagggttcaaagtaagaaatactatgccatagtgttctccatctctagtgaagacagaaccagagggaataaggatcttttttttaaagacagcatggaaagtttaagatttaggaacttcttgagaaatcttcataatatcttctattcaaaatcttttttttatttttaagggaataaaaattttaaaaattaagagatatacagatgactttttaagggtccttctttccagcacattttttttaaaaactcaggttagaataaaaatgtcataaagggcactaaaagtaacatttgggtttcactccatatctagaagaatttagctcacaaaacaatttttgtgtgttttgagtaactgatgcataagtgcaatgaataattttcctgcttcactgttatttttaatttaacctggcaaattaagtgagacttgaacaaaattttgttcatcttgaagaatgtatagtggcttaggttatttgaggttttcgttttgaatatatatgttgttattttgatgtagatacgttagcagatggagaggttctaagagattggatactttggaatgtctttatataggaaatagacctcccatttcttaagcaagttgcttctggaattgatgcaacagggatattagctgtagtttaatggataagttgttctatgagctgctgctatcagtacttttttccacattttccattgatatttgtgatgcttgaaaaatccaaacttcacttggatacatttaattttatgcctttttctctctacctcccacttttcctaggcacccttgcacattttgttactgtgaaggactattgccctgttacctcactgataagaaatctcaactgtattcattcagaatgctttaagcttagtcataaactacatttgcctatggacctttggttattttgttaatgttgtcattatatttaagacttattgtaggaagtaattttaaatctatttcataacctgttttgatctgtctgcatactgctatatgttaatttattacggccttttacaattcacttgtcatctgagattgttctagaaactgatgaggaaagagtcgtactaaccaaaatgaatgggcaattgacataacattctatttcaggtttccttgtacttggggagccaaagcacaagatctaaggaaatcttattcacatttgtccctcagagcatcttaccctaagccatagaggtataaatagtaagatgagaattgctcattgtctgactccttgcacagcatgaatttaattctagttggaaacaaagttagtgttgactactggttaccttaaagtattcaccatactatatatttattagaccatctttcctctttgtttattcaagactatgtacttataaaagagaacctataagaatgtgtagagtgaccaaatagggacaaagtgacatacctagagtttgctgctcaaatttttccactagcgtaaccctaaagcagaggggcatgatgaagggggaaggggttctgagagcaaaatcagaatcagcctaccactgacatgaagtgtgttctgtctttaaaatgtaagtgaattttgcattctttataataaaacttttaatataaaaatgatatgtttaatctttactgaaacttatgccaccacaaaggagcaccatgttcatcacgtggctgctcagttttctcccccagtgccctcacccccagtggaggcaagtccttgagctacacacactggctgtagtgcaagatatataaacataggccgggctcggtggctcatgcctgtaatcctagcactttgggaggccgaagcaggtggatcatctgaggtcgggagattgagactagcctgaccgacatggagaaaccctgtgtccactaaaaatacaaaattagccgggtgtggtggcacatgcctgtaatcccagctactcgggaggctgaggcaggagaatcacttgaacccaggaggtggaggttgtggtgagccaagatcgcgccgttgcactccagcctgggcaacaagagtgaaactccatctcaaaaaaaaaaaaaaaagatatataaacatagaacatatccagactatttcctgcccttggaatctgaccttcagaaggattaatgccaaactaaactgacctgaaacagttttgttactattggcattccttgactaaaaaggaccacctgatgctcagtcccgagagtaggaatcgtggtttattatttttcatatccataccacctagttcagtacctgttatagagtgtttaattgctgatactaggaattaagggattttttaaaagtagcaaatagtttaaggaacaatcaaaaaatgaattttctaattcagttttttcaatgaagtcccatcactgaactttataatgtaatgtttattaagcagacatccccttaaatactcagtttctttggagagagcaaagcatatctctctgtggaaattatatataatgcctggtattttacactcaaagcaaggtgttggccaggaaggtaaagaaatggtgtctatgtagacttaatatcactagtctaagtgtcattttgagcctagtagcactaccttccaagtgagtcacaacaaatttgatcctatttggtatgtttttgtccactgttatgattcatcatgtatcttacaagagccactcaagcaagactctgcttctatgtatggtgaggccttgttgttctaggctagaataaactctttgtatgcctcattgaatatgccaggtaaaatatatgcagtcaagaatgaattatttttctgactaaagtgtgtagcagtagttcaaaattgtgcccttgttttaacagtttctgtcaacatcttctcatttttccctacaaaaacaccagggtgtattataagtactgcctgtgagaatttgcactttatgtatttgtgtgtggatttcttgtggttttagccaaatgaagtgttatcagtaataaacaggtctcttcataggaaaaaaaaaaaaaaaaaa

SEQ ID NO: 56606 - DNA, 4154 bp, Homo Sapiens
gagggtatcagaaccaatactggacatggacatggcaaattacagtgaagttttggacccaacttacacaactttggagtttgaaactatgcagattctatataattcaagtgatagttctgccccagagacaagtatgaataccacagacaacggtgtcaactgtctgtgtgctatctgtggggacagagcaacaggaaaacactatggggcatccagctgtgatgggtgcaagggtttcttcagacgcagcattcgtaagagtcacgtttattcttgcaggttcagtcggcaatgtgttgttgacaaggacaaaaggaatcaatgtagatattgtcgattaagaaagtgttttagagcgggaatgaaaaaagaagctgtacaaaatgaacgtgacagaataagcaccagaagaagcacatttgatggcagcaacatcccctccattaacacactggcacaagctgaagttcggtctcgccagatctcagtctcaagccctgggtcaagcactgacataaacgttaagaaaattgcaagtattggtgatgtctgtgaatctatgaaacagcagctcttagtcttggtggaatgggctaaatatattcctgccttctgtgaattaccattggatgatcaggtggcactgttgagagctcacgcaggggagcacttactgcttggagctacaaagagatccatgatgtataaagatattttgcttttgggaaacaactatgttattcaccgcaacagctgtgaagttgagattagccgtgtggccaatcgtgttctagatgagctggttagaccatttcaagaaatccagattgatgacaatgagtatgcttgtttaaaggcaattgtattttttgatccagatgcaaaagggctaagcgatccagtaaaaattaagaacatgaggttccaagtgcagatcggtttggaggactacatcaatgatcggcagtatgactcccgggggaggtttggagagttgcttctgctcctgcccacactgcagagcatcacgtggcaaatgattgagcaaatacagtttgttaaactttttgggatggttaaaattgacaatctacttcaggaaatgctattaggtggggcttccaatgatggcagtcatctccatcatccaatgcatccacatttgtctcaagacccattaactggacaaactatacttttaggtcccatgtcaacactggttcatgcagaccagatctcaactcctgaaaccccactcccttccccaccacaaggctctgggcaagaacagtacaaaatagctgcaaaccaagcatcagtcatttcacaccagcatctctccaaacaaaagcaattgtgaaaatgtgtttacttcagaacggcactacataaatgtgaaaagttgttgatcttgaaatatctcaggatagcacttttggcaaactcttagccaaggcttcttcattggtgctgttataagatggtgtcctattttcttgtttatacgttcattctgtttgttattgctactatgtaaaactttcacatgcaaccaatgtatatctgagtttgaagatgtttatatagggtattttttccaactgcccctgcattgtgcctgaaccaattgaatcttatgtatgagtttcatttgttttattaatgttaatttaaatctgtaaataattgctttattgtgatgtgatacagaacaaagtgttcgtttttgactgaaaatagtagatcagaaatctcagtttaatataaaatgagctaagtttttaaaaataaattataaacttggagattagaaaaataaagcagttgctgtagaataggctgtatctttttcaagaagaatctcttatggacagtctgtggtaaagaagcaactctttgctttagagttaaatattcctatcttaagtttagaaaaatacaaaaaaccattccaaggatgactggatactttttgaaatctgactttctttgaagatgtatgttaagcaaaaacatgttgcttttatcagttaggatacagggtgaactgtaacaaagaaacccctaaaacagtgactaaatcaagagaggaatctatttctttctcctgaaacaatttagaaaatagttatccattgactagaaattagtacatgcccacagctggctcccacggtagccaggagaattatctataggtggaaagtctgtgtcagccaaagccatgtcactctgagagaactgattctgaggacaagttagccatctaccacccatgtcccttatttggtcctcacaataacactttaggagagatatcattatcgctgttttataaataagggaaactttagcttgagggtttaaggaacataaccaaagttcacaaacataacgagtgagagaaacacattcaagcccaggtctagttgactttaatgaatctttggtgtggaatgaaaaatgtgaacttcttactcatagtgtggtttttaaatatatgcagttgagtgatgattggatactattcatcatattgcctataatatatatttaccgataagcagcgagtgtaaaattgttgtagcttgaataagaaaccacttttgtagttttaaccagactttctcttaaaaacattagataaaataaaagattcaccggatggattctgatgaaaacgaaaacaaagtaaaatgactggcttagcagattctttgaaatgtagcagcccagggatgtaccaaatgtcgaattctagactgaggagtagagttcattggagtcttaaactctctgatatcacttaaagctggagtttattttaaaacaaatgaagcatgggccacctcatgatgcagtggctcctctctggttgaggagagggaaaattggaaaaactggtcgagtaattatcaataattttttttaaaaagaggatcccaaactgtaaaagattgaaataatctttctcaggattttttaaatgtctaagattatgatgtcatatctcccacttaccttataagtaaaaaggttaatatcaagtaacttattagctcttaaagtaaaattgaacttattaaaagctatctatgatttaatagatttaataaaattccttcacgacctggtacccttgtgaaactgtaaaatatatcatatggggggagctttttaactcttattttttgaaaatttactgtagcttctatttcgtgaataagaatgttttgattttgatcatacaaataacttttgtagatttttgtttacttttgggggggttcccttagaagacattaaaaaaaaatactgccttggtctgtgcaggctgctgtaatgaaatactatgaacttggcagcttataaacaacagaaatttatttctcgctgttctcaatggtgggaagtccaagattaagggatcaacaaattaggcctctggatcatacatggcattttctagctgtgtccttatacataaaaggaaaaaggtagctctctcgagtctctttaataaagatactaattctcatgactgaatcaccctccaaaggccccacctcctaataccatcactctggggactaggtgtcagcatgtgaattttggaaaacacaaaaattcagaacatagcaaatacctttgaagtataaaagataaaattcatttttagtgaaccctgtaatttattcgtgtatatttactaaacagctgtatctttgaaattgttagtaatgattctgcttcaataactatggtcagggaatttataatattatatttttatatactgaactgccatagatgctggaaaaaaggaactgatgttttcagcatattttcaaaatattgataagggaagttattacttttatatagtattcaacctttttcaggtaatagaagtgaataatttattgtgaaataattcattttataaatgtataattatttttataaattttattgttggaaatcaaaaattagtagattttttaccatgttaaattatagtgagattaaagtattactaaactgtgatgctatgtttgtttcactaaactttctaaataaaaactgagaaaaaaaaaaaaaaaaaaaaaaaaaaaaaaaaaaaaaaaaagaaaaaaaaaaaaaaaaaaaca

SEQ ID NO: 56607 - DNA, 3723 bp, Homo Sapiens
aacccatttcaactgcctattcagagcatgcagtaagaggaaatccaccaagtctcaatataataatattctttattcctggacagctcggttaatgaaaaaatggacacagaaagtaataggagagcaaatcttgctctcccacaggagccttccagtgtgcctgcatttgaagtcttggaaatatctccccaggaagtatcttcaggcagactattgaagtcggcctcatccccaccactgcatacatggctgacagttttgaaaaaagagcaggagttcctgggggtaacacaaattctgactgctatgatatgcctttgttttggaacagttgtctgctctgtacttgatatttcacacattgagggagacattttttcatcatttaaagcaggttatccattctggggagccatatttttttctatttctggaatgttgtcaattatatctgaaaggagaaatgcaacatatctggtgagaggaagcctgggagcaaacactgccagcagcatagctgggggaacgggaattaccatcctgatcatcaacctgaagaagagcttggcctatatccacatccacagttgccagaaattttttgagaccaagtgctttatggcttccttttccactgaaattgtagtgatgatgctgtttctcaccattctgggacttggtagtgctgtgtcactcacaatctgtggagctggggaagaactcaaaggaaacaaggttccagaggatcgtgtttatgaagaattaaacatatattcagctacttacagtgagttggaagacccaggggaaatgtctcctcccattgatttataagaatcacgtgtccagaacactctgattcacagccaaggatccagaaggccaaggtcttgttaaggggctactggaaaaatttctattctctccacagcctgctggttttacattagatttattcgcctgataagaatattttgtttctgctgcttctgtccaccttaatattctccttctatttgtagatatgatagactcctatttttcttgttttatattatgaccacacacatctctgctggaaagtcaacatgtagtaagcaagatttaactgtttgattataactgtgcaaatacagaaaaaaagaaggctggctgaaagttgagttaaactttgacagtttgataatatttggttcttagggttttttttttttttagcattcttaatagttacagttgggcatgatttgtaccatccacccatacccacacagtcacagtcacacacacatatgtattacttacactatatataacttcctatgcaaatattttaccaccagtcaataatacatttttgccaagacatgaagttttataaagatctgtataattgcctgaatcaccagcacattcactgacatgatattatttgcagattgacaagtaggaagtggggaattttattaagttactcgttgtctggggaggtaaataggttaaaaacagggaaattataagtgcagagattaacatttcacaaatgtttagtgaaacatttgtgaaaaaagaagactaaattaagacctgagctgaaataaagtgagtggaaatggaaataatggttatatctaaaacatgtagaaaaagagtaactggtagattttgttaacaaattaaagaataaagttagacaagcaactggttgactaatacattaagcgtttgagtctaagatgaaaggagaacactggttatgttgatagaatgataaaaagggtcgggcgcggaggctcacgcctgtaatcccagccctttgggaggccgaggtgggcagatcacgaagtcagtagtttgagaccagcctggccaacatagtgaaaccccgtctctactaaaaatacaaaaaaaaaattagctgggtgtggtggcagtcacctgtagtcccagctacttgggaggatgaggcaggagaatcgcttgaacctgggaggcggaggttgcagtgagccgagatcgcaccagtgcactccagccttggtgacaatgggagactccatctcaaaaaaaaaaaaaaaaaaaaaaagataaaaagtcagaaatctgaaaagtggaggaagagtacaaatagacctaaattaagctcatttttaggctttgattttggggagacaaagggaaatgcagccatagagggcctgatgacatccaatacagagttctggtaaagataaaatttgatacaggtttggtgtcattataagagaaatcattattaaatgaagcaagttaacactctaagagaattattttgagatagaagtgaagctaagctaaacttcacatgcctataattggagggaaaaactaaggataaaatctagcctagaagatacaataattagtcataaacatgcattgtgaaactgtagagagcaggtagcccaaaatagagaaagattagataaagagaaaataagtatccatcagagacagtatctctaggcttgggcaagagaaaagtccacagtgataagcaactccacctaaggcatgaatatgcggcagagaaaacagcaatagtgaatgaatgcaaaaggtgctgagaaattccacacatgagtattgtgatgagtaaatgaataaaacatttgcaaagacctttagagaaagagaatgggagcatatgtgagaaataagatagttgattatgaatagaaggtagtgaagaaaagcaagctaagaaaaaattctgtttataaaagaaggaaaagatagtttatgtttttagcctaagtataagagtcctacagatggactgaaaaaaatcagtctgagagtattagtcacaattaatgaaataattacattttatgtattgaggatgccaagattaaaaggtgacaggtagatgttaatttccctagattgtgaaagtgatcacgacaatcacacaacaaataattaagtgacttggtatgctttatttaattgtagggcctgaggttttccattctcatttttctaaaatacaattttgtttctccaaatttgacagcagaataaaaaccctaccctttcactgtgtatcatgctaagctgcatctctactcttgatcatctgtaggtattaatcacatcacttccatggcatggatgttcacatacagactcttaaccctggtttaccaggacctctaggagtggatccaatctatatctttacagttgtatagtatatgatatctcttttatttcactcaatttatattttcatcattgactacatatttcttatacacaacacacaatttatgaattttttctcaagatcattctgagagttgccccaccctacctgccttttatagtatgcccacctcaggcagacacagagcacaatgctggggttctcttcacactatcactgccccaaattgtctttctaaatttcaacttcaatgtcatcttctccatgaagaccactgaatgaacaccttttcatccagccttaatttcttgctccataactactctatcccacgatgcagtattgtatcattaattattagtgtgcttgtgacctccttatgtattctcaattacctgtatttgtgcaataaattggaataatgtaacttgatttcttatctgtgtttgtgttggcatgcaagatttaggtacttatcaaagataatggggaattaaggcatcaataaa

SEQ ID NO: 56608 - DNA, 1507 bp, Homo Sapiens
gacaccctctccgcgatgactgtgagtggtccagggacccccgagccccggccggccacccccggggccagctcagtggagcagctgcggaaggagggcaatgagctgttcaaatgtggagactacgggggcgccctggcggcctacactcaggccctgggtctggacgcgacgccccaggaccaggccgttctgcaccggaaccgggccgcctgccacctcaagctggaagattacgacaaagcagaaacagaggcatccaaaggtaggggaatggtgggccctggtgtggagctgtagggcttctgtggtgggcaaggactctgggaccgctgcaccgtcacattctcctcctttggccccagagacacatctgccttctttctttcccactgcctcgggcctttccttttctgcagctaccctcaccttttctgaggctgaagcaccgagccccacattcgtcccccccaccttcttctggcctttcctcgagatctttccctactgctcttgcctggagacagtggcctcatgggtgctgacagcgctcctgtttgtgctcagccattgaaaaggatggtggggatgtcaaagcactctaccggcggagccaagccctagagaagctgggccgcctggaccaggctgtccttgacctgcagagatgtgtgagcttggagcccaagaacaaagttttccaggaggccttgcggaacatcgggggccagattcaggagaaggtgcgatacatgtcctcgacggatgccaaagtggaacagatgtttcagatactgttggacccagaagagaagggcactgagaaaaagcaaaaggcttctcagaacctggtggtgctggccagggaggatgctggagcggagaagatcttccggagtaatggggttcagctcttgcaacgtttactggacatgggagagactgacctcatgctggcggctctgcgtacgctggttggcatttgctctgagcatcagtcacgggtaggtggagtggagaggctggttacagcttcagtccctttgtctgtctgtccatccattcctccatccacccatctgtccatccgcccatctgcccgtccatccatccatccactcttccaccctctaccccttaccttattctaaaaagaacttaggtaggttatggtgcctcacacctgtaatcccagcactttggggggctgaggcaggtggatcacttgaggtcaggagttcaagaccagcctggccaacaaggcgaaaccctgtctctactaaaaataaaaaaattagccgggcatggtagtgcacgcctgtaatcccagctactcaggaggctgaggcacgagacttgcttgaacccaggaggtggaggttgtggtgagctgagatcgcgccactgcactccagcctgggtgacagagcgagactatctcagaaacaaaacaaaacaaaacaacaaaaaaagaaaaggcagagtacaaggagatacatgtaacaag

SEQ ID NO: 56609 - DNA, 1400 bp, Homo Sapiens
cggcaaaaaaaaaaggcgtaagaattttgaagctatgttcaaaggtatccttcagagtggattggataacttcgtgataaaccacatgctaaagaacaacgtggctggacaaacatctatccagaccctagtacctaatacggatcaaaagtcgaccagtgtaaaaaaagacaaccacaaaaaaaaaacagttaagatgttggaatacctgggcaaagatgttcttcatggtgtttttaattatttggcaaaacacgatgttctgacattgaaggaagaggaaaagaaaaaatattatgatgccaaaattgaagacaaggccctgatcttggtagactctttgcgaaagaatcgcgtggctcatcaaatgtttacccaaacacttctcaatatggaccaaaagatcaccagtgtaaaacctcttctgcaaatcgaggctggaccacctgagtcagcagaatctacaaatatactcaaactttgtcctcgtgaagaattcctgagactgtgtaaaaaaaatcatgatgagatctatccaataaaaaagagagaggaccgcagacgcctggctctcatcatatgcaatacaaagtttgatcacctgcctgcaaggaatggggctcactatgacatcgtggggatgaaaaggctgcttcaaggcctgggctacactgtggttgacgaaaagaatctcacagccagggatatggagtcagtgctgagggcatttgctgccagaccagagcacaagtcctctgacagcacgttcttggtactcatgtctcatggcatcctagagggaatctgcggaactgcgcataaaaagaaaaaaccggatgtgctgctttatgacaccatcttccagatattcaacaaccgcaactgcctcagtctaaaggacaaacccaaggtcatcattgtccaggcctgcagaggtgaaaaacatggggaactctgggtcagagactctccagcatccttggcagtcatctcttcacagtcatctgagaacctggaggcagattctgtttgcaagatccacgaggagaaggacttcattgctttctgttcttcaacaccacataacgtgtcctggagagaccgcacaaggggctccatcttcattacggaactcatcacatgcttccagaaatattcttgctgctgccacctaatggaaatatttcggaaggtacagaaatcatttgaagttccacaggctaaagcccagatgcccaccatagaacgagcaaccttgacaagagatttctacctctttcctggcaattgaaaatgaaaccacaggcagcccagccctcctctgtcaacatcaaagagcacatttaccagtatagcttgcatagtcaatatttggtatttcaataaaagtaaagactgta

SEQ ID NO: 56610 - DNA, 1307 bp, Homo Sapiens
aagagaaaactcctccaaaagcagctctcactatcagaaaacccaactacagttgtgaacgccttcattttctgcctgaggtctcagtccgtcggcccagactgaagtgcagtggcacaatcatagctcgctgcagcctcgaccttccaggcttaaacgattctcccacctcagcctctcgagttgctgggaccacaggtcactgtgcatggcatcatcctggccccctctagagctccaatcctccaaccagagccagctcttccctcaaaatgctacggcctgtgacaatgctccagaagcctgggacctgctgcacagagtgctgccaacatttatcatctccatctgtttcttcggcctcctagggaacctttttgtcctgttggtcttcctcctgccccggcggcaactgaacgtggcagaaatctacctggccaacctggcagcctctgatctggtgtttgtcttgggcttgcccttctgggcagagaatatctggaaccagtttaactggcctttcggagccctcctctgccgtgtcatcaacggggtcatcaaggccaatttgttcatcagcatcttcctggtggtggccatcagccaggaccgctaccgcgtgctggtgcaccctatggccagccggaggcagcagcggcggaggcaggcccgggtcacctgcgtgctcatctgggttgtggggggcctcttgagcatccccacattcctgctgcgatccatccaagccgtcccagatctgaacatcaccgcctgcatcctgctcctcccccatgaggcctggcactttgcaaggattgtggagttaaatattctgggtttcctcctaccactggctgcgatcgtcttcttcaactaccacatcctggcctccctgcgaacgcgggaggaggtcagcaggacaaggtgcgggggccgcaaggatagcaagaccacagcgctgatcctcacgctcgtggttgccttcctggtctgctgggccccttaccacttctttgccttcctggaattcttattccaggtgcaagcagtccgaggctgcttttgggaggacttcattgacctgggcctgcaattggccaacttctttgccttcactaacagctccctgaatccagtaatttatgtctttgtgggccggctcttcaggaccaaggtctgggaactttataaacaatgcacccctaaaagtcttgctccaatatcttcatcccataggaaagaaatcttccaacttttctggcggaattaaaacagcattgaaccaagaaaaaaaaaaaaaaaaaaaa

SEQ ID NO: 56611 - DNA, 4297 bp, Homo Sapiens
acagcggagcgcagagtgagaaccaccaaccgaggcgccgggcagcgacccctgcagcggagacagagactgagcggcccggcaccgccatgcctgcgctctggctgggctgctgcctctgcttctcgctcctcctgcccgcagcccgggccacctccaggagggaagtctgtgattgcaatgggaagtccaggcagtgtatctttgatcgggaacttcacagacaaactggtaatggattccgctgcctcaactgcaatgacaacactgatggcattcactgcgagaagtgcaagaatggcttttaccggcacagagaaagggaccgctgtttgccctgcaattgtaactccaaaggttctcttagtgctcgatgtgacaactctggacggtgcagctgtaaaccaggtgtgacaggagccagatgcgaccgatgtctgccaggcttccacatgctcacggatgcggggtgcacccaagaccagagactgctagactccaagtgtgactgtgacccagctggcatcgcagggccctgtgacgcgggccgctgtgtctgcaagccagctgttactggagaacgctgtgataggtgtcgatcaggttactataatctggatggggggaaccctgagggctgtacccagtgtttctgctatgggcattcagccagctgccgcagctctgcagaatacagtgtccataagatcacctctacctttcatcaagatgttgatggctggaaggctgtccaacgaaatgggtctcctgcaaagctccaatggtcacagcgccatcaagatgtgtttagctcagcccaacgactagaccctgtctattttgtggctcctgccaaatttcttgggaatcaacaggtgagctatgggcaaagcctgtcctttgactaccgtgtggacagaggaggcagacacccatctgcccatgatgtgattctggaaggtgctggtctacggatcacagctcccttgatgccacttggcaagacactgccttgtgggctcaccaagacttacacattcaggttaaatgagcatccaagcaataattggagcccccagctgagttactttgagtatcgaaggttactgcggaatctcacagccctccgcatccgagctacatatggagaatacagtactgggtacattgacaatgtgaccctgatttcagcccgccctgtctctggagccccagcaccctgggttgaacagtgtatatgtcctgttgggtacaaggggcaattctgccaggattgtgcttctggctacaagagagattcagcgagactggggccttttggcacctgtattccttgtaactgtcaagggggaggggcctgtgatccagacacaggagattgttattcaggggatgagaatcctgacattgagtgtgctgactgcccaattggtttctacaacgatccgcacgacccccgcagctgcaagccatgtccctgtcataacgggttcagctgctcagtgatgccggagacggaggaggtggtgtgcaataactgccctcccggggtcaccggtgcccgctgtgagctctgtgctgatggctactttggggacccctttggtgaacatggcccagtgaggccttgtcagccctgtcaatgcaacaacaatgtggaccccagtgcctctgggaattgtgaccggctgacaggcaggtgtttgaagtgtatccacaacacagccggcatctactgcgaccagtgcaaagcaggctacttcggggacccattggctcccaacccagcagacaagtgtcgagcttgcaactgtaaccccatgggctcagagcctgtaggatgtcgaagtgatggcacctgtgtttgcaagccaggatttggtggccccaactgtgagcatggagcattcagctgtccagcttgctataatcaagtgaagattcagatggatcagtttatgcagcagcttcagagaatggaggccctgatttcaaaggctcagggtggtgatggagtagtacctgatacagagctggaaggcaggatgcagcaggctgagcaggcccttcaggacattctgagagatgcccagatttcagaaggtgctagcagatcccttggtctccagttggccaaggtgaggagccaagagaacagctaccagagccgcctggatgacctcaagatgactgtggaaagagttcgggctctgggaagtcagtaccagaaccgagttcgggatactcacaggctcatcactcagatgcagctgagcctggcagaaagtgaagcttccttgggaaacactaacattcctgcctcagaccactacgtggggccaaatggctttaaaagtctggctcaggaggccacaagattagcagaaagccacgttgagtcagccagtaacatggagcaactgacaagggaaactgaggactattccaaacaagccctctcactggtgcgcaaggccctgcatgaaggagtcggaagcggaagcggtagcccggacggtgctgtggtgcaagggcttgtggaaaaattggagaaaaccaagtccctggcccagcagttgacaagggaggccactcaagcggaaattgaagcagataggtcttatcagcacagtctccgcctcctggattcagtgtctcggcttcagggagtcagtgatcagtcctttcaggtggaagaagcaaagaggatcaaacaaaaagcggattcactctcaacgctggtaaccaggcatatggatgagttcaagcgtacacaaaagaatctgggaaactggaaagaagaagcacagcagctcttacagaatggaaaaagtgggagagagaaatcagatcagctgctttcccgtgccaatcttgctaaaagcagagcacaagaagcactgagtatgggcaatgccactttttatgaagttgagagcatccttaaaaacctcagagagtttgacctgcaggtggacaacagaaaagcagaagctgaagaagccatgaagagactctcctacatcagccagaaggtttcagatgccagtgacaagacccagcaagcagaaagagccctggggagcgctgctgctgatgcacagagggcaaagaatggggccggggaggccctggaaatctccagtgagattgaacaggagattgggagtctgaacttggaagccaatgtgacagcagatggagccttggccatggaaaagggactggcctctctgaagagtgagatgagggaagtggaaggagagctggaaaggaaggagctggagtttgacacgaatatggatgcagtacagatggtgattacagaagcccagaaggttgataccagagccaagaacgctggggttacaatccaagacacactcaacacattagacggcctcctgcatctgatgggtatgtgaacccacaacccacaaccttccagctccatgctccagggctttgctccagaacactcactatacctagccccagcaaaggggagtctcagctttccttaaggatatcagtaaatgtgctttgtttccaggcccagataactttcggcaggttcccttacatttactggaccctgttttaccgttgctaagatgggtcactgaacacctattgcacttgggggtaaaggtctgtgggccaaagaacaggtgtatataagcaacttcacagaacacgagacagcttgggaatcctgctaaagagtctggcctggaccctgagaagccagtggacagttttaagcagaggaataacatcaccactgtatatttcagaaagatcactagggcagccgagtggaggaaagcttgaagagggggttagagagaaggcaggttgagactacttaagatattgttgaaataattgaagagagaaatgacaggagcctgctctaaggcagtagaatggtggctgggaagatgtgaaggaagattttcccagtctgtgaagtcaagaatcacttgccggccgggtgtggtggctcacgcctgtaattctagcactttgggagactgaagcgggtggatcacccgaggtcaggagttgaagaccagcctggccaacatggtgaaaccctgtctctactaaaagtacaaaaattagctggatgtggtggtgggcgcctgtaattccagctactcaggagtctgaggcaggagaatcgcttgaacccaggaggcggaggttacagtgagccaagattgcaccactgctctccagcctggggaacagagcaagactgtctcaaaaaaaaaaaaaaaaggaaaaataa

SEQ ID NO: 56612 - DNA, 4317 bp, Homo Sapiens; identical to SEQ ID NO: 26497

SEQ ID NO: 56613 - DNA, 2756 bp, Homo Sapiens
ccgccgggtgcctcgagggcgcgaggccagcccgcctgcccagcccgggaccagcctccccgcgcagcctggcaggtctcctggaggcaaggcgaccttgcttgccctctattgcagaataacaaggggcttagccacaggagttgctggcaagtggaaagaagaacaaatgagtcaatcccgacgtgtcaatcccgacgatagagagctcggaggtgatccacaaatccaagcacccagagatcaattgggatccttggcagatggacatcagtgtcatttactaaccagcaggatggagacgacgcccttgaattctcagaagcagctatcagcgtgtgaagatggagaagattgtcaggaaaacggagttctacagaaggttgttcccaccccaggggacaaagtggagtccgggcaaatatccaatgggtactcagcagttccaagtcctggtgcgggagatgacacacggcactctatcccagcgaccaccaccaccctagtggctgagcttcatcaaggggaacgggagacctggggcaagaaggtggatttccttctctcagtgattggctatgctgtggacctgggcaatgtctggcgcttcccctacatatgttaccagaatggagggggggcattcctcctcccctacaccatcatggccatttttgggggaatcccgctcttttacatggagctcgcactgggacagtaccaccgaaatggatgcatttcaatatggaggaaaatctgcccgattttcaaagggattggttatgccatctgcatcattgccttttacattgcttcctactacaacaccatcatggcctgggcgctatactacctcatctcctccttcacggaccagctgccctggaccagctgcaagaactcctggaacactggcaactgcaccaattacttctccgaggacaacatcacctggaccctccattccacgtcccctgctgaagaattttacacgcgccacgtcctgcagatccaccggtctaaggggctccaggacctggggggcatcagctggcagctggccctctgcatcatgctgatcttcactgttatctacttcagcatctggaaaggcgtcaagacctctggcaaggtggtgtgggtgacagccaccttcccttatatcatcctttctgtcctgctggtgaggggtgccaccctccctggagcctggaggggtgttctcttctacttgaaacccaattggcagaaactcctggagacaggggtgtggatagatgcagccgctcagatcttcttctctcttggtccgggctttggggtcctgctggcttttgctagctacaacaagttcaacaacaactgctaccaagatgccctggtgaccagcgtggtgaactgcatgacgagcttcgtttcgggatttgtcatcttcacagtgctcggttacatggctgagatgaggaatgaagatgtgtctgaggtggccaaagacgcaggtcccagcctcctcttcatcacgtatgcagaagcgatagccaacatgccagcgtccactttctttgccatcatcttctttctgatgttaatcacgctgggcttggacagcacgtttgcaggcttggagggggtgatcacggctgtgctggatgagttcccacacgtctgggccaagcgccgggagcggttcgtgctcgccgtggtcatcacctgcttctttggatccctggtcaccctgacttttggaggggcctacgtggtgaagctgctggaggagtatgccacggggcccgcagtgctcactgtcgcgctgatcgaagcagtcgctgtgtcttggttctatggcatcactcagttctgcagggacgtgaaggaaatgctcggcttcagcccggggtggttctggaggatctgctgggtggccatcagccctctgtttctcctgttcatcatttgcagttttctgatgagcccgccacaactacgacttttccaatataattatccttactggagtatcatcttgggttactgcataggaacctcatctttcatttgcatccccacatatatagcttatcggttgatcatcactccagggacatttaaagagcgtattattaaaagtattaccccagaaacaccaacagaaattccttgtggggacatccgcttgaatgctgtgtaacacactcaccgagaggaaaaaggcttctccacaacctcctcctccagttctgatgaggcacgcctgccttctcccctccaagtgaatgagtttccagctaagcctgatgatggaagggccttctccacagggacacagtctggtgcccagactcaaggcctccagccacttatttccatggattcccctggacatattcccatggtagactgtgacacagctgagctggcctattttggacgtgtgaggatgtggatggaggtgatgaaaaccaccctatcatcagttaggattaggtttagaatcaagtctgtgaaagtctcctgtatcatttcttggtatgatcattggtatctgatatctgtttgcttctaaaggtttcactgttcatgaatacgtaaactgcgtaggagagaacagggatgctatctcgctagccatatattttctgagtagcatatataattttattgctggaatctactagaaccttctaatccatgtgctgctgtggcatcaggaaaggaagatgtaagaagctaaaatgaaaaatagtgtgtccatgcaa

SEQ ID NO: 56614 - DNA, 1682 bp, Homo Sapiens
agctctcagagggaattgagcacccggcagcggtctcaggccaagccccctgccagcatggccagcgagttcaagaagaagctcttctggagggcagtggtggccgagttcctggccacgaccctctttgtcttcatcagcatcggttctgccctgggcttcaaatacccggtggggaacaaccagacggcggtccaggacaacgtgaaggtgtcgctggccttcgggctgagcatcgccacgctggcgcagagtgtgggccacatcagcggcgcccacctcaacccggctgtcacactggggctgctgctcagctgccagatcagcatcttccgtgccctcatgtacatcatcgcccagtgcgtgggggccatcgtcgccaccgccatcctctcaggcatcacctcctccctgactgggaactcgcttggccgcaatgacctggctgatggtgtgaactcgggccagggcctgggcatcgagatcatcgggaccctccagctggtgctatgcgtgctggctactaccgaccggaggcgccgtgaccttggtggctcagccccccttgccatcggcctctctgtagcccttggacacctcctggctattgactacactggctgtgggattaaccctgctcggtcctttggctccgcggtgatcacacacaacttcagcaaccactggattttctgggtggggccattcatcgggggagccctggctgtactcatctacgacttcatcctggccccacgcagcagtgacctcacagaccgcgtgaaggtgtggaccagcggccaggtggaggagtatgacctggatgccgacgacatcaactccagggtggagatgaagcccaaatagaaggggtctggcccgggcatccacgtagggggcaggggcaggggcgggcggagggaggggaggggtgaaatccatactgtagacactctgacaagctggccaaagtcacttccccaagatctgccagacctgcatggtcaagcctcttatgggggtgtttctatctctttctttctctttctgtttcctggcctcagagcttcctggggaccaagatttaccaattcacccactcccttgaagttgtggaggaggtgaaagaaagggacccacctgctagtcgcccctcagagcatgatgggaggtgtgccagaaagtcccccctcgccccaaagttgctcaccgactcacctgcgcaagtgcctgggattctaccgtaattgctttgtgcctttgggcacggccctccttcttttcctaacatgcaccttgctcccaatggtgcttggagggggaagagatcccaggaggtgcagtggagggggcaagctttgctccttcagttctgcttgctcccaagcccctgacccgctcggacttactgcctgaccttggaatcgtccctatatcagggcctgagtgacctccttctgcaaagtggcagggaccggcagagctctacaggcctgcagcccctaagtgcaaacacagcatgggtccagaagacgtggtctagaccagggctgctctttccacttgccctgtgttctttccccaggggcatgactgtcgccacacgcctctgcatatatgtctctttggagttggaatttcattatatgttaagaaaataaaggaaaatgacttgtaaggtc

SEQ ID NO: 56615 - DNA, 6249 bp, Homo Sapiens
ccgcggagggagcgagctaggagcgtccacgcccaacgcagtcaccgtcccacggcctcagagagcgaaccgcggctccaccgtcggcggggcgacccccccctccggaccccgcccgcaccccgccccccctccgccgccgtcgcggcggcggggccaggcggcccgagccgtgcagtcggaggtccttgtgcatgaagacagatttgttctatggcctcggagttgggtgccagggatgatggaggctgcactgagctggcaaagcccctctatcttcagtacttggagagggccctccggttggaccattttctgcgacaaacgtcagctatcttcaataggaatatttctagtgatgacagtgaagatggactggatgacagtaatccattattgccccagtctggggatcccttaatacaagttaaggaagaacctccaaattcattgcttggtgaaacttctggagcaggcagttctggaatgttaaacacatattctctgaatggagttctacagtcagaatcaaaatgtgataaggggaatttatataatttctctaagctgaagaaaagcagaaagtggctaaagagcattctgctaagtgatgaatccagcgaggctgattctcagagtgaagacgatgatgaagaagaactcaatctcagcagagaagaacttcacaacatgcttcgactacacaaatataagaaacttcaccaaaataagtatagtaaagacaaggagttgcagcaatatcagtactacagtgcaggcctgctctccacatatgaccctttctatgagcaacaacggcacctacttggacccaagaaaaagaaatttaaggaggaaaagaaacttaaagctaagttgaaaaaagtgaagaaaaaaagacgaagagatgaagaactttcctctgaagaatcccctcgtcgccatcaccaccagaccaaagtctttgccaagttttctcacgatgcacctccccctggcactaagaaaaagcacttatccattgagcagctgaatgctcgtcgcaggaaagtatggctcagcattgtgaaaaaggaactaccaaaggcaaataagcagaaagcttcagctcgtaacctgtttctcaccaatagccgaaagcttgctcaccagtgcatgaaggaggtgcgtcgagctgccttgcaggcccagaagaactgtaaggaaaccttgcctcgtgcccgccgcctcaccaaggagatgcttctgtactggaagaaatatgagaaagtagagaaggagcaccgcaagagagcagagaaggaagctttggagcagcggaagttggatgaggaaatgcgggaggccaagaggcaacagcgaaaactcaacttcttaattacccagacagagttgtatgcccatttcatgagtcgcaaacgagatatgggtcatgatggtatccaggaagaaatcctaaggaaactggaagacagttctacccagagacaaatcgatataggtggaggagtggtagttaacatcacacaggaggattatgatagtaaccattttaaagcccaggccctgaagaatgctgaaaatgcttaccatattcaccaagctcggacaaggtcatttgatgaagatgcaaaagaaagtcgagcagctgccctacgggcagcaaacaagtctggcactgggtttggggagagttatagcctggctaacccatctatccgggctggtgaggatattccacagcccacaatttttaatggcaaattgaaaggttatcaactgaaaggcatgaattggttggccaatctatatgaacagggtattaatggcattcttgctgatgaaatgggccttggtaaaacagtacagagcattgcccttctggcccatctggctgagagagagaacatttggggacctttcttaataatttcacctgcgtctacacttaacaattggcaccaggagtttactagatttgttcctaaatttaaggtgctaccatattggggaaatcctcatgatagaaaagtcatcagaaggttctggagtcagaagaccctctacactcaggatgcccccttccatgtggttattaccagctatcagctggtggtgcaggatgtaaagtatttccagcgggtcaagtggcaatacatggtactggatgaggctcaggcgctcaagagtagttccagtgttcgttggaagatcctcttacagttccagtgtcggaatcggcttttgctaaccgggaccccaattcagaacaccatggcagagctttgggctctgctgcatttcattatgccaacattatttgattcacatgaggaatttaatgaatggttttccaaggacattgagagccatgccgaaaacaaatctgctattgatgagaatcaactttctcgcttacacatgattttgaagccatttatgctgaggagaatcaagaaagatgtggaaaatgaattatctgacaagattgagattctaatgtattgccaactgaccagccgacagaagctgctatatcaggcactaaagaacaaaatttccattgaggatttattgcagtcttctatgggctctacccaacaagcacagaacaccaccagcagcctcatgaatctggtcatgcagtttaggaaggtgtgtaatcacccggagttatttgaacggcaagaaacttggtctccatttcatatttccctaaagccataccacatttcaaagtttatctaccgtcatggacagatcagggtcttcaatcattcacgagacaggtggttaagggttctttctccatttgcaccagactatatccaacggtctctctttcacagaaaaggtattaatgaagaaagctgtttctctttccttcgctttattgatatatctccagcagaaatggcaaaccttatgcttcagggacttttggccagatggttagctcttttcctgtctctgaaagcctcctacaggctccatcagctacgctcctggggagcgccagaaggggagagccaccagagatacctgaggaacaaggatttccttcttggggttaattttccactctcctttccaaacctttgcagctgccctttgttaaagtctcttgttttcagcagccactgtaaagcagtgagtggctactcagaccaggttgtccatcagcggagatcagctacctcctcgctgcgtcgctgcctgctcactgagctgccatcttttttgtgtgtggccagtccacgagttaccgcagtgccattggattcttactgcaatgaccgaagtgcagaatatgaaaggcgagttctgaaggaaggagggagtctggcagccaagcagtgtttgttgaatggggcccctgaactggctgcagactggctaaatagacgatcacagttcttcccagagccagctggaggtctgtggagcatcagacctcagaatggctggtctttcatcaggattccaggcaaggagagcctcatcactgacagtggaaagctgtatgcccttgatgtcctgctgactcggctcaagtctcaagggcatagggtccttatctactcccagatgaccaggatgatagacctactggaggaatacatggtttacaggaagcatacctacatgaggcttgatggctcatccaagatctcggagaggcgagacatggttgctgattttcagaacaggaatgacatctttgtgttcctgttaagcacacgagctggaggactgggtatcaatctcactgctgcagacacagtgattttctatgatagcgactggaaccccactgtggaccagcaggccatggacagggcccaccgcttagggcagacaaagcaggttactgtgtaccggctcatctgtaaaggcaccattgaagaacgcattctgcaaagagccaaggagaagagtgagattcagcggatggtgatttcaggtgggaacttcaaaccagataccttgaaacccaaagaggtggttagtcttcttctagacgacgaagagttggagaagaaactgaggctgcggcaggaagagaaacggcaacaggaggaaaccaaccgagtgaaagagcgcaagcggaagcgggaaaagtatgcagagaagaagaaaaaagaagatgaattggatgggaaaaggagaaaagagggtgtgaacctggtgatcccatttgttccctcggctgataactccaacctctctgctgacggagatgactccttcattagcgtggactcagccatgccaagccctttcagtgagatctccatcagcagtgagctgcacactggctccattcccctggacgagagcagcagtgacatgctggtcattgtggatgacccagcctcctcagcccctcagtctcgagctaccaactctcccgcatccataacaggctccgtctcagataccgtgaatggaatttccattcaggaaatgccagctgcaggacgtggtcactcagcccgaagccgaggccgccccaaaggttcaggaagcacagccaaaggagcagggaagggccggagccgaaagtccacggcaggcagtgctgctgcaatggcaggagccaaagccggggctgcagcggcctctgcagctgcctatgccgcatacgggtacaacgtgtctaaaggaatctccgccagcagtcctctgcagacatcccttgttcggcctgctggccttgctgactttggaccttcaagcgcctcttctcctttgagttcccctttgagcaagggaaataatgttcctgggaatcccaagaacctccacatgaccagcagcctagccccagactctctggtccggaaacagggcaaaggcaccaacccctctggaggacggtaaccatctgggccctccgacttccttcaaccaaaccagggctagagtcctgacctgccagtggtctttggatggcttgccccgtgcagcatcttgcatcctgagtcagaagtggaaatgtccagcaggggaaggacaggcaggtggatggtgtgagcacttttatcatctgtgtctcatcaggagcatctggggtgcctgtaggaggaaggccacagggcatggatcagccccactgcatctcaagtgaactgtatagccaagtcttaaacctctcacggggcaagcctgacacagaccccctttagatgctcaggcatactgtttccatcccgattccactcttcggctctgacacgtcccttgcaaagtctccgcaggtgctgtgaagagccttccatggtagagatttctcttaagagtgtgatttctcatagggctagtaagggagattgtatacctgttgtccacagtcttcaggcagctccccaggtctctgaaccccagagtgtcatcattggagagagcagtgactgcgagagatggtggaggccgctaagcatggtagaggctagaggaagtctatccacaggcagttgtgttcccagcaattcctcccatcctgcatggttcacaccaagagaaccttcagatcctaccagcaaccgtagcaccttccacccaggggactcccagaagccagtaaagagaccaggagccacctcaatcagcaggacagcctcactgcccctcttgcagagtcccctttgcccatcctgaatgcacagtctccctgctcatgcccttcagtcccctgcttggctgtatgcactgtctatattgcactgagagaggaagggacagcaggagtgaggtgaagagggcggagagagggggcaggctcggcaccggccctcccagcccggccagcctgagcttgctgccctccagtagagacagaggggcagtgtttgcatgggaggtgtttctgcctgtccctgcctgatgtccctggtggagcaggtacctccgggcgggcaagcctctgatttgcacacctgaaaatcgcggaattgagtttcgatagattgatttttaaaacttttttggagtagggggtataggggaatcatttaatttaaatcattaagattcccctgctcaaacccagattcctgtgtacagatgctatttagagggaatcagaaaaatgccaagccttttctctttgaatgtgctatttttataactgaacttgtacatatgtataaagagagacacatcttccttttactaactggataaaaaaatcttaaataaaatggagtgagataattttatgtaaaaaaaaaaaaaaaaaaaaaaaaa

SEQ ID NO: 56616 - DNA, 1398 bp, Homo Sapiens
cagtcgcctgtgtacctttgtactttctacagtgaaagttgctacaggatctccctttctcaataaattcatctgcggtggagaaaatcagcatgagtactacaggccaagtcatcagatgcaaagcagccatactctggaagcctggtgcaccattttctattgaagaggtagaagtggccccaccaaaggcaaaggaggttcgcataaaggttgtggccaccggactgtgtggtacagagatgaaagtgttggggagtaaacacttggacctcttgtatcccaccatcttgggccatgaaggggctggaatcgttgagagtattggagaaggagtaagcacagtgaaaccaggtgacaaagttatcacactctttctgccacagtgtggagaatgtacctcttgcctgaattctgagggcaatttttgtatacaattcaaacagtcaaaaacccaactgatgtctgatggtaccagcaggtttacctgcaagggaaaatcaatatatcactttggtaataccagcaccttctgtgaatacacagtgataaaggaaatctcagttgccaagattgatgcagtcgctcctctagagaaagtatgcctaattagctgtggcttttccactgggtttggtgctgcaatcaatactgccaaggtgactccaggttctacctgtgctgtgtttggcctgggaggagtcggcttgtctgttgtcatgggttgtaaagcagcaggagcagccaggatcattggagtggatgtcaacaaggagaaatttaagaaggcacaggaattgggtgcgactgagtgcctcaaccctcaggacttaaagaaacccattcaagaagttttatttgatatgacagatgctggtatagacttctgctttgaggccattggaaatctggacgttctggcagctgccctcgcctcctgcaatgagagctatggggtctgtgtggttgttggggtgttgcctgccagtgttcaactcaaaatcagtggccagttgttcttctcaggacgttctttgaagggttctgtttttggaggctggaagagcagacagcacatccctaaactggttgctgattatatggcagagaagttgaatctagatccactaattactcatactctgaatcttgataaaatcaatgaagcagttgaattaatgaaaactggaaaatggtaaactgcccacataaattttatgtctgtgtgtttgagaccaagagaaagggtgtattggcttgggagtagaagaagggtcgtccctgctgcagaagctgtatactgataattgaagaggctttcaggaatttgtaaagcatctccttcccctctgcattttgttttatttctagctaataaaatacataatcctgaaagta

SEQ ID NO: 56617 - DNA, 4140 bp, Homo Sapiens
gcattgcgcccgcagccctggaccatttgtcaggactactcgtgagacggagaaaaaaaaaagagaaaatttggggaacccttaggagaaatcttgagagtggacagcaattgtgaagatcgccagagagttctgtgtttcatcaccgccgaaaggttaaaaaataaatcatgactgaatctgcctctagcacaagtggtcaagagtttgatgtgttcagtgttatggactggaaagatggagtgggcacgttaccaggaagtgacttaaagtttcgggtaaatgagtttggagccctggaagttattacagatgagaatgagatggaaaatgttaaaaaagcaactgctaccaccacttggatggtaccaactgctcaagaagtcttttcagagaagactgggatgcctttcaggttgaaggatccagtgaaagtagaagggcttcagttctgtgagaactgttgtcagtatggcaacgtagatgagtgtctttctggaggaaactattgcagccagaattgtgctcggcacatcaaagataaagatcagaaggaagaaagggacgtagaagaagacaatgaggaagaagatcctaagtgtagtcggaagaaaaaaccaaaattatctctgaaagctgacaccaaggaggatggagaagagagagatgatgaaatggagaacaaacaagatgtaagaatcctgaggggttcgcagagagcacggaggaaaagacgaggggattcggctgtactaaagcagggtttgcctcctaaaggaaagaaagcgtggtgctgggcatcctacctggaagaggagaaagcggtggcagtgccggcgaagctgttcaaggagcatcaatcctttccatataacaaaaatggattcaaagttggcatgaaattagaaggcgtggatcccgagcatcagtctgtgtactgtgtcctcaccgtcgcggaggtttgtggataccggataaagcttcactttgatgggtattctgattgctatgacttctgggtgaatgcagacgctctggatatccacccagttgggtggtgtgagaaaaccggccacaaactccatcctccaaaagggtataaagaagaagaattcaattggcagacctatcttaagacatgtaaagctcaagctgctcctaagtcattatttgaaaatcagaatataacagtgatcccatcgggctttcgagttggtatgaagcttgaggcagtagacaaaaagaatccctcattcatctgtgttgctacggtaacagatatggtggacaatcgtttcctggtacattttgacaactgggatgagagctatgactattggtgtgaagcatcaagtccacatattcatccagttggttggtgtaaggaacatagaagaacccttattactccaccaggttatccaaatgtgaaacatttttcttgggataaatacttagaagaaaccaattctttacctgctcctgcaagagctttcaaagtgaaacctcctcatggattccagaaaaaaatgaagcttgaggttgtagacaaaaggaaccctatgtttattagagtagcaactgtggcagacacagatgatcaccgggtaaaagttcactttgatggctggaacaattgctatgattactggatagatgcagattctcctgatattcaccctgtaggctggtgttcaaaaacaggacatccccttcagcctcctttgagccccttagaattaatggaagcttcagaacatggtggatgctcaaccccgggatgtaaagggattggccatttcaagagagcgagacatctgggccctcacagtgctgccaactgtccctattcagaaatcaatttgaataaagaccgtatttttccagaccgcttaagtggtgagatgcctccggctagtccgtcatttccaagaaataaaaggacagatgcaaatgaaagctcttcttcccctgaaatcagagaccagcatgctgatgatgtcaaagaagactttgaagagagaacagaaagtgaaatgagaacatcacatgaagccagaggtgcccgggaagaacccaccgtccagcaggcacagcgtcggtcagctgtctttctgtcctttaagtccccaattccatgtctgcccttgcgctgggagcagcaaagcaaacttcttccaactgtcgcaggaatccctgccagtaaagtttccaaatggagcacagacgaggtgtcagaatttatacagagcttacctgggtgtgaagaacatggaaaggtatttaaagatgaacaaattgatggagaagcatttctacttatgactcaaacagacattgttaaaattatgagcattaaactgggccctgctctcaaaattttcaattccatcctgatgttcaaagctgcagagaagaattctcacaatgaactttgaagatggtgaattctgaataccatcagcattctgctttaaagctcatgttttattcaaagcacaaggacggttataactcctaagtgagaagtctccaaaactcaaaagagcaacactatcggattatttatattactcaagagacaatatatatgaattcttatgaaagtgcttgagcttttaaccaggtactgtctaacaacagtcatcttttggttctgttcactgagctaaatttatctttgtaaatctttttgagtctggggggtggggggaaggggggcttcattaattatttatggtaatggggggcagagtaagaacttttggcattttgtaaacattgttgaattctctttcatgtacactgtttctttttcaatactttcagaaacctttttatataatcaaatttcaatttaaaccaaattagtcgaaacctggctaagtttagccagtaggactgttatctgtattgttaattttgtgccatattttgaattgcaacattatgctaagtataactttgcaagtcatgatattgcctaactgcttgtcataattgtcagggctgaatagttgtaagaatgacttttctttgaatcagtatttttccttttgcacgcattatgaaatgttaaacaaattacttttcaccagcatctttactataattaccaaaaacatgtatataaaagaatgaaattgaaaaataaaatatataaacataaataaattaggtagtgtattttgagtggcatcagtctcactcatcttggtgccccggtgtttacaagagccagatggtgtcagaggagtacgcagttgtatgcagttatggttggggggaatgtttgtgagggtcttgaactatttatgagatgatcttgagcttctaattttcattgatgaaattgtggtggtttacagagactaagagctcattctgtcaacagaaacactaatctgtacagagcgctgtctcaggtcatgcattgtcctccaaacccaaaggtttttttcagggttggctagagagcgagtattgtgattttgctgaaaagacaaggtgtgaaggagcaacttcagttgacacaaaatttgaaatgctcacagatcagggaggtgatttcccaaagtaattgcccaagaacctccgttttggaaggattcctttttctgtagaatactttgcctcgatatataagcatacagatgcactttaaatgaaaacccttgattataaattgatagctggtagtgtttcttttgcaagaatgcatttctaaggcaaaaggtaaattattttgtccgtcttttgatgtactttctgattccaggattggatatttattcaaggactattttaaaaatagaaagtaagtttgtagcatgctgtctgaattctggggtaagttccacctcttctttagttgctttcgttttttatgatgtaggacttcctttgatatccctgttggaagtccattagcagtcctttgcatttgccaattcaaggtaaaacagggtcagtgacatctgcagtgtcccagtcatttatttgcatgaatctgcttaaataagttttttgttgctgttttttcttttttatgttttgttcagaatttgtacattcaagttgtacttgttatatctgacatgaatgaaataaaatcttaattacagaaaaaaaaaaaaaaaa

SEQ ID NO: 56618 - DNA, 2825 bp, Homo Sapiens
cgcgcaggctgcggtcgcgcaggcgcagtcggggcgccttcccggtataggcgccttttaccccagcgtgtcctgagtctttggttcgcgaagtgccgttaggccaagcaggtgctaaaagcccggggtcgtggaccccggccaggtcttagcagcatggaggcgcagggtgtagcggagggcgcggggccgggcgccgccagcggcgtgccccaccccgcggccctagccccggctgcggctcccaccttggcgccagcctcggtggcggccgcggcctctcaattcaccctgctagtgatgcaaccctgtgctgggcaggacgaggctgcggcccccgggggcagcgttggggcgggcaagcccgttaggtacctgtgcgaaggggccggggatggcgaagaggaggctggggaggacgaggcggacctgttagacacttcggaccctccggggggaggcgagagcgcggctagtttggaggatctagaggacgaggagactcactcggggggcgagggcagcagcgggggcgcccggaggcggggcagcggtgggggcagcatgagcaagacctgcacctacgaaggctgcagcgagaccacgagccaggtggccaagcagcgcaaaccgtggatgtgcaagaaacaccgcaacaagatgtacaaggacaagtataaaaagaagaagagcgaccaggccctgaactgcggtgggactgcctcgactggcagcgcgggaaacgtcaaactcgaggaaagtgcagataacatactctccattgttaaacaaagaacaggatcttttggggatcgtcctgcaagacctactcttttagaacaagtgttaaatcaaaaaagactgtcgttactaagaagtccagaagtagtgcaatttttacagaaacagcaacagctattaaatcagcaagttttggagcaaagacaacagcagtttccaggaacatcaatgtgagggaacttaccaagaacatctacatggtttttatcttattgtaatagatgagcatatttttttaccagacataaatggggtaataatctatgcctgtagaacataaacattttcctgtaaatgtatgtgtgcatttggggataagtaagtattgcactttgtgcatctaatctttcagattactgtgagtttgaagaagtcagcttatctttccaaataacatttaattataatgttttttaaaaaatatattcctcttcagtcattgttactgaaggtaatgaagcagttactttctgtggaagtcataaagttaatagatattaatcttgactcatctagctcagtggttctcatcaagggtcaatttgattgtcatagtgaccttgaaaaccactggcttttagtgagtggccaggaaatgctaaatgttctgcagtgtcaggggtagtcccacatactaaagattgtctcacccgcagtgccaataacactcctaagaaatgttgatggctattttgtggtgctaacatgtagttggggcacctacaattgggttctcttaataacctttctttgcagttaagactgaagctgtcaaagaggtaagcacattttatatagacgtaaggaaagtgattattgtttaatatctgtgaatttaggatgtgcatctcttttcagaggtgtgttagtaaaacctgacggattaactaagcacactgggatgtgtctcctacagttggcttctctctttgatgttacctgttagtgctgatctcttaaagcagacatttcttgtttgttgaatttgtgaacagtatagatctcagcccaccaatgccaagacaaaattatttttcttatacttattttttattaaacaaaatgaaaaagatccttttcaaaaaggtgatcctgaaaataaaactaacactccagtattttgtcattgtttttcgcaattgagctatctgaaaactgttattcctaagtaatgttcaaaaatgataagtaatctggatacctttttcttatactttctcctaggaaaactttaaaactttaaaaaggcaaacctaccaataggaataacaaattaaatgtcaagagagtatatccaatattaggatataaatgtatgtgtctcaagtttaactctacaaaaatttgttacttgttttttaaactctatatataaagttcgacttaatcatggctgttctaagaagtacttatggagagcaagaacatttttgttcatttcttaatgtgtgtgtttttacttgcatatctgttcaaaacacttttaacaaaattaattcattaaagtccagttgttgacctttgagttagctgatttctttattctgttctttagtttattcttactagatgcagaggaattcatctactgtctgttattaactgttagtttattctcatacttacgatgttgagagtttttttgaagcttaagttaccctttatggtggaaaacattagcttatgcttctttagatggaataatgggaaaggagggaaatgggaaatggatggaaatgggaaaggagggaaaataatagcccagtgagagctgaatgaaaagggactgaatttaaatatttgtaagaactttgtgatgatgagtaattgtcagacgtgggatagataactgagaggctcagaatctttaccaaggatattttttaggataaggtagctgcctgttcatgaatttggataagaatagtaggacaatattcaacacaatttaatttttgtctgccacattagacatttttttaccttataaaatgatcaataaagcaataaggtttattttgggt

SEQ ID NO: 56619 - DNA, 2262 bp, Homo Sapiens
tgagccggccgcacgcggaggatcctaaggagcagctctgttgcgacataggccgagcagcgaggcccagctccctgaaacaacagtaacctacccctgtgggtcatcatcatgccctccgacctggccaagaagaaggcagccaaaaagaaggaggctgccaaagctcgacagcggcccagaaaaggacatgaagaaaatggagatgttgtcacagaaccacaggtggcagagaagaatgaggccaatggcagagagaccacagaagtagatttgctgaccaaggagctagaggactttgagatgaagaaagctgctgctcgagctgtcactggcgtcctggcctctcaccccaacagtactgatgttcacatcatcaacctctcacttacctttcatggtcaagagctgctcagtgacaccaaactggaattaaactcaggccgtcgttatggcctcattggtttaaatggaattggaaagtccatgctgctctctgctattgggaagcgtgaagtgcccatccctgagcacatcgacatctaccatctgactcgagagatgccccctagtgacaagacacccttgcattgtgtgatggaagtcgacacagagcgggccatgctggagaaagaggcagagcggctggctcatgaggatgcggagtgtgagaagctcatggagctctacgagcgcctggaggagctggatgccgacaaggcagagatgagggcctcgcggatcttgcatggactgggtttcacacctgccatgcagcgcaagaagctaaaagacttcagtgggggctggaggatgagggttgcccttgccagagccctctttattcggcccttcatgctgctcctggatgagcctaccaaccacctggacctagatgcttgcgtgtggttggaagaagaactaaaaacttttaagcgcatcttggtcctcgtctcccattcccaggattttctgaatggtgtctgtaccaatatcattcacatgcacaacaagaaactgaagtattatacgggtaattatgatcagtacgtgaagacgcggctagagctggaggagaaccagatgaagaggtttcactgggagcaagatcagattgcacacatgaagaactacattgcgaggtttggtcatggcagtgccaagctggcccggcaggcccagagcaaggagaagacgctacagaaaatgatggcatcaggactgacagagagggtcgtgagcgataagacactgtcattttatttcccaccatgtggcaagatccctccacctgtcattatggtgcaaaatgtgagcttcaagtatacaaaagatgggccttgcatctacaataatctagaatttggaattgaccttgacacacgagtggctctggtagggcccaatggagcagggaagtcaactcttctgaagctgctaactggagagctactacccacagatggcatgatccgaaaacactctcatgtcaagatagggcgttaccatcagcatttacaagagcagctggacttagatctctcacctttggagtacatgatgaagtgctacccagagatcaaggagaaggaagaaatgaggaagatcattgggcgatacggtctcactgggaaacaacaggtgagcccaatccggaacttgtcagacgggcagaagtgccgagtgtgtctggcctggctggcctggcagaacccccacatgctcttcctggatgaacccaccaatcacctggatatcgagaccatcgacgccctggcagatgccatcaatgagtttgagggtggtatgatgctggtcagccatgacttcagactcattcagcaggttgcacaggaaatttgggtctgtgagaagcagacaatcaccaagtggcctggagacatcctggcttacaaggagcacctcaagtccaagctggtggatgaggagccccagctcaccaagaggacccacaacgtgtgcaccctgacattggcatctctgccaaggccatgagcatcatgaactcgtttgtaaacgacgtgtttgagcagctggcgtgtgaggctgcccggctggcccagtactcgggccggaccaccctgacatcccgagaagtccagacggctgtgcgtctgctgctgcctggggagctggccaagcacgctgtgtctgagggcaccaaggctgtcaccaagtacaccagctccaagtgacccagggcctgacaaaaataaagggtgaactgttaaaaaaaaaaaa

SEQ ID NO: 56620 - DNA, 1855 bp, Homo Sapiens
ggttgctactgctgcggctaaccaaacagctcatgcttctctgaagacttgcagcaaggtttgctgaggctcacagaagatagccccagtgttttggagtggttttgaatgtgattctgagatcagactgactgagctggaatcctggctttatatcttaccagctacacaaccttggagtcttagaaattttttcttttcaataagcagtcatccttactttccctcaagatgacaaacagttcgttcttctgcccagtttataaagatctggagccattcacgtattttttttatttagttttccttgttggaattattggaagttgttttgcaacctgggcttttatacagaagaatacgaatcacaggtgtgtgagcatctacttaattaatttgcttacagccgatttcctgcttactctggcattaccagtgaaaattgttgttgacttgggtgtggcaccttggaagctgaagatattccactgccaagtaacagcctgcctcatctatatcaatatgtatttatcaattatcttcttagcatttgtcagcattgaccgctgtcttcagctgacacacagctgcaagatctaccgaatacaagaacccggatttgccaaaatgatatcaaccgttgtgtggctaatggtccttcttataatggtgccaaatatgatgattcccatcaaagacatcaaggaaaagtcaaatgtgggttgtatggagtttaaaaaggaatttggaagaaattggcatttgctgacaaatttcatatgtgtagcaatatttttaaatttctcagccatcattttaatatccaattgccttgtaattcgacagctctacagaaacaaagataatgaaaattacccaaatgtgaaaaaggctctcatcaacatacttttagtgaccacgggctacatcatatgctttgttccttaccacattgtccgaatcccgtataccctcagccagacagaagtcataactgattgctcaaccaggatttcactcttcaaagccaaagaggctacactgctcctggctgtgtcgaacctgtgctttgatcctgtcctgtactatcacctctcaaaagcattccgctcaaaggtcactgagacttttgcctcacctaaagagaccaaggctcagaaagaaaaattaagatgtgaaaataatgcataaaagacaggatttttgtgctaccaattctggccttactggaccataaagttaattatagctttgaaagataaaaaaaaaaaaaaaaacaaaaaaaaactcagtatgaaaaaatacagttagctagcaaatatggacaggtttacttagaaatcctgtttctaaatgcaagtcaagctttattgttaggcttgctgctactcattaacccaaatatttgtacaaaaaactaaagagtctcattgaacgaatgtaaaatcctgcaatatccttgaaatccaaaagaggtccatgacatagacccaaaggtattcatgagttattcatttaaatgcctggaactgacttcttgataaaaatataaaaaataatttccatgtaagttaccagaaagcccaccagcaacataattttaaagcctttcggattacttttaaaaaatgcagcttacatataacaacttgtgcctattttatttctaatctatcacttcaaaagatggtaatctttcaactcattattcctccaatttttaatgtcgaatttttttctaacacaataaccaaaagcttttatttataaaaaggcttgaaaaatataaaaaaaaaaaaaaaaaaaaaaaaaaaaaaaaaaaaaaaaaaaaaaaaaaaaaaaaaaaaaaaaaaaa

SEQ ID NO: 56621 - DNA, 1990 bp, Homo Sapiens
caaggagccatgccagctggacacacacttcttccagggcctctggcagccaggacagagttgagaccacagctgttgagaccctgagccctgagtctgtattgctcaagaagggccttccccagcaatgacctcctcattgcttctggcctttctcctcctggctccaaccacagtggccactcccagagctggcggtcagtgtccagcatgtggggggcccaccttggaactggagagccagcgggagctgcttcttgatctggccaagagaagcatcttggacaagctgcacctcacccagcgcccaacactgaaccgccctgtgtccagagctgctttgaggactgcactgcagcacctccacggggtcccacagggggcacttctagaggacaacagggaacaggaatgtgaaatcatcagctttgctgagacaggcctctccaccatcaaccagactcgtcttgattttcacttctcctctgatagaactgctggtgacagggaggtccagcaggccagtctcatgttctttgtgcagctcccttccaataccacttggaccttgaaagtgagagtccttgtgctgggtccacataataccaacctcaccttggctactcagtacctgctggaggtggatgccagtggctggcatcaactccccctagggcctgaagctcaagctgcctgcagccaggggcacctgaccctggagctggtacttgaaggccaggtagcccagagctcagtcatcctgggtggagctgcccataggccttttgtggcagcccgggtgagagttgggggcaaacaccagattcaccgacgaggcatcgactgccaaggagggtccaggatgtgctgtcgacaagagttttttgtggacttccgtgagattggctggcacgactggatcatccagcctgagggctacgccatgaacttctgcatagggcagtgcccactacacatagcaggcatgcctggtattgctgcctcctttcacactgcagtgctcaatcttctcaaggccaacacagctgcaggcaccactggagggggctcatgctgtgtacccacggcccggcgccccctgtctctgctctattatgacagggacagcaacattgtcaagactgacatacctgacatggtagtagaggcctgtgggtgcagttagtctatgtgtggtatgggcagcccaaggttgcatgggaaaacacgcccctacagaagtgcacttccttgagaggagggaatgacctcattctctgtccagaatgtggactccctcttcctgagcatcttatggaaattaccccacctttgacttgaagaaaccttcatctaaagcaagtcactgtgccatcttcctgaccactaccctctttcctagggcatagtccatcccgctagtccatcccgctagccccactccagggactcagacccatctccaaccatgagcaatgccatctggttcccaggcaaagacacccttagctcacctttaatagaccccataacccactatgccttcctgtcctttctactcaatggtccccactccaagatgagttgacacaaccccttcccccaatttttgtggatctccagagaggcccttctttggattcaccaaagtttagatcactgctgcccaaaatagaggcttacctacccccctctttgttgtgagcccctgtccttcttagttgtccaggtgaactactaaagctctctttgcataccttcatccattttttgtccttctctgcctttctctatgcccttaaggggtgacttgcctgagctctatcacctgagctcccctgccctctggcttcctgctgaggtcagggcatttcttatccctgttccctctctgtctaggtgtcatggttctgtgtaactgtggctattctgtgtccctacactacctggctacccccttccatggccccagctctgcctacattctgat

SEQ ID NO: 56622 - DNA, 4398 bp, Homo Sapiens
agtgaaagttcctcactgagtgagtggggctgactcttcctgcctccggctcttgcctcccagtgccatgcaggtgcaggatgcaaccaggcggccctcagccgtgcgcttcctcagctcctttctccagggccgccggcactccacctcagacccagtactgcggctgcagcaggcccggcggggctctggcttgggctccggctctgccacgaagctgctgtcctcgtcctctctccaggtgatggtggctgtttcctcagtcagccatgcagagggaaacccaactttccccgaaagaaaaagaaatttagaacgtccaacaccaaagtacacaaaagtaggggagcgtttacggcatgtcattcctggacacatggcatgttccatggcgtgtggcggtagagcttgcaagtatgagaacccagcccgctggagtgagcaggagcaagccattaagggggtttactcatcctgggtcactgataatatactggccatggcccgcccatcctctgagctcctggagaagtaccacatcattgatcagttcctcagccatggcataaaaacaataatcaacctccagcgccctggtgagcatgctagctgtgggaaccctctggaacaagaaagtggcttcacataccttcctgaggctttcatggaggctggcatttacttctacaatttcggatggaaggattatggtgtagcgtctcttactactatcctagatatggtgaaggtgatgacatttgccttacaggaaggaaaagtagctatccattgtcatgcagggcttggtcgaacaggtgttttaatagcctgttacttagtttttgcaacgagaatgactgctgaccaagcaattatatttgtgcgggcaaagcgacccaattccatacaaaccagaggacagctcctctgtgtaagggaatttactcagtttctaactcctctccgcaatatattctcttgctgtgatcccaaagcacatgctgtcaccttacctcaatatctaattcgccagcgtcatctgcttcatggttatgaggcacgacttctgaaacacgtgccaaaaattatccacctagtttgcaaattgctgctggacttagcggagaacaggccagtgatgatgaaggatgtgtccgaaggacctggtctctctgctgaaatagaaaagacaatgtctgagatggtcaccatgcagctggataaagagttactgaggcatgacagtgatgtgtccaacccgcctaaccccactgcagtggcagcagattttgacaatcgaggcatgattttctccaatgagcaacagtttgaccctctttggaaaaggcggaatgttgagtgccttcaacccctgactcatctgaaaaggcggctcagctacagtgactcagatttaaagagggccgagaacctcctggagcaaggggagactccacagacagtgcctgcccagatcttggttggccacaagcccaggcagcagaagctcataagccattgttacatcccacagtctccagaaccagacttacacaaggaagccttggttcgcagcacactttctttctggagtcagtcaaagtttggaggcctggaaggactcaaagataatgggtcaccaattttccatggaaggatcattccaaaggaagcacagcagagtggagctttctctgcagatgtttcaggctcacacagccctggggagccagtttcacccagctttgcaaatgtccataaggatccaaaccctgctcaccagcaagtgtctcactgtcagtgtaaaactcatggtgttgggagccctggctctgtcaggcagaacagcaggacaccccgaagccctctggactgtggctccagtcccaaagcacagttcttggttgaacatgaaacccaggacagtaaagatctgtctgaagcagcttcacactctgcattacagtctgaattgagtgctgaggcaagaagaatactggcggccaaagccctagcaaatttaaatgaatctgtagaaaaggaggaactaaaaaggaaggtagaaatgtggcagaaagagcttaattcccgagatggagcttgggaaagaatatgtggcgagagggaccctttcatcctatgcagcttgatgtggtcttgggtggagcaactgaaggagcctgtaatcaccaaagaggatgtggacatgttggttgacaggcgagcagatgccgcagaagcactttttttattagagaagggacagcaccagactattctctgcgtgttgcactgcatagtgaacctgcagacaattcccgtggatgtggaggaagctttccttgcccatgccattaaggcattcactaaggttaattttgattctgaaaatggaccaacagtttacaacaccctgaagaaaatatttaagcacacgctggaagaaaaaagaaaaatgacaaaagatggccctaagcctggcctctagctttcactcgtggtgaatatttcagacctaaagatccagatagtatctctgttcatatgtgaataagttgaagattgtggggctactttttctcatagcactttattttgaatgttgttagtttgtgctgagaatggtcgtccgtatttgaaccaattatttattttaaaatatatttaagctacatttttgttttgaaaaattgccataaatttggtgccactttcttttatttatttgactgagttaatattattgtattaacattttaagtatatggtgtttacattcttatttcttttgacattttggaaataatcataacttgtctttccaaaataaccattttcttgatggaactcttcctagagtttttaccaaatagctaactttagtagtaaaacctcattgtgtatccattcccccacagatgaactaagaaagtcaccaagtgtcttaagctgttttatatttgttacgaagaaggctattgctacaatatttttaaaggtttcttttttaactttgaaattttttgtttttccttttctttttataaatgtaacagagggtttcaaagcatattatttttcagagagatttagttttactttaatggagtgactgtgaagtggttgggattttttgcttgtagaaagtagacttgctctttgtcagatttccaaacaaccttgccagccttggctgtcaaaaggaggcaggagcagttctcaacacaccaagccttattcccactcccttgggttgctgctgagccaaatagcatctttacagaggaagtgggatcagaggcaggaagtgtggaaagttgctaagaagcagggcttgcctctgtcctcccggggactccacagggatattcgtgcagggcaggggctctgtgccagccctgctctctcagatgccacagccactctgcagaggtgactcttggagctggaggaagtcaaaactgggccactgtttgtactgatggtgtattagcatgagcagcgtggccctggccccacactcccaaatctgccactccatagacccacttgcctcaaggctttatatttggctgctttcttacaatgagaattaagatttttaaactgaagttgaccatacaggttgcattagccctaactggcttcatgtaagaagggtgactgcctaaactagttccttgtaagctgaaccatcaattatcagttgaagccatacttttatttaaattaatatacgtagataccagaggccaagccacagagaggataatagttcttcccaataaaggtgatattaatcagactaatttcgaactaaagaagttactgcttaaagacggaatttcaggggaagcaagactcatttagaacaaatgaaatttctccagtcctacatttctgaattgacttctagcacatcaaaaatatttcagtcattatcagtctcattaactgaaatgccaaatgctaaatgcagtgttctttcacactgttttaattttcttgggaaattgagtccagtggatgttaatggagtgggttgcccatccctgaaatgtcttattttcaagtgcctggcctgggaaagaaggggaagaaacaattgcattatatccaaagatacactataaaaatagagtttttaccaaaaaaagatgtttgttctcatctcagtaggcctcatttgggcaagtgacccacaggtcttttggcgagtttgctatttgcctgttgaaatacttgtttcaacttagagaacagttatgatgtgaccatagcatggcacaactaaaaatctaagcctgaaacctgaaaaaagagatatgacaagggaaattaatcaggctatacataagtattgtatttatttgaataaaaataaaaagagcaacccat

SEQ ID NO: 56623 - DNA, 4979 bp, Homo Sapiens
gcggtacgggggtggtgccgcgctcctggccccgcgcgggcggacggcggaggcgcctcccagcctgctatgggatggatgaagaagagaaccactatgtctcgcagctcagggaagtctacagcagctgcgacaccacggggactggctttctggaccgccaggagctgacccagctctgccttaagcttcacctggagcagcagctgcccgtcctcctgcagacgcttctcggaaacgaccatttcgccagggttaactttgaggaatttaaggaaggttttgtggctgtgttgtcttcaaatgctggtgttcgcccctcagatgaagacagtagttctttggaatcagctgcctccagtgccatccctccaaagtatgtgaatggttctaagtggtatggccgtcggagccggcctgagctatgtgacgctgccacagaagccagacgcgtgccggagcagcaaacccaggccagcctgaaaagtcacctctggcgctcagcgtctctggagagcgtggagagtcccaagtcagatgaagaggccgagagcactaaagaagctcagaatgaattatttgaagcacaaggacagctgcagacctgggattctgaggactttgggagcccccagaagtcctgcagcccctcctttgacaccccagagagccagatccggggcgtgtgggaagagctgggggtgggcagcagcggacacctgagcgagcaggagctggctgtggtctgccagagcgtcgggctccagggactcgagaaagaggaactcgaagacctgtttaacaaactggatcaagacggagacggcaaagtgagtcttgaggaattccagcttggcctcttcagtcatgagcccgcgctacttctagagtcttccactcgggttaaaccgagcaaggcttggtctcattaccaggtcccagaggagagcggctgccacaccaccacaacctcatccctcgtgtccctgtgctccagcctgcgcctcttctccagcattgacgatggttctggcttcgcttttcctgatcaggtcctggccatgtggacccaggaggggattcagaatggcagggagatcttgcagagcctggacttcagcgtggacgagaaggtgaaccttctggagctgacctgggcccttgacaacgagctcatgacagtggacagtgccgtccagcaggcagccctggcctgctaccaccaggagctgagctaccagcaagggcaggtggagcagctggcaagggagcgtgacaaggcaaggcaggacctggagagggccgagaagaggaacctggagtttgtgaaagagatggacgactgccactccaccctggagcagctcacggagaagaaaatcaagcatctggagcaggggtaccgggaaaggctgagcctcctgcggtctgaggtggaggcggagcgagagctgttctgggagcaggcccacaggcagagggccgcgctggagtgggacgtggggcgcctgcaggctgaggaggctggcctccgcgagaagctgaccctggccctgaaggaaaacagtcgcctacagaaggagattgtggaagtggtggaaaagctttcggattcggagaggctggccctgaagctgcagaaggacctggagtttgtgctgaaggacaagctggagccacagagtgcagagctcctggcccaggaggagcggttcgcagcagtcctgaaggaatacgagctcaagtgccgggacctgcaggaccgcaacgatgagctgcaagctgagctggaaggcctgtgggcgcggctgcccaagaaccggcacagcccctcatggagcccggatgggcgcagacggcagctccctggactcggcccagcaggcatttcattcctgggtaattctgctccagtgagtatagaaacggagctgatgatggagcaggtaaaggagcattaccaagacctcaggacccagctggagaccaaggtaaattactacgaaagggaaattgcggcactgaaaaggaactttgagaaggagaggaaggacatggagcaggctcgcaggcgcgaggtcagcgtgctggagggtcagaaggccgacctggaggagctccacgagaagtctcaggaggtcatctggggcctgcaggagcagctgcaggacacagcccgcggccccgagcctgagcagatgggcctggcaccctgctgcacccaggcactgtgtggcctggccctgcggcatcacagccacctgcagcagatcaggagagaggctgaggcggagctgagtggagagctgtcggggctgggagccctgcccgctcgcagagacctgaccttggagctggaggagccgccgcagggacccctgccacgcgggagccagaggtcggagcagctggagctggagagggcactgaagctgcagccctgtgcgagcgagaagcgcgcccagatgtgcgtatcgttggccctcgaggaggaggagttggagcttgcccgcgggaagcgagtggacgggccctccctggaagcagagatgcaggccctgccgaaagatgggctggtggcaggaagtggccaggagggcacacgtggcctcctaccactgcgtccgggctgtggggagcggccactggcctggctggccccaggtgatggcagagagtctgaggaggcggcaggagccgggcctcgccgcaggcaagcccaggacacagaagctacgcagagcccggcccccgcccctgccccggcatcccacggcccctcagagaggtggtcacgcatgcagccctgtggagtggatggggatattgtcccaaaggagccagagcctttcggcgcgagcgcagcggggctggagcagcctggagcccgggagctgcctctgctgggaacagagagagacgcctcgcaaacccagccacggatgtgggagccacccctgaggccggccgcttcgtgcaggggacaggctgagaggctacaggccattcaggaagagcgagcacgaagctggagcaggggcacccaggagcaggcctcggagcagcaggcccgggccgagggcgccctggagcctgggtgtcacaagcacagtgtggaggttgccaggagagggtccttgccatcccacctccagctcgcagacccgcagggttcctggcaggagcagcttgctgccccagaagagggggagaccaaaatagcgctggagagagagaaggatgacatggaaaccaaacttctacatctggaagacgtcgtccgggctctggagaaacatgtagatttgagagagaacgacagactggagttccatagactttctgaagaaaacactttgttgaaaaacgatctgggaagggttcggcaagagcttgaagctgcagaaagtactcacgatgcacagaggaaggaaattgaggttttaaagaaagacaaggaaaaggcctgctctgagatggaggtgctcaacagacagaatcagaactacaaggatcaattatcccagctcaatgtcagggttcttcaactgggacaggaggcttctacccaccaggcccaaaacgaggagcatcgtgtgaccattcagatgttaacacagagcctggaggaggtggttcgcagtgggcagcagcagagtgaccaaatccaaaaacttagagttgaacttgaatgcctgaatcaggaacatcagagcctgcagctgccatggtcagagctgacccagacccttgaggaaagtcaagaccaggtgcagggagctcacctgaggctgaggcaggcccaggcccagcacttgcaggaggtccggctggtgccccaggaccgtgtggccgagctgcatcgcctgctcagccttcagggagagcaggccaggaggcgcctggatgcacagcgggaagaacatgagaaacagctgaaagccacagaagagcgggtggaagaggcggagatgattctgaagaatatggaaatgctcctccaagagaaagtggataagctgaaggagcagtttgaaaagaacacgaagtccgacctgctgctgaaggagctgtacgtggagaacgcccacctggtgagagcacttcaggccaccgaggagaagcagcgaggcgccgagaaacaaagccgcctcttggaagaaaaagttcgcgctctcaacaaactcgtcagtaggattgcccccgcagccctctctgtgtaaagacagattattttctaggattcattcgaaagcacatcttttaaattaagccactgtgctgccttagattccgtgggtcatgagccatgagtcctgggacatctgaggattgggattctttgttcaccccgcagatagttaatgaatggtctgccctgggcaagatggaggtgggggctgggggaatatgcatgttgcagaagccggcgtttttattagcggtcctgagtaatttcccttggcaaaattcccagttttgccactctctggagccagatcctgggagctgtcagcaaggagcaggtaagtgagcagttatggacagcactttccatgtggtgcttccgaccctggctgtcagagtgaaatgtaaagtcagggctctgtacagttttgccatttcactgttctgctttaagcttagcttattagaactcttggtggagggtgcgtacacacattccagaaaaggcttcactcgctgggaacgtcaacccagcgagaaaggaggggaagccccttctccggggaccttatctgtggactcaggaatgatggtgtttattgcaaatgcacaatctttttcccattgaaatgtcatcacactggaaattgtactatatgtaaaaaaaaaaaaaagtatagttttatatttgaaatgtatgcaaattatggccatatggctgattggaatgtactactgtaatataaaaagtcactgtatttgcaataaattcttttctattaaaaaaaaaa

SEQ ID NO: 56624 - DNA, 3042 bp, Homo Sapiens; identical to SEQ ID NO: 31536

SEQ ID NO: 56625 - DNA, 1916 bp, Homo Sapiens
acttctgacagtggggaaagcagctgtgtgtgatagcttggaaggtttactgctgcctcaagtcctcttctctgcagttgaggtttcaggtttcaatcctcccaataccacaagacagagcacggggcggctgccgcctccgcctccgcgccttaacctaggcggcttgccgaagatctcagccccgcggccgcgcgctcgccctgccctagaccagggttgggcgcagcggcggaggtggcttctgggctgcgcgagctgggagagctgggaggcggcgatcgcagctgggccgggacttccttcctccaccgcacggcaacaaaacaaccctgcggcaggcactgagtgcttcgcagctgtctgggcgagaggcacagcgatgggctccgtgctgagcaccgacagcggcaaatcggcgcccgcctctgccaccgcgcgggccctggagcgcaggagggacccggagttgcccgtcacgtccttcgactgcgccgtgtgccttgaggtgttacaccagcctgtccggacccgctgtggccacgtattctgccgttcctgtattgctaccagtctaaagaacaacaagtggacctgtccttattgccgggcatatcttccttcagaaggagttccagcaactgatgtagccaaaagaatgaaatcagagtataagaactgcgctgagtgtgacaccctggtttgcctcagtgaaatgagggcacatattcggacttgtcagaagtacatagataagtatggaccactacaagaacttgaggagacagcagcaaggtgtgtatgtcccttttgtcagagggaactgtatgaagacagcttgctggatcattgtattactcatcacagatcggaacggaggcctgtgttctgtccactttgccgtttaatacccgatgagaatccaagcagcttcagtggcagtttaataagacatctgcaagttagtcacactttgttttatgatgatttcatagattttaatataattgaggaagctcttatccgaagagtcttagaccggtcacttcttgaatatgtgaatcactcgaacaccacataattttattaaaacgaagggaaaagggaccactgaattgcaccatttaagatgctgcttgaacaaatgggagggaagttgtcaatgattgatgggcaaaaatgtacaacacagttatgtgtttgtccatgtttattgttatagtgcatttaaaaactgctttaattttaatggtttaaatctgttttacatccttgagattcttacacatctaacaacaaaaaaaattatctacatcagtcattgttacatggaaaagacaggtggtaggcaagtaggtggaggatctcggtttgcaaattagataatactctgtgtataatgctacatatcaataactaccatcatggttaggcacgataactaatctttgttctgtgtaaaaaaatatggagagtgaaacaaagtgcagacattcaaagaaataagaaatctgctccaatgctcttgttctaatctctaataggttaacgttaataatcttgtatgggagttggaaaggaaaattttggaagtcaagaaagtccatttaggccggacgcggtggcttacgcttgtaatcccagcactttgggaggctgaagcaggcggatcacaaggtcaggagttcgagaccagcctggccaacactggtctctgtgaaactccgtctctactaaaaatacaaaaattagctggacgtgttggcgggcatctgtaataccagctacttgggaggctgaggcagaagaatcacttgaacccgggaggcagaggttacagtgagctgagatcgcaccagtacactccagcctgggtaacagagctagactccatctcaaaaaaaaaaaaaaaaaaa

SEQ ID NO: 56626 - DNA, 4317 bp, Homo Sapiens
tgaaggctgagttctagagatcgggtcggctttctacgcggctctcgtggaacctagcaaagaaagacagtgaagactgcaggaccttccttcgcgcttttgttacaatccacacacgtcctcttgtccttgtctcccccagaagcagccgccttagtcttgtgagcgtttttacaccgggtagattgagacttggagtgctacactcagcccgagggcgtccagcgcggtggaggcgtggggtttcggctgagcccacagggcacagactgttcatccgcttctcatggcagcggcggtgctgatggaccgggttcagagttgtgtgaccttcgaggatgtgttcgtgtacttctctcgggaggagtgggaactccttgaggaggcacagagattcctgtaccgtgatgtgatgctggagaactttgcacttgtggctacactaggtttttggtgtgaagcagaacatgaggcaccttctgagcagagcgtttctgtagaaggagtgtcacaggtcaggactgctgagtcaggtcttttccagaaagcacacccatgtgagatgtgtgacccactcttgaaagacattttgcacctggctgaacaccagggatcacaccttacacagaaactgtgcacacgtgggctgtgtaggagaagattctcgttcagtgcaaacttttaccagcaccagaagcaacataatggagagaattgcttcagaggggatgatggaggggcctcatttgtgaagagctgtacagtccacatgttagggagatcctttacgtgcagggaggaagggatggacttaccagatagctctggccttttccagcaccagaccacttacaatagggtgagtccatgcagaaggactgaatgcatggagtctttcccacacagctccagtctcaggcaacaccaaggagactatgatggacagatgcttttcagttgcggtgatgaagggaaagccttcctggacacctttactcttcttgacagccagatgactcatgctgaggtgagacccttcagatgcctaccatgtggaaatgtgttcaaggagaaatcagctcttattaatcacagaaaaatccacagtggagaaatatctcatgtgtgtaaggagtgtggaaaagccttcattcacttgcaccacctaaaaatgcaccagaaatttcacactggaaaaagacactatacatgcagtgaatgtgggaaggccttcagccgcaaggacacacttgctcagcatcagagagttcacactggagaaagaccttatgactgcagtgaatgtggaaaagcctacagcagaagctcccaccttgttcagcaccagagaattcacacaggagaaaggccttataagtgcaacgaatgtgggaaagcctttagccgtaaagacacacttgttcagcaccagagatttcatactggagaaaggccttatgagtgcagtgaatgtggaaaattctttagccaaagctcccaccttattgagcactggagaattcataccggggcaaggccctatgaatgcatagaatgtggaaaattctttagccataactctagcctcattaaacatcggagagtccacacaggagcaagctcctacgtgtgcagcaaatgtgggaaggcctttggctgcaaagacacacttgttcagcaccagataattcacactggagcaaggccttatgagtgcagtgaatgtgggaaggccttcagccgtaaagacacacttgtgcaacaccaaaaaatccacactggagaaaggccttatgagtgtggtgaatgtggtaaattcttcagccatagctccaaccttattgtacaccagagaattcacactggagcaaagccttatgagtgcaatgaatgtgggaaatgctttagccacaactccagcctcattttgcaccagagagttcacacaggagcaaggccttatgtgtgcagtgaatgtgggaaggcttacattagtagctcccaccttgttcaacacaagaaagttcacactggagcaagaccttatgagtgcagtgaatgtgggaaattctttagccgcaactctggcctcattctgcaccagagggttcacactggagaaaagccttacgtatgcagcgaatgtgggaaagcctatagcagaagctcccatcttgttcgtcaccagaaagctcacactggagaaagagctcacgagtgcaacagttttggtggccctttagctgcatctcttaaacttgtttaacaccagaaaattcacacaagagaaaggccttatgaatgcagaaaatatgtcatcttgttcatcctcataggactcacaccagagcaatgctctgtgagtaccctttgtgagggaaccatcagctagcagatgagcaccgtatattcattccaccctggggagattcctgataagcaccacatatgtgggaggctttcatgaggtgtgttgcactttgtaactgtctagagctcttgatggaattatatcactgccagtgcctgtggcggaagccatcttattgctaccagctgtgtgtgtcaatcactccattttgctcagggaaggcagacttctgtgctttctttcctgttccctacaggtaatcatgaatattttcaaggacttccccccccccccacttcaccccctaccattgagggtcctcatcttttccctcatgattaggttctgagcaaacatgatctagctctcaccaaaaggacctgagctagggtctgctgggatttcctgacacgattttccatcttcatggacaatgttaactgtaaacgtgatagctgtgacttacttgtcttactgccaaatcgcccaaatttggaactgcttgtcccatgctgctctgatttatacagtgataagggcctattgtggcagtctttactcttggggattttgttactgtgtagagtggattgagaaaagaattgggttctgtcatgaagggagtagcaccttttgtgggcaccacctttatgtgcctcagaggggaccaaaggatggcagaaaactgttctcagtctagtttgacctaatttacactattgccctaggcttgctaggaaagactgaaaaaaatttttgtgcctaactttgtggcctggctgccaggatttcctgtgagcccagtgaggagggcatagttggtgcgaaaatctcctgtgcttgtggaagcaacataagttgggtcccttaactgtcacgtactccccagcactgttgagggattgctgtcttctgtacctgtacaggatcaagtccctgatatccagaaccccataggcaagtaacattgactgtaagacctctgtagggcaatgtgaaaatcatgattgctacagaagcactgagataatggagtggggatgactgtggcaaacaaaaggagattcgaacattctagaggggacatccacaagtctcggtgcagttatgatggtgtgggatgggagtgcatagaaattctcaggaccttcagacatctgtatctcctgtggccaaggccactgtcagaggaaataatctaaatgtttgtggattcctgtgtctccctgggcagttgacctgcacagacaggaacctcagcagtgacagaagagagatccagggatgggtcttctctgacccagccagcattccgagtgactgaggtggatgtggacatcattgcttaccaatttttaccaacattgaggcagggctcactctcctaaattgtagggagaggaatatggtaaagccaaaatagttgacagatctaactttcctagtggaacagtatatatagattttaatgaggaacatttatttaatagctttatggaggtatgattaacatgcaataaactgcaaatatgtaaagtgtaaaatgtgctgtttcagcatgtgtgtacacctatgaaaccaccacagtcaagatatccaacacaacaaaagattgtccctttataatcctcaatttttccttatcttgttttccacaattcacaagcaacagcaagcattttctataattttataaatgaaaccatatggtgtgtactttttagggggtggggctctggctttttcagtaaacataactattttaaggttaatccattatcttgttgcatgaatcaattgtttgctcatttgtattgctgcgtagtatttcagtatttcattgtataccacaatttttcttctttgtcaacttaattgttatggatgtttgggtaactttcagtttttggctattacaaataaacctctgaagatttgtgtgcaaa

SEQ ID NO: 56627 - DNA, 2405 bp, Homo Sapiens
gctgtaagcgccggtcgcggctgtgtcggtcgccgctgctcccgctcctgctgggagaggtttcaggagtcagtgaccttcaaggatgtgtccatagatttctcttgggaagagtggattcaagcagattctgctcagaggatgaccgtgtatggggaggtgatgctggagaactacaggaacccggtctcactgggaaatcacctttccaaacccaatgggacttcccagctggaacgagaactgagtctgatgcaaaaagaaccgcgtgagggtggctttcgagattttcttggatattgctgtcagattaatctgacatttagtcctctcattatcctgtcccagtcaaggggagaaagtattgactgagtgctgtgctcagctcttccacagccagcatcttacttacttgacacaaaacatctatagactgggagacaagacttgaaaccaaagagccaactccgaagccgggtattactgaagatttatgccatggggtaacaatggaaagggaaggtatctggcattctactctaggggaaacctgggaacctaataattggttagagggacaacaggatagtcatctgagccaagtgggagttacccataaggaaaccttcactgagatgagagtatgtggaggtaatgaatttgaaagatgttccagtcaggattcaatccttgatacacagcaaagcattcctatggtaaaaaggccccataactgtaattcacatggagaagatgccacacaaaattctgagttaattaaaactcaaagaatgtttgtaggaaagaagatctatgaatgtaatcagtgcagcaaaaccttcagtcagagctcatcccttcttaagcaccagaggattcatactggggagaaaccctataagtgtaatgtatgtgggaaacacttcattgaacgatcctcccttactgtacatcaaagaattcatactggagagaaaccctataaatgtaatgaatgtgggaaagcctttagtcagagcatgaatcttactgtccatcaacgaactcacactggagagaaaccctatcagtgtaaagagtgtggcaaagccttccataagaattcatctcttattcagcatgaaaggattcatactggagagaaaccctacaaatgtaatgaatgtggtaaagcttttacccaaagcatgaatttgacagttcatcagagaactcatacaggagaaaaaccctatgaatgtaatgaatgtggaaaagccttcagtcaaagcatgcatcttattgtacatcagagaagccatactggagaaaaaccctatgagtgtagtcaatgtggaaaagcctttagtaagagctcaactcttaccctacatcagcgaaatcacactggagaaaaaccttacaaatgtaacaaatgcgggaaatcctttagccaaagtacatatcttatagaacatcagagacttcattctggagtaaaaccttttgaatgtaacgagtgtggaaaagctttcagtaagaattcatctctaactcaacatcggagaattcacactggagagaaaccttatgagtgtatggtgtgtggaaaacatttcactggacgatcatcccttaccgtgcatcaggtcattcacactggagagaaaccttatgagtgcaatgaatgtggaaaggcattcagccagagtgcttaccttattgaacatcaaagaattcatactggtgagaaaccctatgaatgtgatcagtgtggaaaagccttcattaagaattcatcccttacagtgcatcagagaactcatacaggagagaaaccctatcagtgtaatgaatgcggaaaagccttcagccggagtacaaaccttacacgacatcaaagaactcatacgtgaggaatgttttcactggcccttacctcatgattaactcttcagtaataatcatatgagacatacaatgtagaaacctaataaatgtaatgattgtgggaatctttcagttgaagtacaatatatcatatcagataataccactgcagagaatccatctaaaagtagagaaatcttgattcagaatgtataatttcctttatatcagaaggtttaaatagctaatataaacaatgaagagtcatgctgaagataagttctgttatatcataccgcacattctcctttggccatcagagactttacactggagagaaaaatgtgagagtgtttaactggacagcccagagacctggtacgtagtcctaatctgccactgccttggacaacttgcctacttccaccaggttatggttctttatttggtaaatgaatgattttggagttagaaatcttgtaggagctctgttagctctaaaatgctacaactctataaatataatgaatgctggg

SEQ ID NO: 56628 - DNA, 9090 bp, Homo Sapiens
gcgctggctgcgggcggtgagctgagctcgcccccggggagctgtggccggcgcccctgccggttccctgagcagcggacgttcatgctgggagggcggcgggttggaagcaggtgccaccatggctagtggcagctgtcaggggtgcgaagaggacgaggaaactctgaagaagttgatagtcaggctgaacaatgtccaggaaggaaaacagatagaaacgctggtccaaatcctggaggatctgctggtgttcacgtactccgagcgcgcctccaagttatttcaaggcaaaaatatccatgtgcctctgttgatcgtcttggactcctatatgagagtcgcgagtgtgcagcaggtgggttggtcacttctgtgcaaattaatagaagtctgtccaggtacaatgcaaagcttaatgggaccccaggatgttggaaatgattgggaagtccttggtgttcaccaattgattcttaaaatgctaacagttcataatgccagtgtaaacttgtcagtgattggactgaagaccttagatctcctcctaacttcaggtaaaatcaccttgctgatattggatgaagaaagtgatattttcatgttaatttttgatgccatgcactcatttccagccaatgatgaagtccagaaacttggatgcaaagctttacatgtgctgtttgagagaggcaataatgtggaagtcctcatgagtggcaatgtcaggtgttataatattgtggtggaagctatgaaagcattccctatgagtgaaagaattcaagaagtgagttgctgtttgctccataggcttacattaggtaattttttcaatatcctggtattaaacgaagtccatgagtttgtggtgaaagctgtgcagcagtacccagagaatgcagcattgcagatctcagcgctcagctgtttggccctcctcactgagactattttcttaaatcaagatttagaggaaaagaatgagaatcaagagaatgatgatgagggggaagaagataaattgttttggctggaagcctgttacaaagcattaacgtggcatagaaagaacaagcacgtgcaggaggccgcatgctgggcactaaataatctccttatgtaccaaaacagtttacatgagaagattggagatgaagatggccatttcccagctcatagggaagtgatgctctccatgctgatgcattcttcatcaaaggaagttttccaggcatctgcgaatgcattgtcaactctcttagaacaaaatgttaatttcagaaaaatactgttatcaaaaggaatacacctgaatgttttggagttaatgcagaagcatatacattctcctgaagtggctgaaagtggctgtaaaatgctaaatcatctttttgaaggaagcaacacttccctggatataatggcagcagtggtccccaaaatactaacagttatgaaacgtcatgagacatcattaccagtgcagctggaggcgcttcgagctattttacattttatagtgcctggcatgccagaagaatccagggaggatacagaatttcatcataagctaaatatggttaaaaaacagtgtttcaagaatgatattcacaaactggtcctagcagctttgaacaggttcattggaaatcctgggattcagaaatgtggattaaaagtaatttcttctattgtacattttcctgatgcattagagatgttatccctggaaggtgctatggattcagtgcttcacacactgcagatgtatccagatgaccaagaaattcagtgtctgggtttaagtcttataggatacttgattacaaagaagaatgtgttcataggaactggacatctgctggcaaaaattctggtttccagcttataccgatttaaggatgttgctgaaatacagactaaaggatttcagacaatcttagcaatcctcaaattgtcagcatctttttctaagctgctggtgcatcattcatttgacttagtaatattccatcaaatgtcttccaatatcatggaacaaaaggatcaacagtttctaaacctctgttgcaagtgttttgcaaaagtagctatggatgattacttaaaaaatgtgatgctagagagagcgtgtgatcagaataacagcatcatggttgaatgcttgcttctattgggagcagatgccaatcaagcaaaggagggatcttctttaatttgtcaggtatgtgagaaagagagcagtcccaaattggtggaactcttactgaatagtggatctcgtgaacaagatgtacgaaaagcgttgacgataagcattgggaaaggtgacagccagatcatcagcttgctcttaaggaggctggccctggatgtggccaacaatagcatttgccttggaggattttgtataggaaaagttgaaccttcttggcttggtcctttatttccagataagacttctaatttaaggaaacaaacaaatatagcatctacactagcaagaatggtgatcagatatcagatgaaaagtgctgtggaagaaggaacagcctcaggcagcgatggaaatttttctgaagatgtgctgtctaaatttgatgaatggacctttattcctgactcttctatggacagtgtgtttgctcaaagtgatgacctggatagtgaaggaagtgaaggctcatttcttgtgaaaaagaaatctaattcaattagtgtaggagaattttaccgagatgccgtattacagcgttgctcaccaaatttgcaaagacattccaattccttggggcccatttttgatcatgaagatttactgaagcgaaaaagaaaaatattatcttcagatgattcactcaggtcatcaaaacttcaatcccatatgaggcattcagacagcatttcttctctggcttctgagagagaatatattacatcactagacctttcagcaaatgaactaagagatattgatgccctaagccagaaatgctgtataagtgttcatttggagcatcttgaaaagctggagcttcaccagaatgcactcacgagctttccacaacagctatgtgaaactctgaagagtttgacacatttggacttgcacagtaataaatttacatcatttccttcttatttgttgaaaatgagttgtattgctaatcttgatgtctctcgaaatgacattggaccctcagtggttttagatcctacagtgaaatgtccaactctgaaacagtttaacctgtcatataaccagctgtcttttgtacctgagaacctcactgatgtggtagagaaactggagcagctcattttagaaggaaataaaatatcagggatatgctcccccttgagactgaaggaactgaagattttaaaccttagtaagaaccacatttcatccctatcagagaactttcttgaggcttgtcctaaagtggagagtttcagtgccagaatgaattttcttgctgctatgcctttcttgcctccttctatgacaatcctaaaattatctcagaacaaattttcctgtattccagaagcaattttaaatcttccacacttgcggtctttagatatgagcagcaatgatattcagtacctaccaggtcccgcacactggaaatctttgaacttaagggaactcttatttagccataatcagatcagcatcttggacttgagtgaaaaagcatatttatggtctagagtagagaaactgcatctttctcacaataaactgaaagagattcctcctgagattggctgtcttgaaaatctgacatctctggatgtcagttacaacttggaactaagatcctttcccaatgaaatggggaaattaagcaaaatatgggatcttcctttggatgaactgcatcttaactttgattttaaacatataggatgtaaagccaaagacatcataaggtttcttcaacagcgattaaaaaaggctgtgccttataaccgaatgaaacttatgattgtgggaaatactgggagtggtaaaaccaccttattgcagcaattaatgaaaaccaagaaatcagatcttggaatgcaaagtgccacagttggcatagatgtgaaagactggcctatccaaataagagacaaaagaaagagagatctcgtcctaaatgtgtgggattttgcaggtcgtgaggaattctatagtactcatccccattttatgacgcagcgagcattgtaccttgctgtctatgacctcagcaagggacaggctgaagttgatgccatgaagccttggctcttcaatataaaggctcgcgcttcttcttcccctgtgattctcgttggcacacatttggatgtttctgatgagaagcaacgcaaagcctgcatgagtaaaatcaccaaggaactcctgaataagcgagggttccctgccatacgagattaccactttgtgaatgccaccgaggaatctgatgctttggcaaaacttcggaaaaccatcataaacgagagccttaatttcaagatccgagatcagcttgttgttggacagctgattccagactgctatgtagaacttgaaaaaatcattttatcggagcgtaaaaatgtgccaattgaatttcccgtaattgaccggaaacgattattacaactagtgagagaaaatcagctgcagttagatgaaaatgagcttcctcacgcagttcactttctaaatgaatcaggagtccttcttcattttcaagacccagcactgcagttaagtgacttgtactttgtggaacccaagtggctttgtaaaatcatggcacagattttgacagtgaaagtggaaggttgtccaaaacaccctaagggcattatttcgcgtagagatgtggaaaaatttctttcaaaaaaaaggaaatttccaaagaactacatgtcacagtattttaagctcctagaaaaattccagattgctttgccaataggagaagaatatttgctggttccaagcagtttgtctgaccacaggcctgtgatagagcttccccattgtgagaactctgaaattatcatccgactatatgaaatgccttattttccaatgggattttggtcaagattaatcaatcgattacttgagatttcaccttacatgctttcagggagagaacgagcacttcgcccaaacagaatgtattggcgacaaggcatttacttaaattggtctcctgaagcttattgtctggtaggatctgaagtcttagacaatcatccagagagtttcttaaaaattacagttccttcttgtagaaaaggctgtattcttttgggccaagttgtggaccacattgattctctcatggaagaatggtttcctgggttgctggagattgatatttgtggtgaaggagaaactctgttgaagaaatgggcattatatagttttaatgatggtgaagaacatcaaaaaatcttacttgatgacttgatgaagaaagcagaggaaggagatctcttagtaaatccagatcaaccaaggctcaccattccaatatctcagattgcccctgacttgattttggctgacctgcctagaaatattatgttgaataatgatgagttggaatttgaacaagctccagagtttctcctaggtgatggcagttttggatcagtttaccgagcagcctatgaaggagaagaagtggctgtgaagatttttaataaacatacatcactcaggctgttaagacaagagcttgtggtgctttgccacctccaccaccccagtttgatatctttgctggcagctgggattcgtccccggatgttggtgatggagttagcctccaagggttccttggatcgcctgcttcagcaggacaaagccagcctcactagaaccctacagcacaggattgcactccacgtagctgatggtttgagatacctccactcagccatgattatataccgagacctgaaaccccacaatgtgctgcttttcacactgtatcccaatgctgccatcattgcaaagattgctgactacggcattgctcagtactgctgtagaatggggataaaaacatcagagggcacaccagggtttcgtgcacctgaagttgccagaggaaatgtcatttataaccaacaggctgatgtttattcatttggtttactactctatgacattttgacaactggaggtagaatagtagagggtttgaagtttccaaatgagtttgatgaattagaaatacaaggaaaattacctgatccagttaaagaatatggttgtgccccatggcctatggttgagaaattaattaaacagtgtttgaaagaaaatcctcaagaaaggcctacttctgcccaggtctttgacattttgaattcagctgaattagtctgtctgacgagacgcattttattacctaaaaacgtaattgttgaatgcatggttgctacacatcacaacagcaggaatgcaagcatttggctgggctgtgggcacaccgacagaggacagctctcatttcttgacttaaatactgaaggatacacttctgaggaagttgctgatagtagaatattgtgcttagccttggtgcatcttcctgttgaaaaggaaagctggattgtgtctgggacacagtctggtactctcctggtcatcaataccgaagatgggaaaaagagacataccctagaaaagatgactgattctgtcacttgtttgtattgcaattccttttccaagcaaagcaaacaaaaaaattttcttttggttggaaccgctgatggcaagttagcaatttttgaagataagactgttaagcttaaaggagctgctcctttgaagatactaaatataggaaatgtcagtactccattgatgtgtttgagtgaatccacaaattcaacggaaagaaatgtaatgtggggaggatgtggcacaaagattttctccttttctaatgatttcaccattcagaaactcattgagacaagaacaagccaactgttttcttatgcagctttcagtgattccaacatcataacagtggtggtagacactgctctctatattgctaagcaaaatagccctgttgtggaagtgtgggataagaaaactgaaaaactctgtggactaatagactgcgtgcactttttaagggaggtaatggtaaaagaaaacaaggaatcaaaacacaaaatgtcttattctgggagagtgaaaaccctctgccttcagaagaacactgctctttggataggaactggaggaggccatattttactcctggatctttcaactcgtcgacttatacgtgtaatttacaacttttgtaattcggtcagagtcatgatgacagcacagctaggaagccttaaaaatgtcatgctggtattgggctacaaccggaaaaatactgaaggtacacaaaagcagaaagagatacaatcttgcttgaccgtttgggacatcaatcttccacatgaagtgcaaaatttagaaaaacacattgaagtgagaaaagaattagctgaaaaaatgagacgaacatctgttgagtaagagagaaataggaattgtctttggataggaaaattattctctcctcttgtaaatatttattttaaaaatgttcacatggaaagggtactcacattttttgaaatagctcgtgtgtatgaaggaatgttattatttttaatttaaatatatgtaaaaatacttaccagtaaatgtgtattttaaagaactatttaaaacacaatgttatatttcttataaataccagttactttcgttcattaattaatgaaaataaatctgtgaagtacctaatttaagtactcatactaaaatttataaggccgataattttttgttttcttgtctgtaatggaggtaaactttattttaaattctgtgcttaagacaggactattgcttgtcgatttttctagaaatctgcacggtataatgaaaatattaagacagtttcccatgtaatgtattccttcttagattgcatcgaaatgcactatcatatatgcttgtaaatattcaaatgaatttgcactaataaagtcctttgttggtatgtgaattctctttgttgctgttgcaaacagtgcatcttacacaacttcactcaattcaaaagaaaactccattaaaagtactaatgaaaaaacatgacatactgtcaaagtcctcatatctaggaaagacacagaaactctctttgtcacagaaactctctgtgtctttcctagacataatagagttgtttttcaactctatgtttgaatgtggataccctgaattttgtataattagtgtaaatacagtgttcagtccttcaagtgatatttttatttttttattcataccactagctacttgttttctaatctgcttcattctaatgcttatattcatcttttccctaaatttgtgatgctgcagatcctacatcattcagatagaaacctttttttttttcagaattatagaattccacagctcctaccaagaccatgaggataaatatctaacacttttcagttgctgaaggagaaaggagctttagttatgatggataaaaatatctgccaccctaggcttccaaattatacttaaattgtttacatagcttaccacaataggagtatcagggccaaatacctatgtaataatttgaggtcatttctgctttaggaaaagtactttcggtaaattctttggccctgaccagtattcattatttcagataattccctgtgataggacaactagtacatttaatattctcagaacttatggcattttactatgtgaaaactttaaatttatttatattaagggtaatcaaattcttaaagatgaaagattttctgtattttaaaggaagctatgctttaacttgttatgtaattaacaaaaaaatcatatataatagagctctttgttccagtgttatctctttcattgttactttgtatttgcaattttttttaccaaagacaaattaaaaaaatgaataccatatttaaatggaataataaaggttttttaaaaactttaaa

SEQ ID NO: 56629 - DNA, 3712 bp, Homo Sapiens
cgctgggcttgcctgctgctgctgctgctgcctccccaccgcctttttttttttttaatctggagcggggtggggagtgggaaccggagagaaagcaaaatattaaaaagccccaaagacagccagcaggagcgcggtgcccgatggcttcgctgtaccagaggttcactggcaagatcaacacctcgaggtccttccccgcgcccccggaggcgagtcacctcctgggcggccaggggcccgaggaggacggcggcgcaggagccaagcccctcggcccgcgggcgcaggcggcggcgccccgggagcgcggcggcggcggcggcggcgcgggtggccggccccggttccagtaccaggcgcggagcgatggtgacgaggaggacgagctggtggggagtaaccctccgcagaggaattggaaaggaatagcaattgcactgcttgtcattctggtcatctgctccttgatcgtcacctcggtcatacttctgacaccagcggaagataatagtctgtctcaaaagaagaaggtcactgtagaagatctcttcagtgaagacttcaaaattcatgaccccgaggctaagtggataagtgatacagaattcatctacagagaacagaaaggaacagtgagactgtggaatgttgaaacaaatacttctactgtcttaatagaaggcaaaaaaattgaatcattaagagccatcagatatgaaatatctccagatagagagtatgcacttttttcatacaatgtggaacccatatatcaacactcgtatactggatattacgtcctgagcaaaattcctcatggggatcctcaaagtctggacccaccagaagtcagcaatgcaaaacttcagtatgcaggatggggccctaaaggccaacagctgatatttatttttgaaaacaatatctactactgtgcacatgtcgggaaacaggccatccgtgtggtctccactggcaaggaaggtgtgatttacaatggcctcagtgactggctgtatgaagaggagattttgaagacacacatcgcacactggtggtctccggatggcacgagactcgcctacgccgccatcaatgattcccgtgtccccatcatggagctcccaacttacaccggctccatctaccccaccgtgaagccctaccactatcccaaggctggaagtgagaaccccagcatttccctacacgttattggcttaaatggacccacccatgatctggagatgatgccgcctgatgatccacggatgagggagtactacatcaccatggtgaagtgggccaccagcaccaaggtcgccgtgacctggctgaaccgggcgcagaacgtgtccatcctcaccctctgcgacgccaccacgggggtctgcacgaagaaacacgaggatgaaagtgaggcctggctccacagacagaatgaagaacctgtgttctccaaggatggccgaaagtttttcttcatcagagccatcccccagggaggacgagggaaattctatcacatcacggtgtcctcgtcccagcccaacagcagcaacgacaacatccagtccatcacctccggggactgggacgtgaccaagatcctagcctacgatgagaaggggaataagatctacttcctgagcacggaggacctgcctcggagacgacaactctacagtgccaacacggtgggcaacttcaacaggcagtgcctctcctgtgacctggttgagaactgcacctacttcagcgcttccttcagccatagcatggacttcttcctgctcaagtgcgaaggtcctggtgttcctatggtgacggtgcacaacacaacagataagaaaaaaatgtttgacctagaaacaaatgaacatgtcaagaaggccataaatgaccgacagatgcctaaagtggaatacagggacattgagattgatgattacaacctgcccatgcagatactgaagccagcaaccttcaccgacaccacccactaccctctgctcctggtggtggatggcaccccgggcagccagagtgtggctgagaagttcgaggtgagctgggagacggtgatggtgagcagccacggcgcggtggtggtaaagtgtgacggccgtggcagcggcttccaagggaccaagctcctgcacgaagtgaggcggcggctgggcttgctggaggagaaggaccagatggaggccgtgcggacgatgctgaaggagcagtacattgacaggacgcgcgtggccgtgtttgggaaggattacggtggctacctgagcacctacatcctcccagcaaagggagaaaatcaaggccagacattcacctgcggctctgctctctctccaataacagacttcaaactctatgcctctgcgttttccgagaggtacttgggcctccatggacttgacaacagagcatacgagatgaccaaggtagcccatcgagtctccgcgctggaagaacagcagttcctgatcattcatcccactgccgatgaaaaaattcatttccagcacacagcagaactcattacacaactaattaggggaaaggctaattacagcttacagatttacccggacgaaagccattactttaccagctccagcctcaaacagcatctgtaccggtccatcatcaacttcttcgtggaatgcttcaggatccaggacaaactgccgacagtcacagcgaaagaggacgaggaggaggactaagctcaggtcgctctaagcacaaacgtggctctttctacaaccagatgcaaccgagggatttccctgccctccctcttccctcggaggggcggggcggggcggggccgggtgttccatagcatgtgtgtctcggatgcggaaggcagttttgcttgggaaacaagctccttccccggggtcatcactcacggcctccatggcaccagggacaacgctgtccccgcagcagcgcctcctcccggcgcccgagagaccggcacgccacggcccctcccccaaggaacagagcaaaggatggtggccgcaggccccacgcgagcccacaggacaccggcccctagattccagccaccaagcggaagcatgagacccgcccacactagcctctgtgttcccgttagggacatcacaccctgtctcacgtcgcagtgccatggacgcagcagttacagcaccattgttttagcagtgcgtgttcatatatgggcttgctacttcctgtaatgaggacgttcaacatggtgaggggctacaagaaaacgcttttctgtacagagtcttactgtagctacgctaatggttaacctgatagaattaactcgtatttttctatggttttaacctgatgctccactgtctccgtcatggggttgttttgctgtttggggttgggccttgtttccctttcctttctccagtccacgtgtagactttgcgcttgatgaagaagcagatcggaagtaactgctccctcctcaaggttgtcttcagacgtcttggggacgttcctaaacactgagggggaagacagccaatagcacccattaaaagaaatacctaaataaaacctctctcccactcagctatgctagggcttggctgtaggtgtgcactgtctatttacatccgtccttacaaccatccttgtcctccttggtaccgtatcaagctctttcccatgacatttggtt

SEQ ID NO: 56630 - DNA, 2527 bp, Homo Sapiens; identical to SEQ ID NO: 30795

SEQ ID NO: 56631 - DNA, 1559 bp, Homo Sapiens
ccccagtctgagaacaagaaagaagaacttctgtctcgagggtctcactgtcaaccaggccagagtgcagtgaagatcatacctcactacatccgtgaactcccgggctcctcccacctaagtctcttgagtagctgggacttcaggagactgaagccaaggataccagcagagccaacatttgcttcaagttcctgggcctgctgacagcgtgcaggatgctgttggaacccggcagaggctgctgtgccctggccatcctgctggcaattgtggacatccagtctggtggatgcattaacatcaccagctcagcttcccaggaaggaacgcgactaaacttaatctgtactgtatggcataagaaagaagaggctgaggggtttgtagtgtttttgtgcaaggacaggtctggagactgttctcctgagaccagtttaaaacagctgagacttaaaagggatcctgggatagatggtgttggtgaaatatcatctcagttgatgttcaccataagccaagtcacaccgttgcacagtgggacctaccagtgttgtgccagaagccagaagtcaggtatccgccttcagggccattttttctccattctattcacagagacagggaactacacagtgacgggattgaaacaaagacaacaccttgagttcagccataatgaaggcactctcagttcaggcttcctacaagaaaaggtctgggtaatgctggtcaccagccttgtggcccttcaagctttgtaagccttgtgccaaaagaaacttttaaaacagctacagcaagatgagtctgactatggcttagtatctttctcattacaataggcacagagaagaatgcaacagggcacaggggaagagatgctaaatataccaagaatctgtggaaatataagctggggcaaatcagtgtaatccttgactttgctcctcaccatcagggcaaacttgccttcttccctcctaagctccagtaaataaacagaacagctttcaccaaagtgggtagtatagtcctcaaatatcggataaatatatgcgtttttgtaccccagaaaaacttttcctccctcttcatcaacatagtaaaataagtcaaacaaaatgagaacaccaaattttgggggaataaatttttatttaacactgcaaaggaaagagagagaaaacaagcaaagataggtaggacagaaaggaagacagccagatccagtgattgacttggcatgaaaatgagaaaatgcagacagacctcaacattcaacaacatccatacagcactgctggaggaagaggaagatttgtgcagaccaagagcaccacagactacaactgcccagcttcatctaaatacttgttaacctctttggtcatttctctttttaaataaatgcccatagcagtatttggagtattttcttttctcctaaatccacaaactctcttctttctctttggacagatgacctcttgtcatagttaagcagagagtgggcaggatattcctgataggaggaactacatgaataaaggggtaag

SEQ ID NO: 56632 - DNA, 2038 bp, Homo Sapiens
gacctgccgggacccttgcccgccgcgcacccgcagtcaccgccgagcgggcggccgggccgggacccgcgagtgtgcaccggcggccgggctggcgccgagcccagagcggaccagcagcagctcaagcgctgcggccgccgcctccccgctgaccccgcgatctgaggctgtcagagatgactctggttctgtccatgaatagattctgcgagcccattgtctcggaaggagctgctgaaattgctgggtaccaaacactatgggaggctgacagctacggaggcccaagccccccagggccagcacaagctcctttgcagggagaccggggagctggtcccccactggcaggatcacattacaggggaatttcaaatcctataacaacatccaagatcacatactttaagaggaagtatgtggaagaagaggattttcacccaccactcagcagctgtagccataaaaccatctcaatttttgaggaacgagcccacatcctttatatgtccttagaaaagctaaagtttatcgatgatcctgaagtgtacctccgaagatctgtccttataaacaatttgatgaaaaggatccatggagaaattatcatgcagaataactggtgcttccctgcctgctctttcaatggcacctctgcccaagagtggtttatggctcaagactgcccttaccgaaaacgaccacggatggccaaagaggaatgtgaaaagtttcatgcctgctgcttttaccaagaatgtggtggccactacctaaatttacccctttctgtcaatgctaatgttggaagtgcctccactgctgcctcctctccctccgcctcttcttcctcctcatcttcctcttcctctccccctttgcctttaccgagttgttcccgccaggtggattttgatgtaggtagtgcatctatttacaagagtgatggccagatacctgccaatgaaatctttgtcactaatgtcagatcacttggtgttcaggaaaaggccaaattaaatgatgagaaagcaaatgatgacaccaacagagatggtggccccctcagccacgaacctgtgggaaatgaccttgcttttgagtgcaaaggccaattttatgattattttgagaccggatataatgaaagaaacaatgtaaatgaatcttggaaaaagtccttacggaaaaaggaggcttcaccaccaagtaacaaactgtgctgcagcaaaggaagtaaaatatgagccatcttctcaccgaactttgaagcatgcacagcatgatcagttagctctcgtaaattttattttgaatggattttgtagttttgtacaacagataaaattatgccatgaacatgccatgtcgttttaatgcctggagagcagattgcgtaaaacatctgtatagcaggcatcagcgagcttcttataaatgtggtgatttttaccaaggaaactattgacttaatgcttaaaagtatatcatagttttcttacggaaaagatcagtagatgagattgggggacaatgtgcccttgcaatatttccattgccccccaaggagcctgtcactagctaagaaatttctacatgtttgccagttaattagggagttatttggtaagcaaatcaatataaccagcaaagatacctgcttcttctatatgatacaatattttttttaaataaaagactaaagacagggagctagatgaaatggcttaatggtgctgttaagtatttgtacctaacagtcttgtgtgacagatgaaaataggatgtaacataatgaaacacacctgtctaggggcggcaatcaacagtcttacacagagagggtattccctgcaagtttctggcttgcctgtgatgggtgatgaggcttttagagaggtgttatacagggcgatttttggtgccttacttttatcttaatttttgccaatgtgaaaattaaggataaatcagagttacagcagggatttaacaaacaggacaaaaaaaaaaaaaaaaaaaaaaaaaaaaaaaa

SEQ ID NO: 56633 - DNA, 3054 bp, Homo Sapiens; identical to SEQ ID NO: 26972

SEQ ID NO: 56634 - DNA, 4816 bp, Homo Sapiens
gttccggctcccgagccccgcctgcgcgcggcctcctcggcgcagccatcctcttggctgccgcgggcggcaaagcccacggcatctgccatttgtcattcagcccgtcggtaccgccccgagccttgatttagacacggctggggcgtgctctggcctcactctccgggcgggtgctggacggacggacggacggggcagccgtgctcacagctcagcagcgcggggccttggcgcgcggggcgcttccccgggtcgccgtcatggccgcggaggtggcacgcccgagcggcctcgcctgagctccgggggtcgtcgccccgcagggattgctgtcacgtctaatgtggctgctgcctcgtgtcacatctgaaactcatctgtacctcacttagaaagtggttctgattagacaagacttttcgttgcagtcgacagaaacctaatgggaccattgaagaattccaaacaggcaagtgacaggaacatatttgcatgttagaagaatcagcctggcagcagcattgtgattagaatgaaggggaaccgtccaaaaacagactggggaaccaatatggatctgcctctagcatgcggaaatatctctctacactgacctaactgactcactaagcttgtggtttgtttaaaggaagccacatgaaaattgagtttgggccaatagagtgaactcgttctccattctctagcatccctccccatgcaaccaccctatccctgccaagtttctgggcaccacagattggaaagtagcctcctgtaggtatttgcccatgttaagtggtggggtctctttctgtcttcccttcttggtctcacctgtctggtgtgacaagggaagcatgtgccaaccaaggctagacccttgtgagaccagagcagccccactttcggtaaagcaagcaacctctgcttacttgcccaacacaccctagcttccgtgttccttgccttgtgagttatcttcttgggtacaatttaacacagcgttcccacctccttataactaaaatagctagagggggctttgtgcctcaaaccccaaggagaccatcttggcaatctctgcctctgcaacagggcacttgctccctgggcaactcctttcccaggtcatcttctcccttgacatgcccatcagatttaatagtgtgcctatttggcagaaaaatggggtcccttggttgctgattcttaggaatgtgaggttctcccagccagagctctcagcactaaaagttctagtctctgcgtaatggccggcatatctttggcgtatctaaaatcctcttcagtttccagcagggtctttataagcttcttctgaaggtctcagacattcagccacggaactcaagtggaatttgtttggataacgtgactgatttcaaagcccggaccccttagacgtgcccatttggtgctgcaagtactgaccattactacaacatcttacagtcaacaaatttgacacattaaagatttatatcctttcttttgggttaggatcttctctcccctaaagcatctcagtttccagcatgcaatcatttccatcttatggaaatcagccatcccgctccgtgccagcatgctaccctgggaggcacatccaggcttgggaaacgggggtgtcctggatctcatgactccagcagcaccagctgctctctttcctcttccaagtagacttccgttccccccccacttgggtgtttttgtttgttttagcaattcagagctcaagataaagaccttaaagataactttgtgtgtctctccctttctaggtatttgcataggaatcagaggagttaatcttgtttgaatcttcagacaaacttctgggaggactcggtccctgcctcgcagcagatgttccctgtcactcagtagccaatccgggggacccaggacatgccccagctatagtgatgcagattacctttctgctcctgaatcgcacctgtgcctcagactttctcccctcagcttgagactgcatgtaaactgggatgtgtgaaagcaggaagcaaagctagtgacagctgagaggtccatgtctgggtagaaccaggcccacgatgctgcctctcccgtggtctggagttcagctgcagggactctgctgatgtgcccagcaccatcgttctgtttgtgcttaaatggcacagcatttggtcagcacatctgaaaaggaaggtgtgagaagcaaagcccatggccacgttcccctgccagttatgtggcaagacgttcctcaccctggagaagttcacgattcacaattattcccactccagggagcggccgtacaagtgtgtgcagcctgactgtggcaaagcctttgtttccagatataaattgatgaggcatatggctacccattctccccagaaatctcaccagtgtgctcactgtgagaagacgttcaaccggaaagaccacctgaaaaaccacctccagacccacgaccccaacaaaatggcctttgggtgtgaggagtgtgggaagaagtacaacaccatgctgggctataagaggcacctggccctccatgcggccagcagtggggacctcacctgtggggtctgtgccctggagctagggagcaccgaggtgctactggaccacctcaaagcccatgcggaagagaagccccctagcggaaccaaggaaaagaagcaccagtgcgaccactgtgaaagatgcttctacacccggaaggatgtgcgacgccacctggtggtccacacaggatgcaaggacttcctgtgccagttctgtgcccagagatttgggcgcaaggatcacctcacccggcataccaagaagacccactcacaggagctgatgaaagagagcttgcagaccggagaccttctgagcaccttccacaccatctcgccttcattccaactgaaggctgctgccttgcctcctttccctttaggagcttctgcccagaacgggcttgcaagtagcttgccagctgaggtccatagcctcaccctcagtcccccagaacaagccgcccagcctatgcagccgctgccagagtccctggcctccctccacccctcggtatcccctggctctcctccgccaccccttcccaatcacaagtacaacaccacttctacctcatactccccacttgcaagcctgcccctcaaagcagatactaaaggtttttgcaatatcagtttgtttgaggacttgcctctgcaagagcctcagtcacctcaaaagctcaacccaggttttgatctggctaagggaaatgctggtaaagtaaacctgcccaaggagctgcctgcagatgctgtgaacctaacaatacctgcctctctggacctgtcccccctgttgggcttctggcagctgccccctcctgctacccaaaatacctttgggaatagcactcttgccctggggcctggggaatctttgccccacaggttaagctgtctggggcagcagcagcaagaacccccacttgccatgggcactgtgagcctgggccagctccccctgccccccatccctcatgtgttctcagctggcactggctctgccatcctgcctcatttccatcatgcattcagataattgatttttaaagtgtatttttcgtattctggaagatgttttaagaagcattttaaatgtcagttacaatatgagaaagatttggaaaacgagactgggactatggcttattcagtgatgactggcttgagatgataagagaattctcgaactgcatgtattgtgccaatctgtcctgagtgttcatgctttgtaccaaatttaatgaacgcgtgttctgtaatcaaactgcaaatattgtcataaccaacatccaaaatgacggctgctatatataagtgtttgtcatatggaatttaatcgtaagccatgatcataatgttaactaaataactttatgtggcactgcctagtaagggaactatggaaaggtttggatttctccaaatctgggagaattttcaaaataagaaaataacctttatatgatatactatgactaggctgtgtatttcttttcagggatttttctaccttcagggttggatgtagtttagttactattaccatagccaacctgtagttttacatatacattttcttgtggagcaatagagttctccattttacagaagcattttaaatgtagtttgaatattttccacaagatgctgcaatgtgagttatcacttcatttatcttaaagaaagactaaactggttgtcagttacatctgacagaaaaaaaaaaaaaatcactgtgtaaccaggttaagtggtaaaataatccaggcgtcagtcaaaggcattttgctgactttaatattgattatatttttaacaggaatttaagaaaatattactggaattaaaaatatatatatattaaacaagaattttctttgctctgtctagcttaaactactactcaagctgcttaagttcttaagtattgtttgtaatcaccaataaataagtgcatttgtaattcatcagtcattattagcttttattaaaagaagattacgttttacaatgtaactataatctcttgaatttggtatcttattaatgagttttaaagatgtaaaacctaaccttttttaaagctccattgtcttatgtttttagaggcttttccgtaaacatatatcttacatataataaacttttcaaatcttgcaaaaaaaaaaaaaaaaaaaaaaaaaaaaaaaaaaaaaaaaaaaaaaaaaaaaaaaaaaaaa

SEQ ID NO: 56635 - DNA, 5072 bp, Homo Sapiens; identical to SEQ ID NO: 29166

SEQ ID NO: 56636 - DNA, 4762 bp, Homo Sapiens
gctccggctcagccgctggcacccccaccgccaccaccctagtctcctagtcgcctgccaccagcccctgagagactgcaggtccagtgaaaaggagcaggaacggcagcagcccggccgccgacccggaagctctttcaccgccaaccgcgaggctgcaaagggtgtgaacccggaagcgatttcatagccacggtgactgtcccacccatttagttgaatgtagcggccagagaggcactcgcggcagcccgtacgggtgggacctctcggtgtccttcgggaaacaggaggagcaagttcgactccagcgagggaaaacggaggtgggagactgaaccatctccacatctagttgccccaggtttttggctttcatcgctttttctacatgtttttagcctcaccagaagtctttcatctcggtggtccaactcaggatctcagcctcattattttcttacccttctggagtgcatatgtgcctttacagtttctgtttgcaaacgctgtctagcatactaagaggatgttagcaaacctgttccatggacactaaatggcagttgtacatctcccctcatcagtcatagtgacaaccagaaatgccctccatattttccagtgatcccagtcttcaatgcgtctgtctcataatttgtaaacgtttattatcttgaagtcattgttaatctgtggtgaaaagtaattgctaaatagaaattctgagaagaaaaaggcctcatccttttcacatgatgtaggaaggtctgttgcatgagcaatgggaaatccagaaaacatagaagatgcatatgttgctgttattcgtccaaagaatactgccagtctcaattctcgggaatacagagctaagtcatatgaaattttgttgcatgaagttcccattgaaggacagaaaaaaaagagaaagaaagttttattggaaacgaaacttcaaggcaacagtgaaataacacaaggcatattggattacgtagtagaaaccaccaaaccaatttctcctgcaaaccagggtatcagaggaaaacgagttgtactaatgaaaaaatttcctctggatggagagaagatgggcagagaagcatcattatttattgttccatcagttgtcaaagataatactaaatacacatataccccaggatgcccaattttttactgcttacaagatattatgcgagtctgtagtgaatccagtactcattttgctacacttacagcaaggatgttaatagccttggataagtggttagatgaacgtcatgcacaatctcactttattccagctttattccgaccttctcctcttgagcggataaaaactaatgtcataaatcctgcatatgctactgaatcaggtcagacagaaaactcactacatatgggctatagtgcactagaaataaagagtaaaatgttagccctagagaaagcagatacctgtatttacaaccctttgtttggatcagatcttcagtatacaaatcgggtagataaagtggtaataaatccatactttggtctaggagctccagactactcaaaaatccaaatacctaaacaggaaaaatggcagagaagcatgagcagtgtcacagaagacaaggaacgacagtgggtagatgattttcctctccaccgaagcgcctgtgaaggagattcagaattactaagccgtcttctcagtgaaagattttcagtcaaccagttagatagtgaccactgggcacccattcattatgcatgctggtatggaaaagttgaggccactcgcatattgttagagaaaggaaagtgcaatccaaaccttttaaatggacaacttagttctcctcttcattttgctgctggaggaggacatgctgaaatagtacagattctcctaaaccacccagaaacggatagacatataacagaccaacaaggaagatctccattaaatatttgtgaagaaaacaaacaaaacaactgggaagaagctgcaaaattgttgaaggaagcaattaacaaaccatatgaaaaagttcgaatatacagaatggatgggtcatatcgttctgttgaattgaagcatggaaataataccacagtgcagcagataatggaaggaatgcgtctctctcaagaaactcagcaatatttcactatatggatttgttcagaaaacctcagccttcaactcaaaccatatcataaacccttgcaacatgttcgtgactggccagaaatacttgctgaattgactaatctggatcctcaaagggaaacacctcagctttttctaagaagagatgtgagacttcccttggaagttgaaaaacagattgaagacccactagctattcttattctctttgatgaagccagatataatttattgaagggcttttatacagctcctgatgctaagctgataacattggcaagtctgcttttgcaaatagtctatggaaattatgagagtaaaaaacacaagcaaggtttcctaaatgaagaaaatctaaaatccatcgtacctgttaccaaactgaaaagtaaggcacctcactggacaaatcgcatacttcatgaatacaagaatctcagtacaagtgaaggtgtcagtaaagaaatgcatcaccttcagcgcatgttcttacagaattgctgggaaattcctacttatggagcagcatttttcacaggacagatatttacaaaggcaagccccagcaatcataaagtcatccctgtgtatgtaggagtgaatataaaaggacttcatctcctcaacatggaaactaaggctttactcatcagtcttaagtatggttgttttatgtggcaattgggagatactgatacttgttttcagatccatagcatggaaaataaaatgagctttatagtacatacaaaacaggctggtctcgtggtaaaactgttaatgaagctaaatggacagttaatgcccactgaaagaaattcatgaaagagaagtaactgttactcaagccaccacattttgtaatgcagagttttttttccgtgaaagatttcttaaaatattacttttggccgagcatggtggctcacccctgtaattccagcactttgggaggctggggcaggcggatcacctgaagtcagagttcaagaccagcctggccaacatggtgaaaccctgtctctacaaaaatacaaaaattagctgggtgtggtggcgggcgcctataatcctagctactagggaggccaaggtgggagatcgcttaaacccaggaggtggaggttgtagtgagccaagattgcaccacggcacgctagcctgggtgacacagcaagactccatctcaaaaaaaaaaaaaaattactttcaacaaggcatatagtctcttgtaatatatatgtatactattacattgtacagaatctgtacttatgtttggtgtgtaatataccaattagttttatataatatcctcataagctattctaatttttgagagaaacacaaaaagttatagattgatagtctgtataatattagacaaaatagtaagctttataaaaagttatttttggtaaatggtaaggaatttggggtggaatgtgatgagattaaaatgtagctttggtataacttcatgtgtatttcaaaatatactgaacgtcaacatgatttgaataaagaaaatgtattttctacttgaaccacataacactgttatttaaaacagttttctgcagtctataaacatttctcaacatttttttaaaagtcttagttaaaatgtaaatctgatatacagtagtgtttctcaaagtatagttcatgaactccttgcatcataattacctagatgcctcttaaaaatgaagatttcagagacccattctaaacaagggcattcactctctggaagtagcatggccttgtgaacttaaatttggttttgttttttcttttttgctgttagaataatttcagacccaataaggaatttcgattattaaagttgagaaatttcacaaaactgcctggcacacaagcacacacatacatagacacattttaagtgataatctcttgatattagaagttgcatttgttaaatacatgctgtattttttatgagttgacttaatagtttatgtatattgactttgctttgtaggaagtaaatcaccagatatcttattgtttcatttaggaaagtagtgatatagatgaagagccaacttgatgaatgtgctattcataagctagaaactacagtttttccaaactaataaactgatgaattctaaataagttcagagatatagtcatatttaaagttgtcctacagtttgcagataatttttatattactattcttcacattaacttctgcttatttttaatggtactatatgtaggccttattaaaattaagattgtatggttaagtaaagttaacaagaaagcctgatttatctttaattctgtgctaggtacttttgattctacatgaacaatacccttttcagttcccttcattctaatgtcctcaactgttaccaaataccctgttgactcccaaacctaagattttagcctcaacttcttttctgaacttcaaatcttaatttccaagttatacttgttctaggtccatctaaatggtctacagagaacttcagttgaatcatagctggaaacagaatttatttcctctatttgcttcattctgtccttccactatattccctattt

SEQ ID NO: 56637 - DNA, 3915 bp, Homo Sapiens
cccctgctgctctcaagtttcccgttggcgccgcggcccgggcgcttcaggtagcctctcggctctctctgctccgctccgcgcccaggtagggcaccgacgggggctgcacgcggctggccggcttcctccctgctgaggcggccctccctcctcccgcggggccctcctggccggggatccgcagcgctgcgccctctgaacgcccggcccccgcgcctgctgcggggcggggcctggccgggccctggccccggcgggcctcagtgccagcagccccgctccgctctgcccagcgcgtcccctttgctccagccctgcggccgtccctttcggccggcggcatggccctgtcgtccgaacccgctgagatgccgcggcagtttcccaagctgaacatctctgaagtggatgagcaagtccggctcctggcggagaaggtgtttgctaaagtgctccgagaagaggacagcaaagatgccctgtccctgttcactgtcccagaggactgccccatcgggcaaaaggaagccaaggagagggagctgcagaaggagctggcagagcagaagtctgtggagaccgcaaaaagaaagaaaagtttcaagatgattcggtcccagtccctgtctctgcaaatgccgccacagcaagattggaagggccccccggcagccagtccggccatgtctcccacaacccctgtggtcactggagccacttccctgcccacgccagcaccctatgccatgcctgagttccagcgggtcaccatcagcggagattactgtgccgggatcactttggaggactatgagcaggcagccaagagtctggccaaggccctaatgatccgggagaagtatgcgcggctcgcctaccaccgcttcccgcggatcacatcccagtacctgggtcatccgcgggcggatactgcacctccggaagagggccttccagacttccaccctcctccactgccccaggaagacccctactgcctggatgatgcaccccccaacctggattacttggtccacatgcaggggggcatcctctttgtgtatgataacaagaagatgctggagcaccaggagccgcacagcctaccctaccccgacctggagacctacacggtggacatgagccacatcctggctctcatcaccgatggccccacgaaaacctattgtcaccggcgactgaactttctggaatccaagttcagccttcatgagatgttaaacgaaatgtccgagttcaaagagttgaagagtaacccccaccgggacttctataacgtgagaaaggtggacacacacatccatgcggccgcctgcatgaaccaaaagcatctgctgcgcttcatcaagcacacataccagacggagcctgacaggactgtggcagagaagcggggccggaagatcaccctgcggcaggtgtttgacggcctgcacatggacccctacgacctcactgtggactcactggatgtccacgcgggccggcagacattccaccgctttgacaagttcaactccaaatacaaccctgtgggggccagtgagctgcgtgacctgtatttgaaaactgaaaactatctgggaggagagtactttgctcggatggtcaaggaggttgcccgggagctggaggagagcaagtaccagtactcagagccacggctctccatctacggccgcagtcctgaggagtggcccaacctggcctactggttcatccagcacaaggtctactctcccaacatgcgctggatcatccaggtgccccggatttatgacatatttaggtcaaagaagctgctgccaaactttgggaagatgctggagaacatcttcctgccccttttcaaggccactatcaacccccaagatcatcgagagcttcacctcttccttaaatatgtgacggggtttgacagcgtggatgatgagtccaagcacagcgaccacatgttttccgacaagagcccaaacccggacgtctggaccagtgagcagaacccaccctacagctactacctgtactacatgtatgccaacatcatggtgctcaacaacctccgcagggagcgcggcctgagcacgttcctgttccggccgcactgtggggaagccggctccatcacccacctggtgtctgccttcctcactgctgacaacatttcccacgggctgctcctcaagaagagtccggtattgcagtatctctactaccttgctcagatccccattgccatgtctcctcttagcaacaacagtttgttcctcgaatattccaagaaccctctgagggaattcctacacaagggactgcatgtttctctttccaccgatgaccccatgcagttccactacacgaaggaagcacttatggaagaatatgccattgcagctcaagtgtggaagctgagcacctgcgacctgtgtgagatcgccaggaacagcgtgctgcagagcggcctctcgcatcaggaaaagcaaaagtttctgggacaaaattattataaagaaggacctgaaggaaatgatattcgaaagacaaatgtggctcagatccggatggcattccgatatgagaccttatgcaatgagctcagcttcctgtctgatgctatgaaatcagaagagatcaccgccttgaccaactaggtccagcatttgacatgcattttaactttttggttcaatttcaagtctgctgtggctaatagtggtcaagattccgaactaggactttcctctgtgaagaggatgcctctgaagaaattttaaactggtgattttggttgcactgctcactttaagagttaacatgctcacttgttagtatttctgagtaacaagatggtgacttctccttggggatctgggagctgagcacttgtctatacttgttcctaattttccaagtatttctcttgaaactgccagtgcctgaactgttggggccaggattttccctggtcagatgccaagtaacatgtggttttctgccatacttttctccattggcccaggtaggctaattggtagttgttcatttcagcctctggatggctggctgccttaaacacaatcaatttcaaagctccatttcataaaggggctactttgaaggagttaagatggaagacttccttcttgacaaattgtgtttttagtgaatttcttaaaccgttttatttagccctccttccctctttctagttggaagccaaatgtactcatgaaaacagccactcctattctgagtcttggtttcttcacctagaaagtgagggtttggactagatgagtggctttcagggtgttctgtgaatctcctcatgaatactttagggtgggggagggaagggagtgagtgatgctcaggggctgtcaaagtgactgcgttcatcagttttacactggggctgctacataatattttcatttgaacgaagaacttcaaaaagcacaggactagatgatctctgttccttttggctctaatatgctacaactgtaggccaattatcactttaccaattaagagttaggccagataagtgaaatttaacttaagggcacacagctaataagtaataggcctaaactggatttccttattccaaatcctgtcttttccccactattccattagaccccacaaatgttagttgtgtgtgtgtgtgtgtgtgtttttaatcactgtaaccgggtgcatttttttaaggcaaaatttctcccttatctactgtgatgacttcagaagatacaatggtcccaggggccaagtagaaagcatttttaaagattaatctgaattaagctttatcagtgtactctttatctgtgttactagtgcctggtatgtagtaggtgctcaataaatgcatattgaataact

SEQ ID NO: 56638 - DNA, 8890 bp, Homo Sapiens
ggaacattgagcatcctgactttgaaggagtctctgtggtgtttttgtgctaccatacatggggaataatgatgtgaggcagagggagagggaatgaatgggagagccaagagggaagagcgagccggggggaaaggagcgcgcagtgtttcctgctgcggttaggacctcacgccttgccagtacagagctcggtggcaagagccgctgggagctgctcccatcagttagaggatgtggagagggagcaccagaagaggacagcccgcagcctggctcgcagcctgagggacgctgtgggtgctcccagccgggcgagcacgctctgggagcggatctgcaggggagaagcacgcgagcctaacgtgagcgtcccgcctgtcgcgtgtcctgccttggtaagcgccctctccggtccttccacactgaaagcttccagcagagatcaagggaaggagtattgtgtgagacttgcagatttcctcctttctgtctggactggtttgatatttgcctgttgaaaagattactgaacgcagtgtgacaagatgagccgtctagctgcgttctgcttgcctgtgtgtgtgacacgtccaggtgtgaggccaaacctgagaagtgcagactgctcactgatagacgttgctgtaaacagtagtgccctgggtgtacagctggtctcaggatcggagaccccggacttattctctgctcggtgacacggccggcttcctgccgcagagctcctggtttctgttgatggcagttgataattggtagccacagtctgcggtcggagccacagcatttgagtctagcacctggggtgggccctgctgatacagtagagagagagtgaacgaggcagacagaaacacaccccccccccctccacgctcacacactctcccacaccccatgccagctataactgcagctctgagctgcctggagaggagattgccggaagctgaagggatgctttgaacgtgggggggctgcgtcacagttggactcccacttgcagaggacctgattatgtccagtgaccacctgaacaacagcacactgaaggaggctcagttcaaagacctgttcttaaaaaaagcggagctggagttcgcccaaatcatcatcatcgtcgtggtggtcacggtgatggtggtggtcatcgtctgcctgctgaaccactacaaagtctccacgcggtccttcatcaaccgcccgaaccagagccggaggcgggaggacgggctgccgcagatcatgcatgccccgcggtccagggacaggttcacagcgccgtccttcatccagagggatcgcttcagccgcttccagcccacctacccctatgtgcagcacgagattgatcttcctcccaccatctccctgtccgacggtgaagagccacctccttaccaggggccctgcaccctgcagctccgggaccctgaacagcagatggaactcaaccgagagtccgtgagggccccacccaaccgaaccatatttgacagtgatttaatagacattgctatgtatagcgggggtccatgcccacccagcagcaactcgggcatcagtgcaagcacctgcagcagtaacgggaggatggaggggccaccccccacatacagcgaggtgatgggccaccacccaggcgcctctttcctccatcaccagcgcagcaacgcacacaggggcagcagactgcagtttcagcagaacaatgcagagagcacaatagtacccatcaaaggcaaagataggaagcctgggaacctggtctgattccttccaacgtgcacttcagctggagaaagaaaccaagaagggaagcggccgctgggcccctcctgcgcacagtgttgttcagtttcacatggtacaaataagtaaaaccaaatgagcaaacacggtctttgtttctgattccttttaggggaattgcatgcaaactagactgaaatgatacaaacttccatctggtctgaccgcaaacagtgtttatttggggacaggggttgggatgggggtgtgggcaggggaaaacagagaacgggatgctttgaagataccatgaaataaaacccacagaggtatttgatgtatttaattgtgaaaggagactttgcagataaatgaggccagaatggcatgttttataattaactgaataaagaaggaagcattattatatattattgtggggaagaaccagccagttcgctttttctcctaaggtgtggaacttttattttgttttaaaaatatgaatcaaaattcctgtgttgtgtgccaaggtataaagtggagaagttagatgagtgcaaggagctcctttgtgttgtgatgatgtgttttaaaagttgcactatcttaatgttgaaaatatttacaagggaactgttttacgtgaagttctgtatgttgtcttttcacctgtggattgtaatcaggcccaaggaatatcctggagtggtccccagaagcatccaagaaaagatatttggggacgtagcctaacattttaccaacttacgtaaatcaaaaaagtcattattgttgcaggagtttgcatcaaatagcagtgcatcgctgaagcttttggagacttttggatggaagataagatagggaagattaagttccagcatttctgacttgttattttgagttactctgctactcttaggctgcatagtttatgagaaaatgaacacatgcatttatggatccagtatcatgcagtgctgccctcatcctccagcagtgcaatttcttcagtaatttagatttttttcactatagcatgaaatatattcaaatacataccttattttatgcaataaattgtttaaaatgcaaggtggttattctgcatactgttgaaatatgtgactcctcagtatattcccattgcctctccccctttcctcgacagcttagttcagttctgcagggctgctcagttcacaggaggctcccagcagccaccccacatccagcctacacagaacttcgtgtgggagtggtgtgggtggtggtttcttatgctttggaagcccctagaaataatgacggaagaatgccatgttgctgatcgtggtaataagccattgtgggttattgtatgtcactagtattagcatagcattcttaaaggaatgcagtgttcaaaacctacccaaattcccgcaggattttaccaaacccttccccaggccagttttgtactgaaggcaagaactggacagtcagagaacagtggagggggcaagtgactgaagagcaccgggtaaaaagcacaacatgcagttaaaatgcaactagaaaactaattttaaatattgttagttttaatattcctgatatttacaaatattcattcttatatacaatgaaaaaaataactttcttctgcagatgtaagcactggcttttataagagcagcagccaacacgtttagcagacactgcgcgtggagaagggcttatctgcagtacactctgccatgtggagggtgggcctctgtggcctcttcacataacaagatgagctggaatgatgattccatgactcccacctatgcagccttaaagccaaatccgcgtgtgtgtgtttgtgtctgtctgtgggtctcgaaggtgatccgtcggtgcggtggctctgtgctgtaactggagagactgttccaaaccccaagagttgtctgatcctagtctgttcccttctgcttcttacctctgtagataggtcactggtttttgtttgtttgttttgaggattggaatttccattacattcatcctttgcacacagtaacatccacagaactagtccaactcttaaaaggagagaggaaaaacacaggcaccagttgtcagctcatgcttacaacctgtgtggaagtatatacagttgagagtcacagtggaggttctgagactggattcagtcttgttccagtgacagttggaaggcctctgctggagagacaccagctctcagggcagagattggcttggggccagaaggaccctccccaaccctggagacaccctgaaggttcactggctctccagattagcctctcttcctctgtcaggcaaagatgaggagcccgtgttcccatcgggccctgctggcagggacttgcagtggattcttggtcaggtgtgcccacagatgcggaggcgaggtgagtgattccatcatttcagttctcacctgcagttttggtgaagcaggagatgcaccccacagctctagctctcaaatggcttcacagtccttacttctctacctgcctcaagaaggggctcagagcagagacttgtgaattccttagtaactgtgagtatatgaatgtgttgcacatgtccacagtattggcgagataattacataattcagatacctttaatcatctttcaagaaagaggctcctcccattcaaccaccctagagaactgcctttgttaaatagttatttaaagactcatacatatcaaaccatgactttgaaaggtcttcgaggctggggctctgtaatgaattagtttaaaagccaaggtcataacatgaattgatggtcaatttcccttcagcagaaggaaaaggtgatttagatcagtagctcttttgaaggttgtggctgacctgttcataccgtgtcgcctcatggctagtgtggcgttgaaagagtagcgactgggaagatacaacttacacagtggggcctattgttctttcaagaaccctttttttagcttatagaacccatgggtccagtttagtaacgagtgatttaggcaatcaatgataggtttataatcttagattattccagcaaagtgtggattgcattgttaggaagaacatttggtgggaatgaacactcctgggcataccgctgacttttgtcccttgttcccggtgtaggagacccaaggcatcttgaatcccatctataagaacacaatcttccagcatacgtttgctttttcagaaactctagcattctctttaaatactgacgcaatccttaatggaaaagagatttcatgaagcaaattatgtatttcaatagttcttctatttttagtgtccaaaatttactaatacagaagcttgacaagcatgtcctcaccctccccaccacataaacacatggacacacacccaagccacaagaaatcccaagagagcagaagcgaatttttaaaagatttatcgtgaggactgcatttccattcactaattttggctcaaacttatgaggcaggaaataggggccaacagtaaatgggggaggcctcctgacaccagcagaggaattttgtacccaggcgaggacttcttgaacttctgcgtatctccgtttgatctctttcacctttatttcatcttcataagaatgagaaaggctcaaaaggaagcacttttagaaatcttctctgacctagaagaatccatccaaatccctgccttcctctctgaaccaacagttcccttctctgacaggggccatcctctatcttccatccagcggctcttctttttaggaaggctctggtgcagagcacttcaaatatgtcctcaggccagatactgattgctagtagagagacacccggcacccagtccgaagccctccctcaaaggaccggctcatggcgttggtcactggcaggctcagagacattctgctgtgggcgcagggagcccggccccccatgcagccatgactggatgcgcccccatctcgggggcttgctgcactgcttgtttattgaattttgctacttagaatggcaacattaactttgtgtaccattcattttttaaaaattttccaaagctcggcagtgtatgaaagaaaaaactgggaaagatacttggtttctgttaacttttgtgttgcttgcttaagtgattaaagccagtgcttggagccaagccttcatgccacgaacatgctccacagcctgccctttgctctcctgctcacactgaccaagaatgccgcgtgcttggcctactgaggtgaaaggacaattgaatgacaggtgggcaaagggagaacttccccttcttggtgcgaggaaagtcacaaatttaaaaatgttgcttccagcccagatcctaaatgctagttctcagcagctgcgtggcttaccgttcgccatttccaccaccgccagctgccagcaccgctacagatcacagagatgtgaacagacaatggaaagcactcttagccttgcagtggtctacattttttaggaaccaatatttcagcattctttattacccggcacgctgtgtcctttgcagagttcaagtttatgttactgccagggtcagacagtcatttgctgctgctgctgctgctgctgcttctcgaactggatgcattaggaagctgctgtctgagtgtaggaatgtcttgctaagaaagcaatgtcttccttcatccttttctttcttccctctgcgtgtccttgtttttgtgtaatgcgggagagggttagagctatagagattatatatacactatccgtgcacattatatatatgtagatatacccctatcatgtcagagatctgcatgtcagtttttcagcaactaaggtgcctcatgttctgagttcagcagatataggaaccaagccgccccctcctgcacttgatgctcccacctttgttgtgcctcacttaaaatggtgcttttttcagttgtctgtcttttcttatgtttttatttgtaaggtgctgtatataagttgaatatattatgcacatatcctacccaatgggtagaacaaaaagttgttaatactgtaatataatgtatagatgataccaattttaacagaaatggcatagaatttgtgaatgcctatgtgctttgtcctcttttgtaaggaaatttgcaaatggatgcatacagattaaagtctatgtagtttattttcctattaaatatcaatattataacacaagagaaagaagtgtgaacaaacaagcaacagtttatgaccagcgtatatatagcaatggaaagttgcatctttgctgtgaaaacactttaaagaaaatactttttaaaaaatcccacagctttttggttgccactagacgcttcttattttaatcattttagtaatgctcagctggaccagtgttagttatatttgagtcagaaaaatgttgtttttcaacttgctttataatctcctgcatctatctcctgctgtagcatcacgaaggtgtcaggcaacagtgaaaagtgcacatttttgttgttgcagaaactgtgtcagaggaataagtaaatcagcctgcagcagaagactttgttcagctccagaggcatctgtgaccgtctgtgtccaagtctctctgtgcctttttcttttacaaactgaagctgtggagccaatgaagtaacagtagagattgtagggaaagaatacctcaggaaaaacaaatacacttacaagaagaccctgttcttagaaaatgtgtttagttatgggttagcactagaagagacttggctgtcagccagccaagtgaaggacctctcatccattcccattcatgtcccatcataatacggacccaaaaagcaaactcggttttgccatcagttagaaattacgttttggattgtatattgttacatctctcttccagcttagtttttagtgtctgattgtgacctctgcatttatcttcaaataccctaattttaaaacaaaagaacaagaaaagtttataacaccatgttcactaaaaccacggttgaatcttgggtgtgggcatcctttcgagtgttgtccataagagcagttcgtggaattttgcccatctgacccatattatcagcttattctgccaccagagtagagtctaataaattccaaagtttttatttgctccatggtgtatgttctgactttgaaaatgtcagattctataatcatacccctaacatccaggaaacaaatgacagattatctttaaactgaaattgactctacaatgcaacccttaatgctgaatggattaaaaaagtcagcccttttagtatctgtttgaaagggccgtaaaaagttgacacttttgttgttgtggatcctgcgtgtctagacccacgtgttgtttccatcgtatactgtagggtgcaccccttgggattcatcattaagaactgaggctcactgttgtcagaaacaaagctcccaccccccaggttcaaccttgtgggagaactgttgagcatgagaatgttctagactcagaggtactaaaatttgttaccacatcattgcttcctttctacaggacgaattgaggcttaaactttactgttaatgatactggttcattttaatgtgcttgttggtatgttgctatttttcatttcatagctttcaaaaatcatgctaattgtatacttgtctagtttaaggctattttaaaatatgtacaatactattcacagcatttagttcgtttaatttttattataaagcaatctactaaaaaagtacaactgtatttgaacttttcaatagttgtttgtgagctatgataatcaaaagtcattaaagtcttttttaacaaacattcgtgcttacttttcaacataattcccagttatatacagaaaaagatttccacctgtcacgtatctgcctcttttacctgagcaatggtgtagttcttagacctaaggtctgtaattgcaatacttttaaagaaagatgttgctctaagtgctgtttgttagttatgaaatcagatttttctgcttgttcttaatgctgtggtcaaaccatagcacaaaatcattaaaaataatcagcggcatac

SEQ ID NO: 56639 - DNA, 2205 bp, Homo Sapiens
gaagggcctggggaagccaggtggccagggagatgccatccagctaagccctaagctccaggctctggctgaggaacccagccagcctcatactcggagcccggccaaaaacaagaagacgctggggaggaaacgtgggcacaagggttccttcaaggacgacccccagctctaccaggagatccaggagcggggcctgaacaccagccaggagtctgatgacgacatcctcgatgagtcctccagccccgagggaacccagaaggtggacgccaccattgtggtcaagagctaccggcccgcccaggtcacctggagccagctcccggaggtggtggaattgggcatcctggaccagctctccactgaggagcggaaaaggcaggaggccatgttcgagatcctcacgtcggagttctcctaccagcacagcctgagcatcctggtggaggagttcctgcagtccaaggagctgcgggcgaccgtgacccagatggagcaccaccacctcttctccaacatcctggatgtcctgggtgccagtcagaggttcttcgaggacctggagcagcggcacaaggcccaggtgctggtcgaggacatcagtgacatcctggaggagcacgctgagaagtacttccacccctacatcgcctactgctccaacgaggtctaccaacagcgcacgctgcagaagctgataagcagcaacgccgccttccgagaggccctgagagagattgagaggcggccggcgtgcgggggcctgcccatgctctccttcctgatcctccccatgcagcgggtgacccggctgcccctcctgatggatacgctctgcctcaagacccagggccactccgaaaggtacaaggctgccagccgtgcactgaaggccatcagcaagctggtgaggcagtgcaacgagggggcccacaggatggagcgcatggagcagatgtacacgctgcacacacagctggacttcagcaaggtcaagtccctcccactgatctccgcctcccggtggctgctgaagcgcggagagctgttcttagtggaagaaaccggactttttcgaaaaattgccagccggccaacgtgctaccttttcctgttcaacgatgtcctggttgtgaccaagaagaagagcgaggagagctacatggtccaggactacgcccagatgaaccacatccaggtagagaagatagagccgtctgagctccctctgcccgggggcggcaaccgtagctcctccgtgccccaccccttccaggtgaccctgcttcgcaacagcgagggccgccaggagcagctcctgctctcctcggactccgcgagtgaccgggcacggtggatcgtggcgctcacacacagtgagagacagtggcagggcctctccagcaaaggagacctgccccaggtggagatcaccaaggccttcttcgcgaagcaagcagacgaggtcacactgcagcaggcggacgtggtcctggttctgcagcaggaggatgggtggctctatggcgagaggctccgggacggagagacgggatggttccccgaggactttgcccgcttcatcaccagccgtgtggccgtggagggcaatgtccgcaggatggagcgtctgcgggtggagacggacgtgtagccctggcgaggccagccggcggcagcacagcctgtccccaatcagcaagtggtcgtgcctggctctagagagcgtggggagctggtctcaaggacccagcatggttccctggggcttcccaagagcctgtggctgtggtgccgggctccagacacttcacggaaggaagatcacatgtccccagagaggcacccccaggcaagctcgagggggccacaccgtgtcccagggagcccagcctattcccgttggctggctgggcccctctcagctgctgggccccacctccccactgcacccaggggacaactccacctggactgatgggcacaggaggcaccaatagcgattattgggggcaatgcgaggtctcctcctatgcccttcctacccctgagtgggacaagaagggccttgagtgcccaggagtgccccacgttctgagaaggggccggccggagggaggggacccggcagggagatttcggttttgaggtttctaaatacattaaagttatttcttaagaaaaaaaaaaaaaaaaaaaaaa

SEQ ID NO: 56640 - DNA, 1442 bp, Homo Sapiens
tttttttttttgagatggagttttcgctcttgttgcccaggctggagtgcaatggcgcaatctcagctcaccgcaacctccgcctcccgggttcaagcgattctcctgcctcagcctccccagtagctgggattacaggcatgtgcacccacgctcggctaattttgtatttttttttagtagagatggagtttctccatgttggtcaggctggtctcgaactcccgacctcagatgatccctccgtctcggcctcccaaagtgctagatacaggactggccaccatgcccggctctgcctggctaatttttgtggtagaaacagggtttcactgatgtgcccaagctggtctcctgagctcaagcagtccacctgcctcagcctcccaaagtgctgggattacaggcgtgcagccgtgcctggcctttttattttattttttttaagacacaggtgtcccactcttacccaggatgaagtgcagtggtgtgatcacagctcactgcagccttcaactcctgagatcaagcatcctcctgcctcagcctcccaagtagctgggaccaaagacatgcaccactacacctggctaatttttatttttatttttaattttttgagacagagtctcaactctgtcacccaggctggagtgcagtggcgcaatcttggctcactgcaacctctgcctcccgggttcaagttattctcctgccccagcctcctgagtagctgggactacaggcgcccaccacgcctagctaatttttttgtatttttagtagagatggggttcaccatgttcgccaggttgatcttgatctctggaccttgtgatctgcctgcctcggcctcccaaagtgctgggattacaggcgtgagccaccacgcccggcttatttttaatttttgtttgtttgaaatggaatctcactctgttacccaggctggagtgcaatggccaaatctcggctcactgcaacctctgcctcccgggctcaagcgattctcctgtctcagcctcccaagcagctgggattacgggcacctgccaccacaccccgctaatttttgtattttcattagaggcggggtttcaccatatttgtcaggctggtctcaaactcctgacctcaggtgacccacctgcctcagccttccaaagtgctgggattacaggcgtgagccacctcacccagccggctaatttagataaaaaaatatgtagcaatggggggtcttgctatgttgcccaggctggtctcaaacttctggcttcatgcaatccttccaaatgagccacaacacccagccagtcacattttttaaacagttacatctttattttagtatactagaaagtaatacaataaacatgtcaaacctgcaaattcagtagtaacagagttcttttataacttttaaacaaagctttagagca

SEQ ID NO: 56641 - DNA, 1593 bp, Homo Sapiens
tccggaacgccggggtgtggttccgggtcgtgtgcggctcggggtaatagggctgctgctcggccggccggcggcggcgagcagcaggggcatgagggctaacccgggaagcggcagctgagcgggccgggaggagcgccggtccccgtggatcccgagagtgcagagctcggggcaggggccgggaggcgtgggggagccgggccctcccctcaggaacgtgtcccggggccgacccggcccgtagtgtggaagcagcttcaggtaggtgagctcgtgaaacaatatgaagaggagaaaatagccttttaaggaaattggcccacagaaaggatggccttcttggacaatccaactatcattctagctcatattcgacagtcacatgtgaccagtgatgacacgggaatgtgtgagatggttctcattgatcatgatgttgacctagagaagattcatcctccttcaatgcctggagacagtgggtcagaaattcagggaagcaatggtgagactcagggctatgtatatgcccagtcagtcgatattacctcaagttgggactttggtattagaagacgctcaaacacagctcaaagattagaacgactccgaaaagagagacaaaaccagatcaaatgcaaaaatattcagtggaaagaaagaaattctaagcaatcagcccaggagttaaagtcactgtttgaaaaaaaatctctcaaagagaagcctccaatttctgggaagcagtcgatattatctgtacgcctagaacagtgccctctgcagctgaataacccttttaacgagtattccaaatttgatggcaagggtcatgtaggtacaacagcaaccaagaagatcgatgtctacctccctctgcactcgagccaggacagactgctgccaatgaccgtggtgacaatggccagcgccagggtgcaggacctgatcgggctcatctgctggcagtatacaagcgaaggacgggagccgaagctcaatgacaatgtcagtgcctactgcctgcatattgctgaggatgatggggaggtggacaccgatttccccccgctggattccaatgagcccattcataagtttggcttcagtactttggccctggttgaaaagtactcatctcctggtctgacatccaaagagtcactctttgttcgaataaatgctgctcatggattctcccttattcaggtggacaacacaaaggttaccatgaaggaaatcttactgaaggcagtgaagcgaagaaaaggatcccagaaagtttcaggtgcttgtgactaaattcactaatttcactggctgtcaaggctgtgttaaggaaaatgggtttgaactgctgtgggttttgagtactggactggatgtcagaaacctttgccatcacgggaaattctgtcactctggatttactgtctgttccccacagctaaattcctctgcagtgtgatttagcaccctggatccccatcaaccagttttggcatttatttgaatgcattaccccactggtttccataaactattttacaattgtttaaaataaatgactgtttatttccacaaaaaaaa

SEQ ID NO: 56642 - DNA, 20431 bp, Homo Sapiens
gctgcccagagcccccatagagagaggtccccgccgccaccctcatggatcagccacagttcagcggggcgccccgctttctcacccggcccaaggccttcgtggtgtcggtgggcaaggacgccaccctcagctgccagatcgtgggtaatcccacgccacaggtgagctgggagaaggaccagcagccggtggcggccggcgcgcgcttccgtctggcccaggacggcgacctctaccgcctcactatcctggacctggcgctgggcgacagtgggcaatacgtgtgccgcgcgcgcaatgccataggcgaggccttcgctgctgtgggcctgcaggtggacgcggaggccgcgtgcgccgagcaggcgccgcacttcctgctgcggcccacgtccatccgcgtgcgcgagggctcagaggccaccttccgctgccgcgtgggtggctccccgaggccggcagtgagctggtccaaggacgggcggcgcctgggtgagcccgacggcccccgcgtgcgcgtggaggagctcggcgaggcaagtgcgctgcgcattcgggcggcgcggccgcgcgacggcggcacttacgaggtccgcgccgagaacccgctgggcgctgccagcgccgccgcggcgctagtggtggactcggacgccgcggacacggccagccggcccgggacctccacggccgcgctcctggcgcacctgcagcggcggcgcgaggctatgcgcgccgagggcgcccccgcctcaccgcccagcaccggcacgcgcacctgcacggtgactgaaggcaagcacgcgcgcctcagctgctacgtgaccggcgagcccaagcccgagacggtgtggaagaaggacggccagctggtgaccgagggccggcgccacgtggtgtacgaggacgcgcaggagaacttcgtgctcaagatcctcttctgcaagcagtcggaccgcggcctctacacctgcacggcgtccaacctcgtgggccagacctacagctctgtgctggtcgtagtgcgcgagcccgcggttcccttcaaaaagcggctgcaagatctggaggtgcgggagaaggagtcggccacgttcctatgtgaggtgccccagccgtccactgaggccgcgtggttcaaggaggagacgcggttgtgggcgagcgccaagtacggcatcgaggaggagggcaccgagcgccgcctgaccgtgcgcaatgtctcggccgacgacgacgcggtgtacatctgcgagacgccagagggcagccgcacggtggcggagctcgcagtccaaggaaacctcctccgaaagctccctcggaagacggcggtgcgcgtgggcgacacggctatgttttgcgtggagctggcggtcccggtgggccccgtccactggctgcggaaccaggaggaagtggtggcggggggccgcgtggccatctccgcggagggcacgcgccacacactaaccatctcccagtgctgcctggaggatgtgggccaggtggcctttatggctggcgactgccagacgtccacccagttctgcgtgtcggcccccaggaagcctcccctgcaaccccctgtggatcctgtggtaaaggccaggatggagagttccgtgattctcagctggtccccaccaccccatggggaacgccctgtcactatcgacggctacctggtagagaagaagaagcttggcacctacacctggatcaggtgccacgaggctgaatgggtggctacacctgagctgaccgtggctgatgtggcggaggaggggaacttccagttccgagtgtccgctctcaacagctttggtcagagtccctacctcgagttcccggggactgtccacctggcccccaagctggccgtgaggacaccgctgaaggcggtgcaggcggtagagggtggcgaggtcactttctccgtggacctcacggtggcctcagcgggtgagtggttcctggatgggcaggccctgaaggccagcagtgtgtatgagatccactgtgatcgcacccggcacacgctcaccatccgggaggtgcccgccagcctgcacggggcgcagctgaagttcgtggccaacggcattgagagcagcatccggatggaggtccgggcggccccagggctgactgccaacaagccgccagccgcagctgcccgggaggtgctggctcggctgcacgaggaggcgcagctgctggctgagctgtcagatcaggctgcggctgtgacgtggctgaaggatggtcgcacactgtccccaggccccaagtatgaggtgcaggcatcggccgggcggcgggtgctccttgtgcgagatgtggcccgggacgatgcaggcctctacgagtgcgtcagccgcgggggccgcatcgcctaccagctctccgtgcaaggcctcgcgcgctttctgcacaaggacatggcgggcagctgtgtggatgccgtggctgggggcccggcgcagtttgagtgtgagacctccgaagcccacgtccacgtgcactggtacaaggatggcatggagctgggccactccggtgagcgcttcttgcaggaggatgtggggacgcggcaccggctggtggcagccacagtcaccaggcaggatgaaggcacctactcctgccgcgtgggcgaggactctgtggacttccggctccgcgtctctgagcccaaggtggtgtttgctaaggagcagctggcacgcaggaagctgcaggcagaggcaggagccagtgccacactgagctgcgaggtggcccaggcccagacggaggtgacgtggtacaaggatgggaagaagctgagctccagctcgaaagtgtgcatggaggccacaggctgcacgcgcaggctggttgtgcagcaggcaggccaggcggatgccggggagtatagctgcgaggctgggggccagcggctctccttccatctggatgtcaaagagcccaaggtggtgtttgccaaggaccaggtggcacacagtgaggtgcaggctgaggcaggggccagtgccacgctgagctgcgaggtggcccaggcccagacggaggtgatgtggtacaaagatgggaagaagctgagctccagcttgaaagtgcatgtagaggccaagggctgcagacggaggctggtggtgcagcaggcaggcaagacagatgccggggactacagctgcgaggccaggggccagagggtctccttccgcctgcacatcacagagcccaagatgatgtttgcaaaggagcagtcagtgcataatgaggtgcaggctgaggcgggggccagtgccatgctgagctgtgaggtggcccaggcccagacggaggtgacgtggtacaaggatgggaagaagctgagctccagctcaaaagtgggcatggaggtcaaagggtgcacacggaggctggtgctgccacaggcgggcaaagcagatgctggggagtacagctgtgaggctgggggccagagagtctccttccacctgcacatcacagagcccaagggggtgtttgcgaaggagcagtcagtgcataatgaggtgcaggctgaggcggggaccactgccatgctgagctgtgaggtggcccagccccagacagaggtgacgtggtacaaggacgggaagaagctgagctccagctcaaaagtacgcatggaggtcaagggctgcacacgaaggctggtagtgcagcaggtgggcaaagcagatgctggggagtacagctgcgaggctgggggccagagagtctcctttcaactgcacatcacagagcccaaggcagtgtttgccaaggagcagttggtgcataatgaggtgcggactgaggcaggggccagtgccacactgagctgtgaggtggcccaggcccagacagaggtgacgtggtacaaggatgggaagaagctgagctccagttcgaaagtgcgcatagaggctgcgggctgcatgcggcagctggtggtgcagcaggcaggccaggcagatgctggggagtacacctgtgaggctgggggccagcggctctccttccacctggatgtttcagagcccaaggcggtgtttgcaaaggagcagctggcacacaggaaggtgcaggccgaggcgggggccattgccacgctgagctgcgaggtggcccaggcccagacagaggtgacgtggtacaaggacgggaagaagctgagctccagctcgaaagttcgaatggaggctgtgggctgcacacggaggctggtggtgcagcaggcatgccaggcggacaccggggagtatagctgcgaggccgggggccagcggctctccttcagcctggacgtggcagagcccaaggtggtgtttgccaaggagcagccagtgcacagggaggtgcaggcccaggcgggggccagcaccacactcagctgcgaggtggctcaggcccagacggaggtgatgtggtacaaggacgggaagaagctgagcttcagctcgaaagtgcgcatggaggctgtgggctgcacacggaggctggtggtgcagcaggcgggccaggcggtcgccggggagtacagctgcgaggcggggagccagcggctctccttccacctgcacgtggcagagcccaaggcggtgtttgccaaggagcagccagcgagcagggaggtgcaggctgaggcggggaccagtgccacgctgagctgcgaggtggcccaggcccagacagaggtgacgtggtacaaggacgggaagaaactgagctccagctcgaaagtgcgaatggaggccgtgggctgcacacggaggctggtggtgcaggaggcaggccaggcggacgccggggagtacagctgcaaggccggggatcagcggctgtccttccacctgcacgtggcagagcccaaggtggtgtttgccaaggagcagccagcacacagggaggtgcaggctgaggcgggggccagtgccacgctgagctgcgaggtggcccaggcccagacagaggtgacgtggtacaaggatgggaagaagctgagttccagctcgaaagtgcgcgtggaggccgtgggctgcacacggaggctggtggtgcagcaggcgggccaggcggatgctggggagtacagctgtgaggcggggggccaacggctgtccttccgcctgcacgtggcagagctggagccccaaatttcagagagaccctgccgcagggagcctctggtggtcaaggagcatgaagacatcatcctgaccgccacactggccacaccctctgcggccacggtgacctggctcaaggatggtgtggagattcgccgcagcaagcggcatgagacagccagccagggggacacccacaccctgaccgtgcatggcgcccaggttctggacagcgccatctacagctgccgtgtgggcgcagaggggcaggacttcccagtgcaggtggaagaggtggccgccaagttctgccggctgctggagcctgtgtgcggcgagctgggtggcacggtgacactggcctgcgagctaagcccagcgtgtgcagaggtggtgtggcgctgcggcaacacgcagcttcgggtgggcaagcgcttccagatggtggccgaggggcccgtgcgctcactcactgtgttggggctgcgcgcagaggacgcaggggagtacgtgtgtgagagccgtgatgaccacaccagtgcgcagctcaccgtcagtgtgccccgagtggtgaagtttatgtctgggctgagcaccgtggtcgcagaggagggcggcgaggccaccttccagtgcgtggtgtcccccagtgatgtggcagtcgtgtggttccgggacggtgccctgcttcagcccagcgagaagtttgccatatcacagagtggcgccagccacagcctgaccatctcagacctggtgctggaggacgcgggccagatcaccgtggaggctgagggcgcctcatcctctgctgccctgagggtccgagaggcgcctgtgctgttcaaaaagaagctggagccgcagacggtggaggagcggagctcggtgaccctggaggtggagctgacgcggccgtggccggagctgaggtggacacggaacgcgacggccctggcgccgggaaagaacgtggagatccacgccgagggcgcccgccaccgcctggttctgcacaacgtaggttttgccgaccgtggcttctttggctgcgagacgccggatgacaagacacaggccaaactcaccgtggagatgcgccaggtacggctcgtacggggcctgcaggcagtggaggcacgggagcagggcacggctaccatggaggtgcagctgtcgcatgcggacgtggatggcagctggactcgtgacggtctgcggttccagcaggggcccacgtgccacctggctgtgcggggccccatgcacaccctcacactctcggggctgcggccagaggatagtggccttatggtcttcaaggccgaaggagtgcacacgtcggcgcggctcgtggtcaccgagcttcccgtgagcttcagccgcccgctgcaggacgtggtgaccactgagaaggagaaggttaccctggagtgcgagctgtcgcgtcctaatgtggatgtgcgctggctgaaggacggtgtggagctgcgggcaggcaagacgatggccatcgcagcccagggcgcctgcaggagcctcaccatttaccggtgcgagttcgcggatcagggagtgtatgtgtgtgatgcccatgatgcccagagctctgcctccgtgaaggtacaaggaaggacatacactctcatctaccggagagtcctggcggaagatgcaggagagatccaatttgtagccgaaaatgcagaatcgcgagcccagctccgagtgaaggagctgccagtgaccctcgtgcgcccgctgcgggacaagattgccatggagaagcaccgcggtgtgctggagtgtcaggtgtcccgggccagcgcccaggtgcggtggttcaagggcagtcaggagctgcagcccgggcccaagtacgagctggtcagtgatggcctctaccgcaagctgatcatcagtgatgtccacgcagaggacgaggacacctacacctgtgacgccggtgatgtcaagaccagtgcacagttcttcgtggaagagcaatccatcaccattgtgcggggtctgcaggacgtgacagtgatggagcccgctcctgcctggtttgagtgtgagacctccatcccctcagtgcggccacctaagtggctcctggggaagacggtgttgcaggctggggggaacgtgggcctggagcaggagggcacggtgcaccggctgatgctgcggcggacctgctccaccatgaccgggcccgtgcacttcaccgttggcaagtcgcgctcctctgcccgcctggtggtctcagacatccccgtagtcctcacacggccgttggagcccaagacagggcgtgagctgcagtcagtggtcctgtcctgcgacttccggccagcccccaaggctgtgcagtggtacaaggatgacacgcccctgtctccctctgagaagtttaagatgagcctggagggtcagatggctgagctgcgcatcctccggctcatgcctgctgatgctggtgtctaccggtgccaggcgggcagtgcccacagcagcactgaggtcactgtggaagcgcgggaggtgacagtgacagggccgctacaggatgcagaggccacggaggagggctgggccagcttctcctgtgagctgtcccacgaggatgaggaggtcgagtggtcgctcaacgggatgcccctgtacaacgacagcttccatgagatctcacacaagggccggcgccacacgctggtactgaagagcatccagcgggctgatgcgggcatagtacgcgcctcctccctgaaggtgtcgacctctgcccgcctggaggtccgagtgaagccggtggtgttcctgaaggcgctggatgacctgtccgcagaggagcgcggcaccctggccctgcagtgtgaagtctctgaccccgaggcccatgtggtgtggcgcaaagatggcgtgcagctgggccccagtgacaagtatgacttcctgcacacggcgggcacgcgggggctcgtggtgcatgacgtgagccctgaagacgccggcctgtacacctgccacgtgggctccgaggagacccgggcccgggtccgcgtgcacgatctgcacgtgggcatcaccaagaggctgaagacaatggaggtgctggaaggggaaagctgcagctttgagtgcgtcctgtcccacgagagtgccagcgacccggccatgtggacagtcggtgggaagacagtgggcagctccagccgcttccaggccacacgtcagggccgaaaatacatcctggtggtccgggaggctgcaccaagtgatgccggggaggtggtcttctctgtgcggggcctcacctccaaggcctcactcattgtcagagagaggccggccgccatcatcaagcccctggaagaccagtgggtggcgccaggggaggacgtggagctgcgctgtgagctgtcacgggcgggaacgcccgtgcactggctgaaggacaggaaggccatccgcaagagccagaagtatgatgtggtctgcgagggcacgatggccatgctggtcatccgcggggcctcgctcaaggacgcgggcgagtacacgtgtgaggtggaggcttccaagagcacagccagcctccatgtggaagaaaaagcaaactgcttcacagaggagctgaccaatctgcaggtggaggagaaaggcacagctgtgttcacgtgcaagacggagcaccccgcggccacagtgacctggcgcaagggcctcttggagctacgggcctcagggaagcaccagcccagccaggagggcctgaccctgcggctcaccatcagtgccctggagaaggcagacagcgacacctatacctgcgacattggccaggcccagtcccgggcccagctcctagtgcaaggccggagagtgcacatcatcgaggacctggaggatgtggatgtgcaggagggctcctcggccaccttccgttgccggatctccccggccaactacgagcctgtgcactggttcctggacaagacacccctgcatgccaacgagctcaatgagatcgatgcccagcccgggggctaccacgtgctgaccctgcggcagctggcgctcaaggactcgggcaccatctactttgaggcgggtgaccagcgggcctcggccgccctgcgggtcactgagaagccaagcgtcttctcccgggagctcacagatgccaccatcacagagggtgaggacttgaccctggtgtgcgagaccagcacctgcgacattcctgtgtgctggaccaaggatgggaagaccctgcgggggtctgcccggtgccagctgagccatgagggccaccgggcccagctgctcatcactggggccaccctgcaggacagtggacgctacaagtgtgaggctgggggcgcctgcagcagctccattgtcagggtgcatgcgcggccagtgcggttccaggaggccctgaaggacctggaggtgctggagggtggtgctgccacactgcgctgtgtgctgtcatctgtggctgcgcccgtgaagtggtgctatggaaacaacgtcctgaggccaggtgacaaatacagcctacgccaggagggtgccatgctggagctggtggtccggaacctccggccgcaggacagcgggcggtactcatgctccttcggggaccagactacttctgccaccctcacagtgactgccctgcctgcccagttcatcgggaaactgagaaacaaggaggccacagaaggggccacggccacgctgcggtgtgagctgagcaaggcagcccctgtggagtggagaaaggggtccgagaccctcagagatggggacagatactgtctgaggcaggacggggccatgtgtgagctgcagatccgtggcctggccatggtggatgccgcggagtactcgtgtgtgtgtggagaggagaggacctcagcctcactcaccatcaggcccatgcctgcccacttcataggaagactgagacaccaagagagcatagaaggggccacagccacgctgcggtgtgagctgagcaaggcggcccccgtggagtggaggaaggggcgtgagagcctcagagatggggacagacatagcctgaggcaggacggggctgtgtgcgagctgcagatctgtggcctggctgtggcagatgctggggagtactcctgtgtgtgtggggaggagaggacctctgccactctcaccgtgaaggccctgccagccaagttcacagagggtctgaggaatgaagaggccgtggaaggggccacagccatgttgtggtgtgaactgagcaaggtggcccctgtggagtggaggaaggggcccgagaacctcagagatggggacagatacatcctgaggcaggaggggaccaggtgtgagctgcagatctgtggcctggccatggcggacgccggggagtacttgtgtgtgtgcgggcaggagaggacctcagccacgctcaccatcagggctctgcctgccaggttcatagaagatgtgaaaaaccaggaggccagagaaggggccacagctgtgctgcagtgtgagctgaacagtgcagcccctgtggagtggagaaaggggtctgagacccttagagatggggacagatacagcctgaggcaggacgggactaaatgtgagctgcagattcgtggcctggccatggcagacactggggagtactcgtgcgtgtgcgggcaggagaggacctcggctatgctcaccgtcagggctctacccatcaagttcacagagggtctgaggaacgaagaggccacagaaggggcaacagccgtgctgcggtgtgagctgagcaagatggcccccgtggagtggtggaaggggcatgagaccctcagagatggagacagacacagcctgaggcaggacggggccaggtgtgagctgcagatccgcggcctcgtggcagaggacgctggggagtacctgtgcatgtgcgggaaggagaggacctcagccatgctcaccgtcagggccatgccttccaagttcatagagggtctgaggaatgaagaggccacagaaggggacacggccacgctgtggtgtgagctgagcaaggcggcaccggtggagtggaggaaggggcatgagaccctcagagatggggacagacacagcctgaggcaggacgggtccaggtgtgagctgcagatccgtggcctggctgtggtggatgccggggagtactcgtgtgtgtgcgggcaggagaggacctcagccacactcactgtcagggccctgcctgccagattcatagaagatgtgaaaaaccaggaggccagagaaggggccacggccgtgctgcaatgtgagctgagcaaggcggcccccgtggagtggaggaaggggtctgagaccctcagaggtggggacagatacagcctgaggcaggatgggaccagatgtgagctgcagattcatggcctgtctgtggcagacactggggagtactcgtgtgtgtgcgggcaggagaggacctcggccacactcaccgtcagggccccacagccagtgttccgggagccgctgcagagtctgcaggcggaggagggctccacggccaccctgcagtgtgagctgtctgagcccactgctacagtggtctggagcaagggtggcctgcagctgcaggccaatgggcgccgggagccacggcttcagggctgcaccgcggagctggtgttacaggacctacaacgtgaagacactggcgaatacacttgcacctgtggctcccaggccaccagtgccaccctcactgtcacagctgcgcctgtgcggttcctccgagagctgcagcaccaggaggtggatgagggaggcaccgcacacttatgctgcgagctgagccgggcgggtgcgagcgtggagtggcgcaagggctccctacagctcttcccttgtgccaagtaccagatggtgcaggatggtgcagctgcagagctgctggtacgcggagtggagcaggaggatgcgggtgactacacgtgtgacacgggccacacgcagagcatggccagcctctctgtccgtgtccccaggcccaagttcaagacccggcttcagagtctggagcaggagacaggtgacatagcccggctgtgctgtcagctgagtgatgcagagtcgggggccgtggtgcaatggctcaaggagggcgtggagctgcatgcgggccccaagtacgagatgcggagccagggggccacgcgggagctgctgatccaccaactggaggccaaggacacgggcgagtatgcctgtgtgacaggcggccagaaaaccgctgcctccctcagggtcacagagcctgaggtgaccattgtacgggggctggttgatgcggaggtgacggccgatgaggatgttgagttcagctgtgaggtgtccagggctggagccacaggcgtgcagtggtgcctacagggcctgccactgcaaagcaatgaggtgacagaggtggctgtgcgggatggccgcatccacaccctgcggctgaagggcgtgacgcccgaggacgctggcactgtctccttccatttgggaaaccatgcttcctctgcccagctcaccgtcagagctcctgaggtgaccatcctggagcccctgcaggacgtgcagctcagtgagggccaggatgccagcttccagtgccggctatccagagcttcaggccaggaggcccgctgggctttaggaggggtgcccctgcaggccaacgagatgaatgacatcactgtggagcagggcacactccacctgctcaccctgcacaaggtgacccttgaggatgctggaactgtcagtttccacgtgggcacgtgtagctctgaggcccagctgaaagtcacagccaagaacacggtggtgcgggggctggagaatgtggaggcgctggagggcggcgaggcgctgttcgagtgccagctgtcccagcccgaggtggccgcccacacctggctgctggacgacgaacccgtgcacacctcggagaacgccgaggtggtcttcttcgagaacggcctgcgccacctgctgctgctcaaaaacttgcggccacaagacagctgccgggtgaccttcctggctggggatatggtgacgtccgcattcctcacggtccgaggctggcgcctggagatcctggagcctctgaaaaacgcggcggtccgggccggcgcacaggcatgcttcacctgcacgctcagcgaggcggtgcccgtgggagaggcgtcctggtacatcaatggcgcggcagtgcagccggatgacagcgactggactgtcaccgccgacggcagtcaccacgccctactgctgcgcagcgcccagccccaccacgccggggaggtcaccttcgcttgccgcgacgccgtggcctctgcgcggctcaccgtgctgggcctccctgatcccccagaggatgctgaggtggtggctcgcagcagccacactgtgacactgtcttgggcagctcccatgagtgatggaggcggtggtctctgtggctaccgcgtggaggtgaaggagggggccacaggccagtggcggctgtgccacgagctggtgcctggacccgagtgtgtggtggatggcctggcccccggggagacctaccgcttccgtgtggcagctgtgggccctgtgggtgctggggaaccggttcacctgccccagacagtgcggcttgcagagccaccgaagcctgtgcctccccagccctcagcccctgagagccggcaggtggcagctggtgaagatgtctctctggagcttgaggtggtggctgaggctggtgaggtcatctggcacaagggaatggagcgcatccagcccggtgggcggttcgaggtggtctcccagggtcggcaacagatgctggtgatcaagggcttcacggcagaagaccagggcgagtaccactgtggcctggctcagggctccatctgccctgcggctgccaccttccaggtggcactgagcccagcctctgtggatgaggcccctcagcccagcttgccccccgaggcagcccaggagggtgacctgcacctactgtgggaggccctggctcggaaacgtcgcatgagccgtgagcccacgctggactccattagcgagctgccagaggaggacggccgctcgcagcgcctgccacaggaggcagaggaggtggcacctgatctctctgaaggctactccacggccgatgagctggcccgcactggagatgctgacctctcacacaccagctctgatgatgagtcccgggcaggcaccccttccctggtcacctacctcaagaaggctgggaggccaggcacctcaccactggccagcaaggttggggccccagcagccccctctgtgaagccacagcagcagcaggagccactggctgctgtgcgcccaccactgggagacctgagcaccaaagacctgggtgatccctcaatggacaaggcagctgtgaagatccaggctgcctttaagggctacaaggtccggaaggagatgaagcagcaggaagggcccatgttctcccacacatttggggacaccgaggcacaggtgggggatgccctgcggctggagtgtgtcgtggccagcaaggcagatgtgcgagcccgctggctgaaggatggtgtggagctgaccgatgggcggcaccatcacatcgaccagcttggggatggcacctgctctctgctgatcactggcctggaccgtgctgatgctggctgctacacctgtcaggtgagcaacaagtttggccaggtgacccacagtgcctgtgtggtggtcagtgggtcagagagtgaagccgagagctcctctgggggtgagctggacgatgccttccgccgggctgcccgtcggctgcaccggctcttccgcaccaaaagtccggctgaagtttcagatgaggagctcttcctgagtgcagacgagggccctgcagagccagaggagcccgcggactggcagacataccgcgaagatgagcatttcatctgcatccgttttgaggcgctcactgaggcccgccaggcggtaactcgcttccaggagatgtttgccacactgggcattggggtggagatcaagctggtggaacaggggcctcggagggtagagatgtgcatcagcaaagagactcctgcccctgtggtgcctccagagccattgcccagcctactgacttctgacgctgccccagtgttcctgactgagttgcagaaccaagaagtgcaggatgggtatcctgtgagctttgactgcgtggtgacaggtcagcccatgcccagtgtgcgctggttcaaggatgggaagttgttggaggaggatgatcactacatgattaatgaagaccaacagggtggccatcagctcatcatcacagccgtggtgccagcagacatgggcgtctaccgctgcctggccgagaacagcatgggtgtctcctccaccaaggctgagctccgtgtggacttgacaagcacagactatgacactgcagcagatgccacggagtcctcatcctacttcagtgcccaaggctacctgtccagccgggagcaggagggaacagagtccaccactgatgagggccagctgccccaggtggtggaggagctgagagacctccaggtggcccctggcacacgcctggccaagttccagctcaaggtgaaaggctaccctgctcccagattatactggttcaaagatggccagcccctgaccgcatctgcccacatccgcatgactgacaagaagatcctgcacaccctggagatcatctccgtcacccgggaggactctggccagtatgcagcctatatcagcaatgccatgggtgctgcctactcgtctgcccggctgctggttcgaggccctgatgagccagaagagaagcctgcatcagatgtgcatgagcagctggtgccgccccgaatgctggagaggttcacccccaagaaagtgaagaaaggctccagcatcaccttctctgtgaaggtagaaggacgcccggtgcccaccgtgcactggctcagggaggaggctgagagaggcgtgctgtggattggccctgacacaccgggctacaccgtggccagctctgcgcagcagcacagcctggtcctgctggacgtgggccggcagcaccagggcacctacacatgcattgccagcaacgctgccggccaggccctctgctccgccagcctgcacgtctcgggcctgcctaaggtggaggagcaggagaaagtgaaggaagcgctgatttccactttcctgcaggggaccacacaagccatctcagcacaggggttggaaactgcgagttttgctgaccttggtgggcagaggaaagaagagcctctggctgccaaggaggccctcggccacctgtccctcgctgaggtgggcacagaggagttcctgcagaaactgacctcccagatcactgagatggtatcggccaagatcacgcaggccaagctgcaggtgcccggaggtgacagtgatgaggactccaagacaccatctgcatccccccgccatggccgatcacggccatcctccagcatccaggagtcttcctcagagtcagaggacggcgatgcccgaggcgagatctttgacatctacgtggtcaccgctgactacctgcccctaggggctgagcaggatgccatcacgctgcgggaaggccagtatgtggaggtcctggatgcagcccacccactgcgctggcttgtccgcaccaagcccaccaagtccagcccctcacggcagggctgggtgtcaccagcctacctggacaggaggctcaagctgtcacctgagtggggggccgctgaggcccctgagttccctggggaggctgtgtctgaagacgaatacaaggcaaggctgagctctgtgatccaggagctgctgagttctgagcaggccttcgtggaggagctgcagttcctgcagagccaccacctgcagcacctggagcgctgcccccacgtgcccatagctgtggccggccagaaggcagtcatcttccgcaatgtgcgggacatcggccgcttccacagcagcttcctgcaggagttgcagcagtgcgacacggacgacgacgtggccatgtgcttcatcaagaaccaggcggcctttgagcagtacctggagttcctggtggggcgtgtgcaggctgagtcggtggtcgtcagcacggccatccaggagttctacaagaaatacgcggaggaggccctgttggcaggggacccctctcagcccccgccaccacctctgcagcactacctggagcagccagtggagcgggtgcagcgctaccaggccttgctgaaggagctgatccgcaacaaggcgcggaacagacagaactgcgcgctgctggagcaggcctatgccgtggtgtctgccctgccacagcgcgctgagaacaagctgcacgtgtccctcatggagaactacccaggcaccctgcaggccctgggcgagcccatccgccagggccacttcatcgtgtgggagggtgcaccgggggcccgcatgccctggaagggccacaaccgtcacgtgttcctcttccgcaaccacctggtaatctgcaagccccggcgagactcccgcaccgataccgtcagctacgtgttccggaacatgatgaagctgagcagcatcgacctgaacgaccaggtggagggggatgaccgcgccttcgaggtgtggcaggagcgggaggactcggtgcgcaagtacctgctgcaggcacggacagccattatcaagagctcgtgggtgaaggagatctgtggcatccagcagcgtctggccctgcctgtgtggcggcccccggactttgaagaggagctggccgactgcacagccgagctgggtgagacagtcaagctggcctgccgcgtgacgggcacacccaagcctgtcatcagctggtacaaagatgggaaagcagtgcaggtggacccccaccacatcctcattgaagaccctgatggctcgtgtgcactcatcctggacagcctgaccggtgtggactctggccagtacatgtgcttcgcggccagcgccgctggcaactgcagtaccctgggcaagatcctggtgcaagtcccaccacggttcgtgaacaaggtccgggcctcaccctttgtggagggagaggacgcccagttcacctgcaccatcgaaggcgccccgtacccgcagatcaggtggtacaaggacggggccctgctgaccactggcaacaagttccagacactgagtgagcctcgcagcggcctgctagtgctggtgatccgggcggccagcaaggaggacctggggctctacgagtgtgagctggtgaaccggctgggctccgcgcgggctagtgcggagctgcgcattcagagccccatgctgcaggcccaggagcagtgtcacagggagcagctcgtggctgcagtggaagtcactgagcaagagactaaagtccccaagaaaaccgtcatcatagaagagaccatcaccactgtggtgaagagcccacgtggccaacgacggtcccccagcaagtccccctcccgctcaccttcccgctgctctgccagcccgctgaggccaggcctactggcccccgacctgctgtacctgccaggtgctggccagccccgcaggccggaggcagaaccaggccagaagcccgtggtgcccacactgtatgtgacggaggccgaggcccactctccagctctgcccggactctcggggccccagcccaagtgggtggaggtggaggagaccattgaagtccgggtgaagaagatgggcccgcagggtgtgtctcccaccacagaggtgcccaggagctcatcggggcatctcttcacactgcccggtgcgacccccggaggggaccccaattccaacaactccaacaacaagctgctggcccaggaggcctgggcccagggcacagccatggtcggcgtcagagagccccttgtcttccgcgtggatgccagaggcagtgtggactgggctgcttctggcatgggcagcctggaggaggagggcaccatggaggaggcgggagaggaagagggggaagacggagacgcctttgtgacggaggagtcccaggacacacacagccttggggatcgtgaccccaagatcctcacgcacaacggccgcatgctgacactggctgacctggaagattacgtgcctggggaaggggagaccttccactgtggtggccctgggcctggcgcccctgatgaccctccctgcgaggtctcggtgatccagagagagatcggggagcccacggtggggcagcctgtgctgctcagcgtggggcatgcactgggtccccgaggccctctcggcctctttaggcctgagccccgtggggcgtcaccaccgggaccccaggtccgtagccttgagggcacctccttcctcttgcgggaggccccggctcggcctgtgggcagtgctccctggacgcagtctttctgcacccgcatccggcgttctgcggacagtggccagagcagcttcaccacagagctttccacccagaccgtcaacttcgggacagtgggggagacggtcacccttcacatctgcccagacagggatggggatgaggcggcacagccctgatgctgctgccatggtggcttggggcagcggggagaaaggagtgtccttgaggcctaggacgctgcccggcctcagcagcagccctgggagcctcctgagggccctccctgtccctggccacgggcccttcttacctcactcaacttcagccaggaggactgggtggtgcttgcaatgttggaatgaccggctcaaagacctcagctctgggctgtttcctgtcagcctggcaggagcctcaggactgtggacgaaggatgtggccttgggcatttgtcctgttcccacatgggcctggtccctccctcctggccccagccacagctgccaggcctgacatggccttgcctctcctgcagtcttggtgactgagacccttgggtggcgcttcccagctctgcaggccctcctggccttttctgcagggtggacacagggtctgtgtgtgggcagcagcccctgtctctcagcaagaataaagcagcttcctgtgcaaaaaaaaaaaaaaaaaaaaaaaaaaaaaa

SEQ ID NO: 56643 - DNA, 1519 bp, Homo Sapiens
acgcgggttaatgaaataaattgtctactatatataggttttgtgtgaacatacaaatgaaatgtactgtctcagaataatgtggttggggaaatatctggagacaaatacaatgcaattgcaacataacagttacacaccagactcttaacaggaataatgtagtgtgatacttgaaagcctaaactctgaaatgagattgcctgagctgagatctcaattcctctaactatgtaaccctgggcgagttacttcaaagtgcctccgttttcttctctgcaaaataaccattgatttgaaatgtggaggattttgaaacctaagctaagaaatgtgggtttgatatgctgaaaaatagggagctacttaaaatttttgaacaagcaagtcacatgatgaaattaattgaggaacattgtatttgtgattgcatatggatggagtgggaggacctagaggcaaagacattagataggagaccaccagaacaaactagacgtgaaaggtgcagctgtggaaatggaaagagatgggcaaaaccaaaaatcaccacagagaaaaaaaatcatccagatttcatgatagattggatgtattttgaaacacctctctccatacaaatgaaataattcagcaaaattctagaaaatgctggtgtaggagctcagtggaaatctcccgtaagtgctgtgagaaattataaattctggggactccagctgatacagtgtgcattcacttacagcttcctttgcccctttgtacactagagcacaacaggaaatattggcttatctctgtaggaagtgtctctataggagttgcttactgaactgaatatctttgtttagaactaattgacctttctaaaacagcatttttaaagagcttactcaaataaggcagactttaaccatctgataagtcagagacaaatcagtcctcttctaagcaaggttgacagtcagtgcaagagaaaagaaagcacagaaagaaaggcaccatcagacaaaagaacagtgtattagtaaaaaccagataattaagaaaattttatttaatgtgaacattgaattctaacacaaatccttttcctgcattatgatagtatctgtgtgaaccaaccttttttcagccctttttgttatggaatgttaagaatgttagtttacaaggttataaagtagaagagtctaattagaaaccagaaaatatctcagtcttttggtctgaatttgttttcctttggttagattcttaaagtagaaaaaaaaaaaactactacttattttgtaaacattttgaggattttgattcagatattttaaattattatgagagataaagaataaccctgtccaaaaaagtaagaaaatgaataaaatttgtttaaaagaggattctcttaaaatataaccaaagggacagattttgacagcagtcttcattgttgttccatatgagtgttttctaaacctaacagatgtaagcaataaataagtaaaaaaaaaaaaaaaaa

SEQ ID NO: 56644 - DNA, 767 bp, Homo Sapiens
gaggatttacaacattttctttcgccatcgatgttatcgcaaaatgtgtgagagaagcggctgcgcagcccggacgggagcgtgagggtgcgggccaggtaagcagccccggcggtttcgccgcatacgggactgcggggcgaccgcgggcaccagccacgcgcagcggctccgcggggtctcggccgggtccgcgctctgaaggatctcgagagccatggatggtgcaggcgggaccctcgagctgcagcatctccggtgacccggggttgccgaggaggtggagaccagcacaggtggtccggcccgggcgcctccgaatccgggggtggtcaagacggatccccaaggctgaggtcggcagtcccggggactcgcagctgttgagcctgtggagacgcggccccgtgaccgaggcacccttcagcaacccgggggcagcgttttccccctaccggaaatctgatgggcttatgacatcatggctggctgctgagcgatgaagtggatgccacaaagaaatccgacatatcagatagattctgaaatcggtttccctccagctgtagtaacaggcgtgaagtcaggagaatttgagctttgtttaaaaaataaataaataaataaataaaccataacaaagtcttgccctgtattaaatgcaattttcttaaaaacaagcaaaccttttggacatcattttattttaatagaaatgctgagttttatgaaactaaagtggctaataaatcagacctgaagctttg

SEQ ID NO: 56645 - DNA, 1772 bp, Homo Sapiens
ggtggtggcagaggcgcctgcggttactggccgggccgacgggtcctgagtctccagagctcggtgaggcgtcccggaggcggcgatcacggttcttacatccccgcgtccccaggtttagcctgagcagggttgtggaaggccgggacccattgacagcacgatggtgacggagcaggaggtggatgccatcgggcagacgctggtggaccccaagcagcccctgcaggcccgcttccgggcgctgttcacgctgcgtgggctcggcggcccaggcgccattgcatggatcagccaggccttcgatgacgattccgccctgctcaagcacgagctggcctactgcctgggccagatgcaggatgcccgcgccatccccatgctggtggacgtgctgcaagacacccgtcaggagcccatggtgcgccatgaggcaggggaggccctgggggccatcggggacccggaagttctggagatcctgaagcagtattcctcggaccccgtcatcgaggtggccgagacctgccagctggccgtgcgcaggctggagtggctgcagcagcacggcggggagccggcggcgggaccctacctctccgtggaccctgccccgccggctgaggagcgtgacgtggggcgcctgcgggaggcgctgctggatgagtcccggccgctcttcgagcgataccgcgccatgttcgccctgcgcaacgcgggaggcgaggaggccgccctggcgctggccgagggtctgcactgtgggagcgccctcttccgccacgaggtcggctacgtcctgggacagctgcagcacgaggcggcggtgccccagctggcggccgccctggcccgatgcaccgagaaccccatggtgcggcacgagtgcgcggaggccctgggcgccattgcccggcccgcctgcctggccgcgctgcaggctcacgcggacgacccagagcgcgtggtgcgtgagagctgcgaggtggctctggacatgtatgagcacgagaccgggcgggccttccagtacgcggacggcctggagcagctgcgcggggccccctcctagggccccaccctcacccggagctcccggaggactcttgagggccgctcctcccccgcagagctttggcgtctaaaccgggtgtgtgtaaatcggtgtcatcgcttgtgtcttgctgggcgcacggttgctgtccccctcctccgtctgggaccgaggagctgccgttgtgctgtgactccctgagtcccctgactgctcctcggggcctggcgcagggctgtagcgtggaagtttccaggcttggggtgggactctgcgggaggctctgggatgcccggctcaggacaggggaggattgcgagggaagccaggggaggatcgcgagggaagccaggggaggatcgcgagggaagccaggggaggatcgcgagggaagccaggggaggatcgcgagggaagccaagggaggatcgcgaggggagccaggggaggatcgcgagggaagccaggggcagagctggggctctgggaagaggctgacgttatggtggcttcagcttcactaggaatgggacacagggtctgggggcctctgactcccccaccccgaggcctgggtagggacagggtggtggtccctgggtgggtcaggtagggcacaggggccagggagggacaagcagacctcagagcgctgcccagatggaatattaaattatttttgccaaaacaaaaaaaaaaaaaaaaaaaaaaaaaaaaa

SEQ ID NO: 56646 - DNA, 699 bp, Homo Sapiens
atagtgatgccgtatccactgagactccggatcctaacagctggaagctaaaaacaggcgccatggagtacacagggagcaaatatatcggggaatatgtagatgggaggatggagggcaaagccaagtacatcctccctaccgaaacaatatatgttggggaaatgaaggatggcatgtttcacggcgagggagccctgtacttccccagcggaagccaatacgacgccatttgggaaaacggattggccataaagggcacatatacgttctcagatgggctgcactatgatgagaaaaactggcattactgcgacggctatgatcggaggttttacacagagatcctcaatggcttgaagcctgcaggtatggctcaactcaccaatatggacccacctagaaaaatccccaagggctattacgattgtggagacggcttctataacccagtcacgagggtagtcaaggactataggaaccgctttctaagaaacgcagatgatgacgagcatgagtggatcacccgtacctgtcgaaagggctaggatgagatcgtgggtcacaggcccgagccgtgaactctgtggctgcctccaccagaggtttccatctgccctactagcattggctgccctgggggacgggctgtagttctagaacctgattttaactcaggaataaagactttctgcggtc

SEQ ID NO: 56647 - DNA, 10935 bp, Homo Sapiens
cgccccccctgcgcccgcccctcccccttcgctttccttctccccccgcctcggctccgacatgaggggccggcggggcaggccgcccaagcagcccgcggctcccgctgcggagcgctgcgccccggccccgccgccaccgccgccgccgcccacgtccggacccatcggggggctccgctcgcggcaccgcggcagcagccggggcaggtgggccgccgcccaggctgaggtggcgcccaagacgcggctgagctcgcccagggggggcagcagtagccggaggaagccgccgccgccgccgccggccccccccagcaccagcgccccgggccggggggggcgaggaggcgggggcggcaggacggggggcgggggcggcggcggccacctggcccggaccaccgcggcccggagggccgtcaacaaagtggtgtacgatgaccacgagagcgaggaggaggaggaagaggaggacatggtctccgaggaggaggaggaggaggacggcgacgccgaggagacccaggattctgaggacgacgaggaggatgagatggaagaggacgacgatgactccgattatccggaggagatggaagacgacgacgacgacgccagttactgcacggaaagcagcttcaggagccatagtacctacagcagcactccaggtaggcgaaaaccaagagtacatcggcctcgttctcctatattggaagaaaaagacatcccgccccttgaatttcccaagtcctctgaggatttaatggtgcctaatgagcatataatgaatgtcattgccatttacgaggtactgcggaactttggcactgttttgagattatctccttttcgctttgaggacttttgtgcagctctggtgagccaagagcagtgcacactcatggcagagatgcatgttgtgcttttgaaagcagttctgcgtgaagaagacacttccaatactacctttggacctgctgatctgaaagatagcgttaattccacactgtatttcatagatgggatgacgtggccagaggtgctgcgggtgtactgtgagagtgataaggagtaccatcacgttcttccttaccaagaggcagaggactacccatatggaccagtagagaacaagatcaaagttctacagtttctagtcgatcagtttcttacaacaaatattgctcgagaggaattgatgtctgaaggggtgatacagtatgatgaccattgtagggtttgtcacaaacttggggatttgctttgctgtgagacatgttcagcagtataccatttggaatgtgtgaagccacctcttgaggaggtgccagaggacgagtggcagtgtgaagtctgtgtagcacacaaggtgcctggtgtgactgactgtgttgctgaaatccaaaaaaataaaccatatattcgacatgaacctattggatatgatagaagtcggaggaaatactggttcttgaaccgaagactcataatagaagaagatacagaaaatgaaaatgaaaagaaaatttggtattacagcacaaaggtccaacttgcagaattaattgactgtctagacaaagattattgggaagcagaactctgcaaaattctagaagaaatgcgtgaagaaatccaccgacacatggacataactgaagacctgaccaataaggctcggggcagtaacaaatcctttctggcggcagctaatgaagaaattttggaatccataagagccaaaaagggagacattgataatgttaaaagcccagaagaaacagaaaaagacaagaatgagactgagaatgactctaaagatgctgagaaaaacagagaagaatttgaagaccagtcccttgaaaaagacagtgacgacaaaacaccagatgatgaccctgagcaaggaaaatctgaggtaggtgatttcaaatcggagaagtccaacggggagctaagtgaatctcctggagctggaaaaggagcatctggctcaactcgaatcatcaccagattgcggaatccagatagcaaacttagtcagctgaagagccagcaggtggcagccgctgcacatgaagcaaataaattatttaaggagggcaaagaggtactggtagttaactctcaaggagaaatttcacggttgagcaccaaaaaggaagtgatcatgaaaggaaatatcaacaattattttaaattgggtcaagaagggaagtatcgcgtctaccacaatcaatactccaccaattcatttgctttgaataagcaccagcacagagaagaccatgataagagaaggcatcttgcacataagttctgtctgactccagcaggagagttcaaatggaacggttctgtccatgggtccaaagttcttaccatatctactctgagactgactatcacccaattagaaaacaacatcccttcatcctttcttcatcccaactgggcatcacatagggcaaattggatcaaggcagttcagatgtgtagcaaacccagagaatttgcattggctttagccattttggagtgtgcagttaaaccagttgtgatgctaccaatatggcgagaatctttaggacataccaggttacaccggatgacatcaattgaaagagaagaaaaggagaaagtcaaaaaaaaagagaagaaacaggaagaagaagaaacgatgcagcaagcgacatgggtaaaatacacatttccagttaagcatcaggtttggaaacaaaaaggtgaagagtacagagtgacaggatatggtggttggagctggattagtaaaactcatgtttataggtttgttcctaaattgccaggcaatactaatgtgaattacagaaagtcgttagaaggaaccaaaaataatatggatgaaaatatggatgagtcagataaaagaaaatgttcacgaagtccaaaaaaaataaaaatagagcctgattctgaaaaagatgaggtaaaaggttcagatgctgcaaaaggagcagaccaaaatgaaatggatatctcaaagattactgagaagaaggaccaagatgtgaaggagctcttagattctgacagtgataaaccctgcaaggaagaaccaatggaagtagacgatgacatgaaaacagagtcacatgtaaattgtcaggagagttctcaagtagatgtggtcaatgttagtgagggttttcatctaaggactagttacaaaaagaaaacaaaatcatccaaactagatggacttcttgaaaggagaattaaacagtttacactggaagaaaaacagcgactcgaaaaaatcaagttggagggtggaattaagggtataggaaagacttctacaaattcttcaaaaaatctctctgaatcaccagtaataacgaaagcaaaagaagggtgtcagagtgactcgatgagacaagaacagagcccaaatgcaaataatgatcaacctgaggacttgattcagggatgttcagaaagtgattcctcagttcttagaatgagtgatcctagtcataccacaaacaaactttatccaaaagatcgagtgttagatgatgtctccattcggagcccagaaacaaaatgtccgaaacaaaattccattgaaaatgacatagaagaaaaagtctctgaccttgccagtagaggccaggaacccagtaagagtaaaacaaaaggaaatgattttttcatcgatgactctaaactagccagtgcagatgatattggtactttgatctgtaagaacaaaaaaccgctcatacaggaggaaagtgacaccattgtttcttcttccaagagtgctttacattcatcagtgcctaaaagtaccaatgacagagatgccacacctctgtcaagagcaatggactttgaaggaaaactgggatgtgactctgaatctaatagcactttggaaaatagttctgataccgtgtctattcaggatagcagtgaagaagatatgattgttcagaatagcaatgaaagcatttctgaacagttcagaactcgagaacaagatgttgaagtcttggagccgttaaagtgtgagttggtttctggtgagtccactggaaactgtgaggacaggctgccggtcaaggggactgaagcaaatggtaaaaaaccaagtcagcagaagaaattagaggagagaccagttaataaatgtagtgatcaaataaagctaaaaaataccactgacaaaaagaataatgaaaatcgagagtctgaaaagaaaggacagagaacaagtacatttcaaataaatggaaaagataataaacccaaaatatatttgaaaggtgaatgcttgaaagaaatttctgagagtagagtagtaagtggtaatgttgaaccaaaggttaataatataaataaaataatccctgagaatgatattaaatcattgactgttaaagaatctgctataaggccattcattaatggtgatgtcatcatggaagattttaatgaaagaaacagctccgaaacaaaatcgcatttgctgagttcttcagatgctgaaggtaactaccgagatagccttgagaccctgccatcaaccaaagagtctgacagtacacagacgaccacaccctcagcatcttgtccagaaagcaattcagttaatcaggtagaagatatggaaatagaaacctcagaagttaagaaagttacttcatcacctattacttctgaagaggaatctaatctcagtaatgactttattgatgaaaatggtctgcccatcaacaaaaatgaaaatgtcaatggagaatctaaaagaaaaaccgtcatcacagaagtcaccacgatgacctccacagtggccacagaatcaaaaactgtgatcaaggtagaaaaaggcgataagcaaactgtggtttcttccacagaaaattgtgcaaaatccactgtcacaaccaccactacaacagtgaccaagctttccacaccctccacaggcggcagtgtggacatcatctctgtaaaggagcagagcaaaaccgtggtcaccacgacagtgacagactccctgaccaccacgggaggcacactggttacatctatgactgtgagcaaagagtattccacacgagacaaagtgaaactgatgaaattttcaagaccaaagaagactcgttcaggtacagctctgccatcctatagaaaatttgttaccaagagcagcaagaagagcatttttgttttgcctaatgatgacttaaaaaagttggcccgaaaaggaggaatccgagaggtcccttattttaattacaatgcaaaacctgctttggatatatggccatatccttctcctagaccgacctttggcatcacttggaggtatagacttcagacagtaaagtccttagctggagtgagcctgatgttacggttactgtgggcaagtttgagatgggatgatatggcggccaaggctcctccaggaggagggactacacggacagaaacatccgaaactgaaatcacaacaacagaaataattaagaggagagatgttggtccttatggcattcgatctgaatattgtatcaggaaaatcatttgtcccattggagttccagaaacaccaaaagaaacgcctacacctcagaggaaaggccttcgatcaagtgcactgcggccaaagagaccagaaacgcccaagcaaactggccctgttattattgaaacctgggtagcagaagaagaactggaattgtgggagatcagggcatttgctgagagagtggagaaagaaaaggcacaagcagttgagcaacaggctaagaaacgactggagcagcagaagccgacagtgattgcaacttccactacttccccaacaagcagtacaaccagcaccatctctccagcacagaaggttatggtggcccccataagtggctcagttacaactggaaccaaaatggtactaactactaaagttggatctccagctacagtaacattccaacaaaacaagaactttcatcaaacctttgctacatgggttaagcaaggccagtcaaattcaggcgttgttcaagtacagcagaaagtcctgggtatcattccatcaagtacaggtaccagtcagcaaacctttacttcattccagcccaggacagcaacagtcacaattaggcccaatacctcaggctctggaggaaccacaagcaattcacaagtaatcacagggcctcagattcgccctggtatgaccgtgattagaacaccactccaacagtcaacactaggaaaggcaattattcgaacacctgtgatggtacagccaggtgctcctcagcaagtgatgactcaaatcatcagggggcagcctgtctccactgcagtctccgcccctaacacggtttcctcaacacctgggcagaaaagcttaacttcagcaacgtccacttcaaatatacagtcttcagcctcacaaccccctcgcccccaacaaggacaagtgaagctcaccatggctcaacttactcagttaacacagggccacggtggcaatcaaggtttgacagtagtaattcaaggacaaggtcaaactactggacagttgcagttgatacctcaaggggtgactgtactcccaggcccaggccagcagctaatgcaagctgcaatgccaaatggtactgttcagcgattcctctttaccccattggcaacaacagccaccacagccagcaccaccaccaccactgtttccacgacagcagcaggtacaggtgaacaaaggcagagtaaactgtcaccccagatgcaggtacatcaagacaaaaccctgccaccagctcagtcatcaagtgtgggtccagcagaagcccagccacagactgctcagccttcagctcagccccagccccaaacccagccccagtccccagctcagcctgaagttcagactcagcctgaagttcagacccaaacaactgtttcatcccatgtcccttctgaagcacaacccacccacgcacagtcatccaagccccaagttgcagcacagtctcagcctcaaagtaatgtccaaggacagtctcctgttcgtgtccaaagtccatcacagactcgaatacgtccatcaactccatcccaactgtctcctggacaacaatcccaggttcagactacaacctcacaaccgattccaattcaaccacatacatctcttcagataccttcccaaggccagccacagtcacaaccccaggtacagtcttcaactcaaactctttcatcaggacaaactttaaatcaagttactgtttcatccccatcccgtcctcagctacaaatacagcagccacagccccaagtcattgctgtgcctcagctgcaacaacaagtccaggttctctctcagatccagtcacaggttgtggctcagatacaggctcagcaaagtggtgtgccccagcaaatcaaactccagttacctatccaaattcagcaaagcagtgctgtgcagactcaccagattcagaatgtggttacagtgcaggcagccagtgtgcaagagcagttgcaaagggttcagcaactcagggatcagcagcaaaagaagaaacagcaacagatagaaattaagcgtgaacacaccctccaagcttctaatcaaagtgaaatcattcagaaacaggtggtgatgaagcataatgctgtaatagaacatttaaaacagaaaaagagcatgactccagctgaaagagaagagaatcaaagaatgattgtctgtaaccaggtgatgaagtatattttggataagatagataaagaagaaaaacaggcagcaaaaaaacggaagcgtgaagagagtgtggagcagaaacgtagcaagcagaatgccactaagctgtcagctctgctcttcaagcacaaagagcagctcagagccgagatcctgaagaagagagcactcctggacaaggatctgcaaattgaagtgcaggaagagctgaagagagacctgaaaattaagaaagaaaaagacctgatgcagttggctcaggccacagcagtagctgcaccctgccccccagtgacaccagctcctccagcccctccagcccctccaccttcacctccccctccacctgctgtgcaacacacaggccttctgtccacgcccaccttacctgctgcttcccagaagaggaagcgggaagaggaaaaagactccagctcaaagtccaagaaaaagaaaatgatctctactacctcaaaggaaactaagaaggacacaaagctttactgtatctgtaaaacgccttatgatgaatctaaattttatattggctgtgatcggtgtcagaattggtaccatgggcgctgcgttggcatcttgcaaagtgaggcagagctcattgatgagtatgtctgtccacagtgccagtcaacagaggatgccatgacagtgctcacgccactaacagagaaggattatgaggggttgaagagggtgctccgttccttacaggcccataagatggcctggcctttccttgaaccagtagaccctaatgatgcaccagattattatggtgttattaaggaacctatggaccttgccaccatggaagaaagagtacaaagacgatattatgaaaagctgacggaatttgtggcagatatgaccaaaatttttgataactgtcgttactacaatccaagtgactccccattttaccagtgtgcagaagttctcgaatcattctttgtacagaaattgaaaggcttcaaagctagcaggtctcataacaacaaactgcagtctacagcttcttaaagttcagcgtgttaacctaacataaaacacagcaagaatctggttgtctgaactattttaaattaaggagccagatgtttttagtcaggctatcctgacaagacttgacctaaacttcgtttttattggtcataacagtccaattatattcttggccaattttgtccaacggacaagaaaaaagcaaagtcaacgacaccattatcttgtcaagatcagatggttttactattgtggcagaagcgagaaaactttgtttattgaaaaaaaaagaaaaagaaagcaagaaaaaaagatactatggggtcaagtgtaactccatggaaatgccacgtctgctcttcagtgaagaagctggtttagagtctcacagaaaacttttgactgtatttatttattgttgcaaaaaagacgcttttttattgctgccctcatttgtcagctaattattttttcttataaaatccagccccggttacatataatcatctgtatcttatcatgattcctgtaggtaaaagtacaagacgacctctagatgtcttttctttctatgaaaggagctgctatgtacacatgtgcacacacacacaactgggaatcaacaatgagtttattgttcatggtagattaaaattaagcttgcataaaggttgggctaagtggtcctggactacagactctgttgccttgaatataacagtacaatttgtcaattactctgcaccaggctaaaatgagtaaaatctatttgaaggtatcttgtttgtaaacatttgtcagattctaatttttttcttttgtattaaaattcaactatggatgtatatgaaacaaaataaatggagataatttttctcccacagacagaggtgtctttgaatgtgcgctaatgattatctgtaagcctttgtggggagggaggcctgcaaggtcatgaaaggcagaagagtctaattgtgcctggatttctccaggacagcagtggcccctcgttttatcattcccagtccattgtcatcacgtcagagaaaaatcttcaggggtgctaatcctgttgcatcagttgatcatactaacgagaacggtaatgcgacaagatacacattgccttcatctgtacattctgtgataccaggcaaattaccaattacacacagctacttatattttatgaagggcattttttagatgacctcatcctctgtgttatttgttgattgggtttgttttctgtttgttggtttgtttgtttcttccacgtaaggaaaagtagtgtaaacagtagcgagaaaatggaaaccacagaggaagatgtattttgcatgtttttcctttcagtgttcttacacgttgtatcactgcattgtggtaatagcttctataaaatctgccatagttggattatgcagctttgcaaaaatttttactagattttgcactaactcatattagctttgtcctaccaacttctggaatttatctaattattgtttttcaaagtttctttccttttaatgtttccctgctatgcaaaacctttcccagacctcagtttcttaaaagaaagatgttgctacagttcccgattctttcttattacaggctcaggtgtacaggttattctgggttaattttatctaatgaagcccattcctttttgtacataaagatgtcacttaaacttatgcttacaaactaaagactaatcgctcaatatgaaaacatgaaaaaatttttgcttaaagtattaagatggaagtagttaaatatgggttattttgtccttttacttttttaaaaaatgttacatattgtatgcactgtgctgatgcaagaattctacattttaatgaattataaaattattctgcatctcatcacgtcacagtatttctgtactatttattcatatatataaatatatatgggcttaatcatttaaaatttgttgcagcaagaactttcctacctgtaggcaatagattgctatgtttttaacaaattgtggcaaattctaaacagcaattcttttgtacgtaataggacatttcatcctagaaaaataaagtaatgtttttgacattgaaaaaaaaaaaaaaaaaaaaaaa

SEQ ID NO: 56648 - DNA, 7686 bp, Homo Sapiens
tttatagcagcagcagaaatataccaccctagaggacacacctccttttagctaggtacctataaatgtccaggattttctattcaattgagaagaacccagcaaaatggggatctccacagtcatccttgaaatgtgtcttttatggggacaagttctatctacaggtgggtggatcccaaggactacagactacgcttcactgattccctcggaggtgcccttggatcaaactgtagcagaaggttctccatttccctcggagtcgaccctggagtcaactgcagcagaaggttctccgatttccttggagtcaaccctggagtcaactgtagcagaaggttctctgattccctcagagtcaaccctggagtcaactgtagcagaaggatctgattctggtttggccctgaggctggtgaatggagatggcaggtgtcagggccgagtggagatcctataccgaggctcctggggcaccgtgtgtgatgacagctgggacaccaatgatgccaacgtggtctgtaggcagctgggttgtggctgggccatgtcagctccaggaaatgcctggtttggccagggctcaggacccattgccctggatgatgtgcgctgctcaggacacgaatcctacctgtggagctgcccccacaatggctggctctcccataactgtggccatggtgaagatgctggtgttatctgctcagctgcccagcctcagtcaacactcaggccagaaagttggcctgtcaggatatcaccacctgtacccacagaaggatctgaatccagtttggccctgaggctggtgaatggaggcgacaggtgtcgaggccgagtggaggtcctataccgaggctcctggggcaccgtgtgtgatgactactgggacaccaatgatgccaatgtggtctgcaggcagctgggctgtggctgggccatgtcagccccaggaaatgcccagtttggccagggctcaggacccattgtcctggatgatgtgcgctgctcaggacacgagtcctacctgtggagctgcccccacaatggctggctcacccacaactgtggccatagtgaagacgctggtgtcatctgctcagctccccagtcccggccgacacccagcccagatacttggccgacctcacatgcatcaacagcaggacctgaatccagtttggccctgaggctggtgaatggaggtgacaggtgtcagggccgagtggaggtcctataccgaggctcctggggcaccgtgtgtgatgatagctgggacaccagtgacgccaatgtggtctgccggcagctgggctgtggctgggccacgtcagccccaggaaatgcccggtttggccagggttcaggacccattgtcctggatgacgtgcgctgctcaggctatgagtcctacctgtggagctgcccccacaatggctggctctcccataactgtcagcacagtgaagacgctggtgtcatctgctcagctgcccactcctggtcgacgcccagtccagacacgttgccgaccatcaccttacctgcatcgacagtaggatctgaatccagtttggccctgaggctggtgaatggaggtgacaggtgtcagggccgagtggaggtcctataccgaggctcctggggcaccgtgtgtgatgacagctgggacaccaatgatgccaatgtggtctgcaggcagctgggctgtggctgggccatgttggccccaggaaatgcccggtttggtcagggctcaggacccattgtcctggatgacgtgcgctgctcagggaatgagtcctacttgtggagctgcccccacaatggctggctctcccataactgtggccatagtgaagacgctggtgtcatctgctcaggacctgaatccagtttggccctgaggctggtgaatggaggtgacaggtgtcagggccgagtggaggtcctataccgaggctcttggggcaccgtgtgtgatgacagctgggacaccaatgatgccaatgtggtctgcaggcagctgggctgtggctgggccatgtcagccccaggaaatgcccggtttggtcagggctcaggacccattgtcctggatgatgtgcgctgctcaggacatgagtcctacctgtggagctgccccaacaatggctggctctcccacaactgtggccatcatgaagatgctggtgtcatctgctcagctgcccagtcccggtcgacgcccaggccagacacgttgtcgaccatcacgttacctccatcgacagtaggatctgaatccagtttgaccctgaggctggtgaatggaagtgacaggtgtcagggccgagtagaggtcctataccgaggctcctggggcaccgtgtgtgatgacagctgggataccaatgatgccaatgtggtctgcaggcagctgggctgtggctgggccatgtcagccccaggaaatgcccggtttggccagggctcaggacccattgttctggatgatgtgcgctgctcaggacacgagtcctacctgtggagctgcccccacaatggctggctctcccacaactgtggccatcatgaagatgctggtgtcatctgctcagtttcccagtcccggccgacacccagtccagatacttggccgacctcacatgcatcaacagcaggatctgaatccagtttggccctgaggctggtgaatggaggtgacaggtgtcagggccgagtggaggtcctataccgaggctcctggggcaccgtgtgtgatgatagctgggacaccagtgacgccaatgtggtctgccggcagctgggctgtggctgggccacgtcagccccaggaaatgcccggtttggccagggttcaggacccattgtcctggatgacgtgcgctgctcaggctatgagtcctacctgtggagctgcccccacaatggctggctctcccataactgtcagcacagtgaagacgctggtgtcatctgctcagctgcccactcctggtcgacgcccagtccagacacattgccgaccatcaccttgcctgcatcgacagtaggatctgaatccagtttggccctgaggctggtgaatggaggtgacaggtgtcagggccgagtggaggtcctataccaaggctcctggggcaccgtgtgcgatgacagctgggacaccaatgatgccaatgtcgtctgcaggcaaccgggctgtggctgggccatgtcagccccaggaaatgcccggtttggtcagggctcaggacccattgtcctggatgatgtgcgctgctcaggacacgagtcttacccgtggagctgcccccacaatggctggctctcccacaactgtggccatagtgaagacgctggtgtcatctgctcagcttcccagtcccggccaacacctagtccagacacttggccaacctcacatgcatcaacagcaggatctgaatccagtttggccctgaggctggtgaatggaggtgacaggtgtcagggccgagtggaggtcctataccgaggctcctggggcaccgtgtgtgatgactactgggacaccaatgatgccaatgtggtttgcaggcagctgggctgtggctgggccatgtcagccccaggaaatgcccggtttggccagggttcaggacccattgtcctggatgatgtgcgctgctcaggacatgagtcctatctgtggagctgcccccacaatggctggctctcccacaactgtggccatcatgaagacgctggtgtcatctgctcagcttcccagtcccagccgacacccagcccagacacttggccaacctcacatgcatcaacagcaggatctgaatccagtttggccctgaggctggtgaatggaggtgacaggtgtcagggccgagtggaggtcctataccgaggctcctggggcaccgtgtgtgatgactactgggacaccaatgatgccaatgtggtttgcaggcagctgggctgtggctgggccacgtcagccccaggaaatgcccggtttggccagggttcaggacccattgtcctggatgatgtgcgctgctcaggacatgagtcctatctgtggagctgcccccacaatggctggctctcccacaactgtggccatcatgaagacgctggtgtcatctgctcagcttcccagtcccagccgacacccagcccagacacttggccaacctcacatgcatcaacagcaggatctgaatccagtttggccctgaggctggtgaatggaggtgacaggtgtcagggccgagtggaggtcctataccgaggctcctggggcaccgtgtgtgatgactactgggacaccaatgatgccaatgtggtttgcaggcagctgggctgtggctgggccacgtcagccccaggaaatgcccggtttggccagggttcaggacccattgtcctggatgatgtgcgctgctcaggacatgagtcctatctgtggagctgcccccacaatggctggctctcccacaactgtggccatcatgaagacgctggtgtcatctgctcagcttcccagtcccagccgacacccagcccagacacttggccaacctctcgtgcatcaacagcaggatctgaatccactttggccctgagactggtgaatggaggtgacaggtgtcgaggccgagtggaggtcctataccaaggctcctggggcaccgtgtgtgatgactactgggacaccaatgatgccaacgtggtctgcaggcagctgggctgtggctgggccatgtcagccccaggaaatgcccagtttggccagggctcaggacccattgtcctggatgatgtgcgctgctcaggacacgagtcttacctgtggagctgcccccacaatggctggctctcccacaactgtggccatcatgaagatgctggtgtcatctgctcagctgctcagtcccagtcaacgcccaggccagatacttggctgaccaccaacttaccggcattgacagtaggatctgaatccagtttggctctgaggctggtgaatggaggtgacaggtgtcgaggccgagtggaggtcctgtatcgaggctcctggggaaccgtgtgtgatgacagctgggacaccaatgatgccaatgtggtctgcaggcagctgggctgtggctgggccatgtcggccccaggaaatgcccggtttggccagggctcaggacccattgtcctggatgatgtgcgctgctcagggaatgagtcctacctgtggagctgcccccacaaaggctggctcacccacaactgtggccatcacgaagacgctggtgtcatctgctcagccacccaaataaattctactacgacagattggtggcatccaacaactacaaccactgcaagaccctcttcaaattgtggtggcttcttattctatgccagtgggacattctccagcccatcctaccctgcatactaccccaacaatgctaagtgtgtttgggaaatagaagtgaattctggttatcgcataaacctgggcttcagtaatctgaaattggaggcacaccataactgcagttttgattatgttgaaatctttgatggatcattgaatagcagtctcctgctggggaaaatctgtaatgataccaggcaaatatttacatcttcttacaaccgaatgaccattcactttcgaagtgacatcagtttccaaaacactggctttttggcttggtataactccttcccaagcgatgccaccttgaggttggtcaatttaaattcatcctatggtctatgtgccgggcgtgtagaaatttaccatggtggcacctgggggacagtttgtgatgactcctggaccattcaggaagctgaggtggtctgcagacagctagggtgtggacgtgcagtttcagcccttggaaatgcatattttggctctggctctggccccatcaccctggacgatgtagagtgctcagggacggaatccactctctggcagtgccggaaccgaggctggttctcccacaactgtaatcatcgtgaagatgctggtgtcatctgctcaggaaaccatctatcgacacctgctccttttctcaacatcacccgtccaaacacagattattcctgcggaggcttcctatcccaaccatcaggggacttttccagcccattctatcccgggaactatccaaacaatgccaagtgtgtgtgggacattgaggtgcaaaacaactaccgtgtgactgtgatcttcagagatgtccagcttgaaggtggctgcaactatgattatattgaagttttcgatggcccctaccgcagttcccctctcattgctcgagtttgtgatggggccagaggctccttcacttcttcctccaacttcatgtccattcgcttcatcagtgaccacagcatcacaaggagagggttccgggctgagtactactccagtccctccaatgacagcaccaacctgctctgtctgccaaatcacatgcaagccagtgtgagcaggagctatctccaatccttgggcttttctgccagtgaccttgtcatttccacctggaatggatactacgagtgtcggccccagataacgccgaacctggtgatattcacaattccctactcaggctgcggcaccttcaagcaggcagacaatgacaccatcgactattccaacttcctcacagcagctgtctcaggtggcatcatcaagaggaggacagacctccgtattcacgtcagctgcagaatgcttcagaacacctgggtcgacaccatgtacattgctaatgacaccatccacgttgctaataacaccatccaggtcgaggaagtccagtatggcaattttgacgtgaacatttccttttatacttcctcatctttcttgtatcctgtgaccagccgcccttactacgtggacctgaaccaggacttgtacgttcaggctgaaatcctccattctgatgctgtactgaccttgtttgtggacacctgcgtggcatcaccatactccaatgacttcacgtctttgacttatgatctaatccggagtggatgcgtgagggatgacacctacggaccctactcctcgccgtctcttcgcattgcccgcttccggttcagggccttccacttcctgaaccgcttcccctccgtgtacctgcgttgtaaaatggtggtgtgcagagcgtatgacccctcttcccgctgctaccgaggctgtgtgttgaggtcgaagagggatgtgggctcctaccaggaaaaggtggacgtcgtcctgggtcccatccagctgcagacccccccacgccgagaagaggagcctcggtaggtggtcgctctcagaccccactgtccaccggggcgcagacccctgactcggggacttgggatgttcctcttggtgtcatattccaactcagattgagccctacattgtgctgcacctggtcatacggagttgaatcagacctggttcccgcctcccccaaggctcatggtccttggaggacccgttgcagggcgaggtcaagagagttctgacctggatggcccatagacctgacgtcccagaatccatgcttctcatctgcaaaatgaaaatgtcaatacttacttcttagcactgttgagagggttacttacataaaggaattttggtgaaactgc

SEQ ID NO: 56649 - DNA, 3063 bp, Homo Sapiens
ccatctgagcgagaagagcagacaccgtgctcctggaatcacccagcatgttgcaaggtctcctgccagtcagtctcctcctctctgttgcagtaagtgctataaaagaactccctggggtgaagaagtatgaagtggtttatcctataagacttcatccactgcataaaagagaggccaaagagccagagcaacaggaacaatttgaaactgaattaaagtataaaatgacaattaatggaaaaattgcagtgctttatttgaaaaaaaacaagaacctccttgcaccaggctacacggaaacatattataattccactggaaaggagatcaccacaagcccacaaattatggatgattgttattatcaaggacatattcttaatgaaaaggtttctgacgctagcatcagcacatgtaggggtctaaggggctacttcagtcagggggatcaaagatactttattgaacctttaagccccatacatcgggatggacaggagcatgcactcttcaagtataaccctgatgaaaagaattatgacagcacctgtgggatggatggtgtgttgtgggcccacgatttgcagcagaacattgccctacctgccaccaaactagtaaaattgaaagacaggaaggttcaggaacatgagaaatacatagaatattatttggtcctggataatggtgagtttaaaaggtacaatgagaatcaagatgagatcagaaagagggtatttgagatggctaattatgtcaacatgctttataaaaagctcaatactcatgtggccttagttggtatggaaatctggactgacaaggataagataaagataaccccaaatgcaagcttcaccttggagaatttttctaaatggagggggagtgttctctcaagaagaaagcgtcatgatattgctcagttaatcacagcaacagaacttgctggaacgactgtgggtcttgcatttatgtctacaatgtgttctccttattctgttggcgttgttcaggaccacagcgataatcttcttagagttgcagggacaatggcacatgaaatgggccacaactttggaatgtttcatgacgactattcttgcaagtgtccttctacaatatgtgtgatggacaaagcactgagcttctatatacccacagacttcagttcctgcagccgtctcagctatgacaagttttttgaagataaattatcaaattgcctctttaatgctccattgcctacagatatcatatccactccaatttgtgggaaccagttggtggaaatgggagaggactgtgattgtgggacatctgaggaatgtaccaatatttgctgtgatgctaagacatgtaaaatcaaagcaacttttcaatgtgcattaggagaatgttgtgaaaaatgccaatttaaaaaggctgggatggtgtgcagaccagcaaaagatgagtgcgacctgcctgaaatgtgtaatggtaaatctggtaattgtcctgatgatagattccaagtcaatggcttcccttgccatcacgggaagggccactgcttgatggggacatgccccacactgcaggagcagtgcacagagctgtggggaccaggaactgaggttgcagataagtcatgttacaacaggaatgaaggtgggtcaaagtacgggtactgtcgcagagtggatgacacactcattccctgcaaagcaaatgataccatgtgtgggaagttgttctgtcaaggtgggtcggataatttgccctggaaaggacggatagtgactttcctgacatgtaaaacatttgatcctgaagacacaagtcaagaaataggcatggtggccaatggaactaagtgtggcgataacaaggtttgcattaatgcagaatgtgtggatattgagaaagcctacaaatcaaccaattgctcatctaagtgcaaaggacatgctgtgtgtgaccatgagctccagtgtcaatgtgaggaaggatggatccctcccgactgcgatgactcctcagtggtcttccacttctccattgtggttggggtgctgttcccaatggcggtcatttttgtggtggttgctatggtaatccggcaccagagctccagagaaaagcagaagaaagatcagaggccactatctaccactggcaccaggccacacaaacagaagaggaaaccccagatggtaaaggctgttcaaccccaagagatgagtcagatgaagccccatgtgtatgatctgccagtagaaggcaatgagcccccagcctcttttcataaagacacaaacgcacttccccctactgttttcaaggataatccaatgtctacacctaaggactcaaatccaaaagcatgaagcaacagctaagcaagaactaatggctaaattatcaacttggaaaactggaaaatctggatggcagagaaatatactatctatctcaccagtatttgctctcgactcaagaaggttaacattttctgattcatgttagactttgaagagactaaagaaaattttcaagaggaacatatgcctgagaacctttgcatgaatttaaaatttcaattatccattcttataagaaggaagatgattgtaaagaaatatctccgaagttaaaatctgtaataggaattgattcattctctaatgaaaacaaaacataaaaacatcacactaatcttggaggaataagaaaaattgtacatccattaaatgtacaattgattgcaacatcttgattgttttaaccattaacttgtcaaattacaatcacagttaagaaaatgatgtaaaattctgttttgtggatctctttcctagattagcttctgaaatcattattagctatatcatttgaggttttctacaatttggtataactaagaatttaaaaatgttttatcatatatatttgtataattaattactggcatggttaaagtggttttcactttttaaatggagaaaatttcagttaaattaataggataaaccaggttgcgaactggtgacctgtaggccatgtttgcactgcaaa

SEQ ID NO: 56650 - DNA, 2003 bp, Homo Sapiens
gctcgtccgagtacatgtgagcggtaatcgcccctgcagctggttatcctgacattatgcactccgaagcagaagaatccaaggaaggcctaggcttaaacactggcatatatggagagaacagttgccactcgactcagagattgagtagacacccaaagaactgcagttcttaagccttaggagaagcgagagaaatggcagtggccacagatgtctttaattccaaaaacctggccgttcaggcacaaaagaagatcttgggtaaaatggtgtccaaatccatcgccaccaccttaatagacgacacaagtagtgaggtgctggatgagctctacagagtgaccagggagtacacccaaaacaagaaggaggcagagaagatcatcaagaacctcatcaagacagtcatcaagctggccattctttataggaataatcagtttaatcaagatgagctagcattgatggagaaatttaagaagaaagttcatcagcttgctatgaccgtggtcagtttccatcaggtggattatacctttgaccggaatgtgttatccaggctgttaaatgaatgcagagagatgctgcaccaaatcattcagcgccacctcactgccaagtcacatggacgggttaataatgtgtttgatcatttttcagattgtgaatttttggctgccttgtataatccttttgggaattttaaaccccacttacaaaaactatgtgatggtatcaacaaaatgttggatgaagagaacatatgagcacatgagttaagattgtgactgatcatgatttatttgaagatggagcactgctgatttatgaaggaaaaaagaagaattttctaaagattacacatatttcagaaagactttacccaattcagttgtcagacataatgatttatttgaaggcttgttttatttgaagaaaagcatattgccaaaaattctggttaaaagcttcctaacgggtaacagaccatgggagagatatgtggttgggtaatgcaaatgtagttatacaaagaaaaatacagatgtctccagacctgaggactttttaatagggcagttgttgtgttggtggcacattggatatttctaacatgtacaaagctatgtattttgatttactttcatttcttgctatgtatatgtacttttcttaaaatgccaagaactttctcttgctatcattgctccttttgaaacaattcaattttcatgtctacagctgactgttttgttaagattgagtcatcgacattcaggatttaagtctgaggtagtcaaccctcaggaaaaaaaaatggcttatctgaaatcagtactgtggaaatgaactatattagctattatgaataatgtccagtataagaatatgcttctggaattgagttctccttttaagtaccaatgatacttaaatttctcagaaatgtaatggtgtgtcattgccttgaaatgcttgcttagggcttcttttatgttatcttaaaaagtgctggtgaattttccattttttacatccatttcacatgtaagagacacaaaagtctagattggtcttgatattgagataataaaaagtaagtagcattaagaaaggtaacaatcttcattctacagatgaactcattgaaacaatttaggggaatgaggggcaaaaggggagaaatactgctaaagaacatgagcataaaaatgcgtgcgtttcagtgtttaagaaggcttgataaagaatgtcacttttttatttaactgataagatttttgttattttttactttgataagtaaaccaaagaatatttgtatttcaagcagtttgtgtggtgtttctatataattttctgtgtataaataataaagtaggcatttgtttattttgtaaaaaagaaatgaaaatctgctggccagctatgtcctctaggaaatgacagacccaaccaccagcaataaacatttccattgtcaaaaaaaaaaaaaaaaa

SEQ ID NO: 56651 - DNA, 5387 bp, Homo Sapiens
cagtcagttggtctgggcactgcagcaggctcggctctgtcccagcacttgtctgggagaaaagtggtgttactcacccagggagagtctctctttctaccttccttctttctcgatctccttgtgtgcttttgtgtttctttatttcttttccttttttttctttttttttttttgttacttaattatattcctaatcctggatgaagttgctggattctgcagcacaagtcttcatgaacaagcagcaccgctcagagatttcacggcattcaaaggtcacagaactgccactatggttaaatgtcttgtttaatggttgagaggtgtggcgaaatcttgtttgagaaccccgatcagaatgccaaatgtgtttgcatgctgggagatatacgactaaggggtcagacgggggttcgtgctgaacgccgtggctcctacccattcattgacttccgcctacttaacagtacaacatactcaggggagattggcaccaagaaaaaggtgaaaagactattaagctttcaaagatacttccatgcatcaaggctgcttcgtggaattataccacaagcccctctgcacctgctggatgaagactaccttggacaagcaaggcatatgctctccaaagtgggaatgtgggattttgacattttcttgtttgatcgcttgacaaatggaaacagcctggtaacactgttgtgccacctcttcaatacccatggactcattcaccatttcaagttagatatggtgaccttacaccgatttttagtcatggttcaagaagattaccacagccaaaacccgtatcacaatgctgttcacgcagccgacgtcacccaggccatgcactgctacctgaaagagccaaagcttgccagcttcctcacgcctctggacatcatgcttggactgctggctgcagcagcacacgatgtggaccacccaggggtgaaccagccatttttgataaaaactaaccaccatcttgcaaacctatatcagaatatgtctgtgctggagaatcatcactggcgatctacaattggcatgcttcgagaatcaaggcttcttgctcatttgccaaaggaaatgacacaggatattgaacagcagctgggctccttgatcttggcaacagacatcaacaggcagaatgaatttttgaccagattgaaagctcacctccacaataaagacttaagactggaggatgcacaggacaggcactttatgcttcagatcgccttgaagtgtgctgacatttgcaatccttgtagaatctgggagatgagcaagcagtggagtgaaagggtctgtgaagaattctacaggcaaggtgaacttgaacagaaatttgaactggaaatcagtcctctttgtaatcaacagaaagattccatccctagtatacaaattggtttcatgagctacatcgtggagccgctcttccgggaatgggcccatttcacgggtaacagcaccctgtcggagaacatgctgggccacctcgcacacaacaaggcccagtggaagagcctgttgcccaggcagcacagaagcaggggcagcagtggcagcgggcctgaccacgaccacgcaggccaagggactgagagcgaggagcaggaaggcgacagcccctaggggccggcccaacttagacgcggctctcctccggcagggcccccagagggcagaagcagcgtggaggggccctcacgcagcagcccagccactttctgagtgttgtcctggggctctttggaacgccatcttcctcccacttacctgcctcccctccttttcgcaaatgtacagaagccatttgtcacctcagcattcgctgccgaaatgagcaactccattcagtaacgtgggagctgatcccacgggcaggctctccctgctccaggagaagactaggaggaagaatgaggtgctcctgccgtgtccgccttgttccgggtcgcactggaacaggcagcaattcctaagtccggagcgtttgagcgtttgctatctgactgctgatctgcgtgacagaaacaccagcatatttgcaacgccaaggatattggtcttaagtgcaagagcacaaatgagagtgtgagagaaagtaccttctattttaataataatattattataaaaataataaatctttttaacttttatattttatgcactagacaatggatctgcaactttggactaaggtcattcaatgtacccaaacttgaacagggggttcattgttttgctattgactttattatgccactttggggcagagacttggcatcttcgcagtttaagaaaccacgtttcctatccaatccgaagggaaggtgctgtacagttcattcctttgcaccattagccaatctgtcttttatggattctgtgacatgtttatattcacccatgtacattttctgtaaataccaaacgctactgattcccatgccaaaatacatgagtattatgggattgctacctgtataaacaatggcactgtgaaaatactgttagttttaatacaagagaatgcatttgtaaatatggtatagagtttattaatatactattgtttgcagataaaggccttaactttaaacatctttcatcttctgaaagctgcccaacttaaatcctcatagatgtctttctcaactgccttcccatgttcatctgtatgttttccagctaaggtcacaaaccaaaactgaataaagtctttgaggaaacattttggaaacttcacatgcattccgcttgagaccatagtgtttaatctatggcaccaagcatcgtttcctcagattaatgagacccttcaacaagcctgaatcagtcacttttcaacacagcgatgttttaacaagccagctgctaagcttgtgtttatgtgactcttgttacagatcatggcggtgcgtcagcctcacaggagacatagcaggtctcagaaaccttctatgaccctgtcatctaaccatcagggaattccctgctcccatgccacacatttgtctattatggctatagtaccaaagtacttttggtgtttggttggtgtgcatttctttagtgtcgatagtaactggatttttctttttccttaatctcatgtgaacaactacccaactgtttagctgaagttcatattatttaagtaaagaaaatatttcagttttataacagactttaccttcctggcaggtcattgtagttaattatgtctctagcttggagtgtcaccttggaatttcgttgccattttttctcagacacctggccgtaaaatcagtttgttacagcattcttctctaggctgctaaacgctgtgcattgaaccttttctttagaagtttcagcgtaactaatgttagatgaaaattgttgatgcccctttctttttactttaaacaatgtggtagtgggagaatgactgtttctgccactatcaacctgatcctcatgctgatagaatgacagctagcacttatttcctaagtgcaactgttttagagatttttctcctaacatgcaaaggaaatactgattggcctataataagttcctatagggagactgaggcttgcagaattaaggttcaggggaaattttggaaagttggttgtattttcattgaagtaggagagattatcagatggtgctaaagaaagtgtgaagatcttatgaaataggtggatggtaagttgaaattattgatgtgggtaagaagggaggttgtggaaagttaacactagctttgtatttttttttctgtaaaactgtgaactgatatattttcctttatcactttagtattctgcagttctcagcttggtgaggctccaaaagagaatatgtcagatgtattcctacttccaaacctgtcttactttggtttgatggtacacatagggcttttgaacagtctatttttaatgtatatgaggtcaaatcaaggaaggcaattgctggggacaagaaaagtagaggtaggaaagaagacactattttagctaatggggtttcttgggactaaaaaatggctttgtttaaattataattatataataatttaaataaatgagattggaggtattcttagtagttctgagttgatagtttacattacaattaggtcttgaagaagagctcacagagaaaaaactaccaaatatccaatgggtaagcccatgatgtagccactagtacaataaaaatctgaagtaaaatgaggcataaacttgatgcagctgcctccctcattcaactggggagttcttgagttcctcatttgttggtaaaaagaaaaagaatgtgaaaatgtctctttttttcttggctattagtggctgtcttgcaatatttcaataggagtccaattactagttaaaacactggcggggtgcggtggctcacgcctgtaatcctagcactttgggaggccaagttgggcagatcacaagttcaagagatcgagaccattctggccaacatggtgaaaccccgtctctactaaaaatacaaaaattagctgggcatggcagtgcgtgcctgcaatcccagctactcaggaagctgaggcaggagaatcgcttgaacctgggaggtggaagttgtagtgaactgagatcgcaccactgcactccagcctggcaacagagctagaatccgtctcaaacaaacaaacaaaaaatcccacagctattggatcatccacagattttttctttacaatcttgttctccttgtccatggaccatcaatagttgacttgccaggtttaattctttcattgcttgagaagaaaggaatcaaaggactgtgtgtagtaagctgacggtaaagttaagattaaattaagacagagagagaatacatatcactgccaggcctgataggaaaaatctgctcttccttttaataacagtgatgaattgtcaggaccttatttaggaaaccctgacctacccataactccctgctaggctaagtagaaaccaggttatttctccctgcttatggctccccgcaaagggacttgcagcgtgtcctgcaactttgtcttcagatagtgcttcctacaaaactaggtcttgttttgtaatcttttctcgtgttgaatcagatctgcttacttatttaggtttggttatgagcttgtatctcactgtatttctcatgctttgttcttttaaacaaatcctttaaactgtgtcattttgtatacacatgtgaggtttgaaaaaaaaaaaaaaaaaaaaaagaactaccttgtgagttttgctcaaaatgtggcctaagtagccattggcatgtctagatgaacaaataaaaataaagataatttctttaaaata

SEQ ID NO: 56652 - DNA, 1609 bp, Homo Sapiens
ctgttgtaaactttgcctgtaggaggactgatctcttaatgaaatacagaaaaaccatctcagaaaaaggaaaatgggcaatcgtcatagccagtcgtacaccctctcagaaggcagtcaacagttgcctaaaggggactcccaaccctcgacagtcgtgcagcctctcagccacccatcacggaatggagagccagaggccccacagcctgctaaagcgagcagtcctcagggttttgatgtggatcgagatgccaaaaagctgaacaaagcctgcaaaggaatggggaccaatgaagcagccatcattgaaatcttatcgggcaggacatcagatgagaggcaacaaatcaagcaaaagtacaaggcaacgtacggcaaggagctggaggaagtactcaagagtgagctgagtggaaacttcgagaagacagcgttggcccttctggaccgtcccagcgagtacgccgcccggcagctgcagaaggctatgaagggtctgggcacagatgagtccgtcctcattgaggtcctgtgcacgaggaccaataaggaaatcatcgccattaaagaggcctaccaaaggctatttgataggagcctcgaatcagatgtcaaaggtgatacaagtggaaacctaaaaaaaatcctggtgtctctgctgcaggctaatcgcaatgaaggagatgacgtggacaaagatctagctggtcaggatgccaaagatctgtatgatgcaggggaaggccgctggggcactgatgagcttgcgttcaatgaagtcctggccaagaggagctacaagcagttacgagccacctttcaagcctatcaaattctcattggcaaagacatagaagaagccattgaagaagaaacatcaggcgacttgcagaaggcctatttaactctcgtgagatgtgcccaggattgtgaggactattttgctgaacgtctgtacaagtcgatgaagggtgcggggaccgatgaggagacgttgattcgcatagtcgtgaccagggccgaggtggaccttcaggggatcaaagcaaagttccaagagaagtatcagaagtctctctctgacatggttcgctcagatacctccggggacttccggaaactgctagtagccctcttgcactgagccaagccagggcaataggaacacagggtggaaccgcctttgtcaagagcacattccaaatcaaacttgcaaatgagactcccgcacgaaaacccttaagagtcccggattactttcttggcagcttaagtggcgcagccaggccaagctgtgtaagttaagggcagtaacgttaagatgcgtgggcagggcaccttgaactctggcttagcaagcatctaggctgcctcttcactttcttttagcatggtaactggatgttttctaaacactaatgaaatcagcagttgatgaaaaaactatgcatttgtaatggcacatttagaaggatatgcatcacacaagtaaggtacaggaaagacaaaattaaacaatttattaattttccttctgtgtgttcaatttgaaagcctcattgttaattaaagttgtggattatgcctctaaaaaaaaaaaaaaaaa

SEQ ID NO: 56653 - DNA, 1830 bp, Homo Sapiens
ggtcaggagcccgagattcgccgcctgccctcgcccgagcccgggggcccaagctgcggcagcggctcccaacgcctctgctcgaggagagcggcggcctggatgccccagcgccctccctgtccagttccttgaaggcccccaagaggggcgaggccggggaggtgctggagcggggccaagtgagctttcggggccgcggttgaactggagtcttgagtgcgctgcggtcagtggaggcccttccaccctcgccgcgccccgtggggaatagtcccccacctcccgccatggctgcagcaggaggagacgacgtcctccattttgtcgggacaactgtgggaacttgggacccctcaaaaccaaaccccgtggggccaggacttgtcccggaagccccgactgggctctgccattcggacaagggaacagccccagctgccggcgtctgcgtccgcggggcagtactggtcgggcgcgacggtggagacacccagacgcagctccccgcctccatcaaccaagatggagggagctgcaggctcccttggagctgggctctcgcgggttggaggggctgaggcctgccctggggcgtccctgggcgccgccgtcctgtgctagcagcccggggcgctggccctgcctaggcctttttactgcctgccaccgtctcctggtccggaatggttgatggagactccatggaggctccctccacagcccgctctatcgcggggcgcacccgctgcggcccctgcggggagcagaatcagggacagatggcgcccggtgagggcgggccccacaggccacctccacgaggggtcttctcttttgttcctcgtctacacctacgtcttcggcggatgtcatggtgctgaaccatttcccggactccacgtaaagatggaagcgattccgctttcgtctcgccctggcggttcttagtgggattacaattgaggatgttagtttggatgaaagttggtgaaatacttaccttatgtctggaaatacagataatgtgatttttaaaaaacacattgagccccgttttacttctgtggtatggtaaaggcacaggtttattcaatgaaaatcagacgttaaccatctaatgcaggggtggccaatcttttggcttcccggggccacattggaagaattggcttgggccacacataaaatacgctaacagtaacaatagctgatgagctaaaacaaacgaaaaaaccaaaacgccaaaaaaatctcataacgttttaagaaaatttacaaatatgtgttgggctgcattcaaagccgtcctgggccgcatgcaacccccaagggctgcaggttggacaagcttgatctaagacaaaagcatgttcacggattgatgagagttctgtgtaagcctttgcatattgcatagtgctgtatgtcatggatatgcctaatatcacctacattttttaggtcctcagttactctttggaaataagtgaattacatgtaatgtcatcattttaatgactgctgtaaattacaagcactgactaccctgagttcgtggagaagggctccatagagaaaatttgaaggtctgacagaaactttaaatggtaagctcagtagccacttgtcatctattttctgattatctttttcacaattttttggcattgatactgttcaaagattaaaattgggtaacatttctttttcctgatagtggcaggaatgacaggttcatgtcccaatgaaaacgctcacctcagtatgctgccatgatttcgagggttgtcgaaaatttaggaaaaaaaagtcttcattgttcaacaa

SEQ ID NO: 56654 - DNA, 6975 bp, Homo Sapiens
gggagagggaagggggcggagctagccggagccgcgagtccattttggggctgtgcttggcgcgtaccgtgcggtccctgtagttggaggacgggcggtcgcgcggcctttcccactagccggaggtcggagataagtacccgccgcccggctcctctcgggaaagcggggtggtcctcgaaccttcagcgagggtggggagttgcccagtagcctctagttcgttagtcaaaacgtgaaaaaaaagacctgctttgccctgggaaatagtaaccctgccaaatacatcagcttgtaggagacagagaataacagcacctggccgggtgcagtggctcaggcctgtaatcgcagcactttgggaggctgaggtgggcggatcacctgaggtcaggagctcgagaccagcctggccaaaatggatgtgatggagctgcttgaagaagatctcacatgccctatttgttgtagtctgtttgatgatccacgggttttgccttgctcccacaacttctgcaaaaaatgcttagaaggtatcttagaagggagtgtgcggaattccttgtggagaccagctccattcaagtgtcctacatgccgtaaggaaacttcagctactggaattaatagcctgcaggttaattactccctgaagggtattgtggaaaagtataacaagatcaagatctctcccaaaatgccagtatgcaaaggacacttggggcagcctctcaacattttctgcctgactgatatgcagctgatttgtgggatctgtgctactcgtggggagcacaccaaacatgtcttctgttctattgaagatgcctatgctcaggaaagggatgcctttgagtccctcttccagagctttgagacctggcgtcggggagatgctctttctcgcttggataccttggaaactagtaagaggaaatccctacagttactgactaaagattcagataaagtgaaggaattttttgagaagttacaacacacactggatcaaaagaagaatgaaattctgtctgactttgagaccatgaaacttgctgttatgcaagcatatgacccagagatcaacaaactcaacaccatcttgcaggagcaacggatggcctttaacattgctgaggctttcaaagatgtgtcagaacccattgtatttctgcaacagatgcaggagtttagagagaaaatcaaagtaatcaaggaaactcctttacctccctctaatttgcctgcaagccctttaatgaagaactttgataccagtcagtgggaagacataaaactagtcgatgtggataaactttctttgcctcaagacactggcacattcattagcaagattccctggagcttttataagttatttttgctaatccttctgcttggccttgtcattgtctttggtcctaccatgttcctagaatggtcattatttgatgacctggcaacttggaaaggctgtctttcaaacttcagttcctatctgactaaaacagccgatttcatagaacaatcagttttttactgggaacaggtgacagatgggtttttcattttcaatgaaagattcaagaattttactttggtggtactgaacaatgtggcagaatttgtgtgcaaatataaactattataaaatctgtttcaagtatgcagttttcttttgttagaaattgttagagaatagagagtggtaattcagatttggtcaacgattctagtcacatattttcctccaaaagtattccttccaaaaataatctatacatgttcaaattaggtagcataaagataaaagtgaaatttagtagtataggcctgaacctttttttgtttaaaagagtgcttttgaaataagcatccaccccaaatgttggttgtatttatgctgtgataaaaataggtgagagatcatatgatctaatattgtattgatggaagtataggtagtatagtagtgattgttcttcaagcatgcagtaaagatcacttttttttttttttttttttttgagatggagtcttgctctgtcgcccaggctggagtgcagtgatgcaatcttggctcactgcagcctctacctcccaggttcaagtgattatcctgccttagcctcctgagtagctgggattacaggcgcgtgccaccacgcccagctaattttttgtatttttagttgagacagggtttcactgtcccttaagaccatcctgttagccaagatggtcttgatctcctgacctcgtgatccgcctgcctcggcctcccaaagtgctgggattacaggtgtgagccaccgtgcccagccaaagactgctcttaaagcacctttttgacagtgaacatggtctaaaaaagggaagatattgtagaagatttcacacacacacgcgtgtgtgggagacaactaaaggtattgaaggtactaattaattagatttccaaaattttctacagagagttaattatcaccaaaatgtgaatggtacatacaaaacctggcattttcttgtgataagtttacatttttaggagagtggagctttcaatctgcccttttctcctttgtttttgtagttttcaccaaagatgatcaactagaaatgttaagtggctatgcaagcaaaagcatagataggttaaaaaaaaggatcagctggctgggcagggtggctcatgtctataatctcagcattctaggacagtgatgtgggaggattatttgaggctaggagttccagttcgaaaccagcttcgtaaacatagcaagacccagtctctaccaaaaaaaaaaaaaaaaaaaaaaaaaaaaaaaatatatatatatatatacacacacacacacacatatgtacacatacatatatatacatatatatgtatatatagaacacatggcaagagcaggaaatgggaagactaccttttttctggcagctatgtgttgttttgttcgaaagatggcaagtgtacaaccaaaccaatccacttgcttacagaaagaatgtttagtgtagttaagactaatttgacaacagataaaacagtctgtcagctattacaaagtaatcagctgaacactaatgctgttctgtctgctcacaagagataaagataccctctcatggaataaacaccttgcttagaattcatataacaaagaagtaaccttataactgctctctagtctgccttatttgtgtcatagagtaagatattccttgaaagcccattaagtggaatagactttctgaaaataagagttctttacctcagtcctcctctaatttggttgagaggaggtaatgaaaatggggacaggataaaaggtggcaactaaatttaaagcacagaagaaatgatttccttctagctatgagaatagtcaaattgagcttgccaggctgtctcattcctaacatgtaattcatgatttagccactaaatttctaaggagatcataagaaattaagaaaaacgtttaagtctagcctctgcgtggtagacaggtatggggagggagaatgcttttcccctcccagtaataaaaaaaaaaaaaaaaaaaatatatatatatatatatatatatatatatatatatatatatatatatatatatatagttttactaggttttcatggataagtttttaaatgtaagacaggaaagggatctatttgatgtctatcttcagatatattggcagttttccttaagctatttagttcctcatctgttgctttttcattttgtatactgcaagttcccaggcaactcgaatttgcaaacacagccatggatacactatttaccttacagtagtttcctgggaatctaagtctggtttttgttattcttccctcccctccactgcataatcatgtataactagcaacatttatggttataggttgatttcctaagtgtggctgatggtagcctctagtttgaagtgagggaagaatgagtagtcaggaactggtcactttgaatgtgggagggaagatattcacgacaaggttttctacgataaagcagtttcctgcttctcgtttggcacgcatgttagatggcagagaccaagaattcaagatggttggtggccagatttttgtagacagagatggtgatttgtttagtttcatcttagattttttgagaactcaccagcttttattacccactgaattttcagactatcttaggcttcagagagaggctcttttctatgaacttcgttctctagttgatctcttaaacccatacctgctacagccaagacctgctcttgtggaggtacatttcctaagccggaacactcaagcttttttcagggtgtttggctcttgcagcaaaacaattgagatgctaacagggaggattacagtgtttacagaacaaccttcagcgccgacctggaatggtaactttttccctcctcagatgaccttacttccactgcctccacaaagaccttcttaccatgacctggttttccagtgtggttctgacagcactactgataaccaaactggagtcaggtattttgtactttgcagtatttctcttgtataccagtttgtgatgttttctctaaaaacttgaagttcctcaggcctgtaacttctggaaaagatgattattcaaaataatgttttggggtaaccagtggagttgggtagaatgaccaaataattattttccaaactgggatactttttagagtgaaaggggctattattaggtgggacaaaaggaataaatgaagactgcccagaaaaaactgagactatggacattcaaatcatgggagaaaataattttgtagattatgttccattgctaatgaatttgacttagaaaagaattgccttatttttaagagattgtttcagtggttcacataaaggctcgctcactggtttctcttgagttccttacacactatataagttgttctttcagttttatgattcaactactgtttttccttcagctgactttatttttaaacacccttaaagacagatatatctcatggcaaatttggtatcctgttacagccttggctcttaaacaactcaaaatattgggataggctgtcagtatgttaaggatagttgctcctgagtcaattcttcacttactccctctgttgttcttggctggatcctaacgctgatttccactctgctgtcacaaacatttttccccccgtaaaatgtcttaatgctgtcctaccattattttaccaactgtgaaagctggctttaatttttaggaggaaaagaaaagcctgcatgtgttctttattggtatcatttaaaatatacttttttttttttttttggtaaaggtaggcgtattttaagatattttcttaacttgagcagtagccaacaggaaggataccagtgtctctctctcttagcgacacactccttggtcttgcttaccaactggaggacactaggtagaataaccgagtatgacaattcttaattgtttacattttataacttcctgtccttcaaaagagtttgaaatgtcattttgggaaaagagagccagtcaagctagtaggctgattgtgaagaaaatctaataccttatctttatctcaaacctctgtacaactttattttcattgatgggatactttaacaaaaatgaaattttttttggtttttaaaatatgagtgattatgacctctttggggatcatgcttcaaaaagtcagaaacctagagacaaaactgtcattgatttttaagaagaaacacactaggtcaaaagaagatgtcctggaaatatgaagtactctttaaaaaccatgcatttggagaaagtaattgtttccttgaaaaacatgattaaaaactaaaactgggatgttcctgtgtgtacacagtgccaaatggttttccctttttatgttgtgttttagaaacagcacgaaagttttttccattttaaagtgagaaaacattatatttagacttccataattccaaaatcagaagctatttttaaaattagcattttcttgcatcaccaaatggtattcaattgtttgaagctcaaaatttttaccattccataaatgtttgtgaatttttagacagtgccaatttaaaagtagagatagccaatctgaatacggtgaaattatggggatctctggtgattgggatgaaaactctggccttaaaaggtccacttttagtatataattgcctaattagcaatcatttttattttttgctcactccctggtctgaatctatctgtctattcagatattttttggtaggtttggaaaatggagaagtgagcctaattggtgcctaattgtctggtgtatcattcactttattcagtttgttctatcaatatgatttacccctcaaggttaacctagcaggttgctcagttattatctctcaaggtcacagtactagaaatacttggcttgcatctttcagatgccattcatgttatcaagctcaaattatagttggtcacaggattctaaagtctttatttgacttctcctttttgaactggctcaaatggaaaagtgtagttgcttttaaatgttaaaaataagtttaaactttatatttcccattggtttcccctattttgtcctttctttgtgtgcttgaaatattttatttttcagtttgtcctcatagggaatcaagtattttagctaggtgatgtcttgcaagtacgttccactttgttacaatctactatctgtatatactatttgtatcttaattcttttatgagatgttctgtaacatttttctcactttgacaaatgtttttagactgtacagtcaagatctggcgcttgggggtaagtggaatgatttgctaatattgagaatctgttgtatcaaacataataaactttttttgagatgtgaaaaaaaaaaaaaaaaaaaaa

SEQ ID NO: 56655 - DNA, 2433 bp, Homo Sapiens
atcccggctgctgcgcggcgtcggcgacggtagcggcagcggcggcgaaggcgggcggcggcctacagtggtagcggcggcggcggcgaccggggcccgggagctcgcgccggagcccgagccaacccgctgcggaggcagacgagagcccagcgccctcgagcgagcggaggagatggctggcacctgggaacgctatgggtgaaagcccagcctccgtggttcttaatgcctcaggaggactattttcactaaagatggaaacactggagtctgaattgacctgtccaatctgcctagagttgtttgaagacccccttctgctcccttgtgctcacagcctctgcttcagctgtgcccatcgcattttggtatcaagctgcagctctggtgaatccattgaacccattactgctttccagtgtcctacctgcaggtatgttatctcgctgaaccaccggggcctggatggcctcaagaggaatgtgactctgcagaacattattgatcgcttccagaaggcttcagtcagtgggcccaattcccctagtgagagccgccgggaaaggacttacaggcccaccactgccatgtctagcgagcgaattgcttgccaattctgtgagcaggacccgccaagggatgcagtaaaaacatgcatcacctgtgaggtctcctactgtgaccgttgcctgcgggccacgcaccccaacaagaaacctttcaccagccaccgcctggtggaaccagtgccagacacacatcttcgagggatcacctgcctggaccatgagaatgagaaagtgaacatgtactgtgtatctgatgaccaattgatctgtgccttatgcaaactggtgggtcgtcaccgagaccatcaggtcgcatccctgaatgatcgatttgagaaactcaagcaaactctggagatgaacctcaccaacctggttaagcgcaacagcgaactagaaaatcaaatggccaaactaatacagatctgccagcaggttgaggtgaatactgctatgcatgaggcaaaacttatggaagaatgtgacgagttggtagagatcatccagcagaggaagcaaatgatcgctgtcaaaatcaaagagacaaaggttatgaaactgagaaagttggcacagcaggttgctaattgccgccagtgtcttgaacggtcaacagtcctcatcaaccaagctgagcatatcctgaaagaaaatgaccaggcacggtttctacagtctgcaaaaaatattgctgagagggtcgctatggcaactgcatcttctcaagttctgattccagacatcaattttaatgatgcctttgaaaactttgctttagatttttccagagaaaagaaactgctagaggggttagattatttaacagccccaaacccaccatctatccgagaagaactctgtactgcctcccatgacaccattacagtccactggatctcggatgatgagttcagcatcagctcctatgagcttcagtacaccatattcactggccaggctaacttcatcagcctgtataattcagtagacagctggatgattgttcccaacattaaacagaaccattacacagtgcatggactccagagcgggactcgctacatcttcatcgttaaagccataaaccaagccggcagccggaacagtgaacctacccgactaaaaacaaacagccaaccctttaaattggatcccaaaatgactcacaagaagttgaagatctccaatgatggattgcagatggagaaggatgaaagctctctaaagaagagccacaccccagagaggtttagtggcacagggtgctatggggcagcaggaaatatattcattgacagtggctgccactattgggaggtggtcatgggttcctcaacatggtatgcaattggcattgcctacaaatcagctccaaagaatgaatggattggcaagaatgcctcctcatgggtcttctctcgctgcaatagtaacttcgtggtgagacacaacaacaaggaaatgctggtggatgtgcccccacacctgaagcgtctgggtgtcctcctggattatgacaacaatatgctgtctttctatgacccagctaactctctccatcttcatacttttgatgtgaccttcattcttccagtttgtccaacatttacaatctggaacaaatccctaatgatcctgtctggcttgcctgccccagattttattgattaccctgagcggcaggaatgcaactgcaggcctcaagaatccccttatgtttctgggatgaaaacctgtcattaagtttcaggagagtatataattcactggctctctagttcagcagttcttcccctcctacacctaagttagcgttcaatatacgagacacaaaataaagtttgtttgaagcatccaaaat

SEQ ID NO: 56656 - DNA, 2897 bp, Homo Sapiens
gcgagttgcggtagttgctgtgtaccatggtctcggaggtttctgtcccgcggcccgttaggtcctggtcgggttttcagcgaagcaggccgctcccctgcgtttcccagcgggcgtgctgtgccgcccaacaggctctgcctccaagtgccaaaaactcctagtaaagtttgcgcctcgcccgccgtccacaccccagcggccctgacgctgtcccctccgcgaccctcgcctctggaaaaagtgacaggcaaggccacgcccccgcgagggccggcctggagcccgcagcccccagggcctgggacggtgaggggcgtgaatgcggcggggggcggggccgttgccgggggagggggccggggcgcatgcgcgctgcgcagcggggctgaatgtttcccaagtgtttgaaactggtatttgggttttccacgttggacaagtgcggctcggcggccagcggagcgcgccccttcccgctgcccgctccgctcctctcttctacccagcccagtgggcgagtgggcagcggcggccgcggcgctgggccctctcccgccggtgtgtgcgcgctcgtacgcgcggcccccggcgccagccccgccgcctgagagggggcctgcgccgccggccggggcgtgcgcccgggagccaccgccaccgcggcccgcgccctcaggcgctggggtccccgcggacccggaggcggcggacgggctcggcagatgtagccgccgggccgaagcaggagccggcgggggggcgccgggagagcgagggctttgcattttgcagtgctattttttgaggggggcggggggtggaggaagcggaaagccgcgccgagtcgccggggacctccggggtgaaccatgttgagtcctgccaacggggagcagctccacctggtgaactatgtggaggactacctggactccatcgagtccctgcctttcgacttgcagagaaatgtctcgctgatgcgggagatcgacgcgaaataccaagagatcctgaaggagctagacgagtgctacgagcgcttcagtcgcgagacagacggggcgcagaagcggcggatgctgcactgtgtgcagcgcgcgctgatccgcagccaggagctgggcgacgagaagatccagatcgtgagccagatggtggagctggtggagaaccgcacgcggcaggtggacagccacgtggagctgttcgaggcgcagcaggagctgggcgacacagcgggcaacagcggcaaggctggcgcggacaggcccaaaggcgaggcggcagcgcaggctgacaagcccaacagcaagcgctcacggcggcagcgcaacaacgagaaccgtgagaacgcgtccagcaaccacgaccacgacgacggcgcctcgggcacacccaaggagaagaaggccaagacctccaagaagaagaagcgctccaaggccaaggcggagcgagaggcgtcccctgccgacctccccatcgaccccaacgaacccacgtactgtctgtgcaaccaggtctcctatggggagatgatcggctgcgacaacgacgagtgccccatcgagtggttccacttctcgtgcgtggggctcaatcataaacccaagggcaagtggtactgtcccaagtgccggggggagaacgagaagaccatggacaaagccctggagaaatccaaaaaagagagggcttacaacaggtagtttgtggacaggcgcctggtgtgaggaggacaaaataaaccgtgtatttattacattgctgcctttgttgaggtgcaaggagtgtaaaatgtatatttttaaagaatgttagaaaaggaaccattcctttcatagggatggcagtgattctgtttgccttttgttttcattggtacacgtgtaacaagaaagtggtctgtggatcagcattttagaaactacaaatataggtttgattcaacacttaagtctcagactgatttcttgcgggaggagggggactaaactcaacctaacacattaaatgtggaaggaaaatatttcatttagcttttttattttaatacaagtaatattattactttatgaacaattttttttaattggccatgtcgccaaaaatacagcctatagtaaatgtgtttcttgctgccatgatgtatatccatataacaattcagtaacaaaggtttaaagtttgaagattattttttaaaaaggtaaatggttaaattttacatgacagatattttatctattggcctgttccccaaatggccattttaaaatgcttgggtacacttctcttaagtggtctagtcaaggaacctcaagtcatgcttttgctatcaccaatcatagtgtacccatctttaatttatatcaggtgtataaatgtacatttccaaatgaacttgcacttgttatattataattggaagtgcagtcagcagatgctgttgtgaagctaatgtcacaattatgtgcaaaggtgtgcttcctgctgtatgtgagctgtaaaaatgttacgtgaagaaataaatgaaacttggccagtttgttcctctagtagtatatttaattttgacataagtaacttttaaaatttgtcttaaaaatttatacaccagcaatttagacaaagccttaagcaaattttgtattattgttctcacttattattaataatgaagtagaagttacttaattgccagcaaataaatacgtgtcaaaaaagaatctgtattcagaccctgggtcaggaaattactgcccacttgtcaagttcagcccaccatctgtttgaagattatatgaagtttaaattctagtgtccataaataaagtttcagcggaacacaaaaaaaaaaaaaaaaaaaaaaaaaaaaaaaaaaaaaaaaaaaa

SEQ ID NO: 56657 - DNA, 3239 bp, Homo Sapiens; identical to SEQ ID NO: 29081

SEQ ID NO: 56658 - DNA, 1277 bp, Homo Sapiens
gcgcatgtgcaaggtgtccaaactgacaatgctggagagatagcgagtgtggattgagagaaagggagagagggagggagagagagtgaaagaagaaaatacagagagtgagtgtgtggaagagagagagaaacaggagagaaacaggagggggggagagagagagagagagagagagagagagagagagagagagagagagagacaggagagagagggagggagcgagagggagagcaaaagaaggaaaggatccaagaaaaaaaagccccaaccacacaccagaggctgcaggactgggcacagcatgagatccaaaggcagggcaaggaaactggccacaaataatgagtgtgtatatggcaactaccctgaaatacctttggaagaaatgccagatgcagatggagtagccagcactccctccctcaatattcaagagccatgctctcctgccacatccagtgaagcattcactccaaaggagggttctccttacaaagcccccatctacatccctgatgatatccccattcctgctgagtttgaacttcgagagtcaaatatgcctggggcaggactaggaatatggaccaaaaggaagatcgaagtaggtgaaaagtttgggccttatgtgggagagcagaggtcaaacctgaaagaccccagttatggatgggaggtacatcttccaaggtctcggagggtaagcgttcactcttggttgtatttggggaagagaagctcagacgtaggaatagccttctctcaggctgatgtctacatgcctggactgcagtgtgccttcctctcgtagctcggaaggacgcggaacctgggtggctggagccgcccgctgcgctttatttcggagcgcaatgccatctaccggcgtcctgccgtacctgcaagtatccagaccttgaaagtcgctccgcctccccccacccgaagccaatataggggaaaaaactcggaggccctttccacgaaatcctaatttagccaggacctgccaatgattccagacgaccttttgttttcctaccgacgtttcctcgttttgaaagcagttttgtaaagggcaaggaggtgggggccgcagggttggggcgctgagctcccagaccccctgatcaggcgcactgtctgaagcaatcggttccccagattacttgatatttaatacacaatgcatcataaaacaaatccctcatcctgacaggaagaaaatagaacagctcatagctcgagccagtccaatttatggctaaatt

SEQ ID NO: 56659 - DNA, 882 bp, Homo Sapiens
atggggtccagggctgagctgtgcactctcttaggcggattctccttcctcctgctactgataccaggcgagggggccaagggtggatccctcagagagagtcagggagtctgctccaagcagacactggtggtcccgctccactacaacgagtcctacagccaaccagtgtacaagccctacctgaccttgtgcgctgggaggcgcatctgcagcacttacaggaccatgtaccgcgttatgtggcgggaggtgaggcgggaggttcagcagacccatgcagtgtgctgccagggctggaagaagcggcacccgggggcgctcacctgtgaagccatctgcgccaagccttgcctgaacggaggcgtctgcgttaggcctgaccagtgcgagtgcgcccccggctggggagggaagcactgtcatgtggacgtggatgaatgtaggaccagcatcaccctctgctcgcaccattgttttaatacggcaggcagcttcacctgcggctgcccccatgacctagtgctaggcgtggacgggcgcacctgcatggaggggtccccagagcccccaaccagtgccagcatactcagcgtggccgttcgggaggcggaaaaagatgagcgcgctctgaagcaggagattcacgagctgcgagggcgcctggagcggctggagcagtgggccggtcaggctggggcctgggtcagagcggtgctgcccgtgccgcctgaagagctgcagccagaacaggtggctgagctgtggggccggggtgaccggatcgaatctctcagcgaccaggtgctgctgctggaggagaggctaggtgcctgctcctgtgaggacaacagcctgggcctcggcgtcaatcatcgataa

SEQ ID NO: 56660 - DNA, 1542 bp, Homo Sapiens
ctcctcttcactcgcgagccctcggacatggtggcccccggctccgtgaccagccggctgggctcggtattccccttcctgctagtcctggtggatctgcagtacgaaggtgctgaatgtggagtaaatgcagatgttgagaaacatcttgaattgggcaagaaattacttgcagctggacagctagctgatgctttatctcagtttcatgctgccgtagatggtgaccctgataactatattgcttattatcggagggctactgtctttttagctatgggcaaatcaaaagctgcacttcctgatttaactaaagtgattcaattgaagatggacttcactgcagcaagattacagagaggtcacttattactcaaacaaggaaaacttgatgaagcagaagatgattttaaaaaagtgctcaaatctaatccaagtgaaaatgaagaaaaggaagcacagtctcaacttataaaatctgatgaaatgcagcgtttgcgttcacaagcacttaacgcttttggaagtggagattatactgctgctatagccttccttgataagattttagaggtttgtgtttgggatgcagaactacgggaacttcgagctgaatgttttataaaagaaggagaacctaggaaagctataagtgacttaaaagctgcgtcaaagttgaagaatgataatactgaagcgttttataaaataagcacactgtactaccaactaggagaccacgaactgtccctcagtgaagttcgggaatgtcttaaacttgaccaggatcataaaaggtgttttgcacactataaacaagtaaagaaacttaataagctgattgagtcagctgaagagctcatcagagatggcagatacacagatgctaccagcaaatatgaatctgtcatgaaaacagagccaagcattgctgaatatacagttcgttcaaaggagaggatttgccactgcttttctaaggacgagaagcctgttgaagctattagggtttgttctgaagttttacagatggaacctgacaatgtgaatgccctgaaagatcgagcagaggcctatttgatagaggaaatgtatgatgaagctattcaggattatgaaactgctcaggaacacaatgaaaatgatcagcagattcgagaaggtctagagaaagcacaaagattattgaaacagtcgcagaaacgagattattataaaatcttgggagtaaaaagaaatgccaaaaagcaagaaattattaaagcataccgaaaattagcactgcagtggcacccagataacttccagaatgaagaagaaaagaaaaaagctgagaaaaagttcattgatatagcagctgctaaagaagtcctctctgatccagaaatgagaaagaagtttgacgacggagaagatcctttggatgcagagagccagcaaggaggcggcggcaaccctttccacagaagctggaactcatggcaagggttcaatcccttcagctcaggcggaccatttagatttaaattccacttcaattaa

SEQ ID NO: 56661 - DNA, 3088 bp, Homo Sapiens; identical to SEQ ID NO: 28779

SEQ ID NO: 56662 - DNA, 4237 bp, Homo Sapiens
gcgcgcgcggggcggcgagacagcggcggcgacggcgcggaggccccgggcgcggcgcaggctccaaagaagaagaaaccaaggcccagagagggaggcccaggtgcagggagcaggcgagggaaggatccgtacaggggcccaacactactccaccaaccgaagcccccaaaaggagcccggtgatgctgcgaaggctgtgaacaggggaggcggcactgtgggggctgccggcagccggggctggggagagacatgtggacacgtggcctctatggctcccgcctgccagatcctccgctgggccctcgccctggggctgggcctcatgttcgaggtcacgcacgccttccggtctcaagatgagttcctgtccagtctggagagctatgagatcgccttccccacccgcgtggaccacaacggggcactgctggccttctcgccacctcctccccggaggcagcgccgcggcacgggggccacagccgagtcccgcctcttctacaaagtggcctcgcccagcacccacttcctgctgaacctgacccgcagctcccgtctactggcagggcacgtctccgtggagtactggacacgggagggcctggcctggcagagggcggcccggccccactgcctctacgctggtcacctgcagggccaggccagcacctcccatgtggccatcagcacctgtggaggcctgcacggcctgatcgtggcagacgaggaagagtacctgattgagcccctgcacggtgggcccaagggttctcggagcccggaggaaagtggaccacatgtggtgtacaagcgttcctctctgcgtcacccccacctggacacagcctgtggagtgagagatgagaaaccgtggaaagggcggccatggtggctgcggaccttgaagccaccgcctgccaggcccctggggaatgaaacagagcgtggccagccaggcctgaagcgatcggtcagccgagagcgctacgtggagaccctggtggtggctgacaagatgatggtggcctatcacgggcgccgggatgtggagcagtatgtcctggccatcatgaacattgttgccaaacttttccaggactcgagtctgggaagcaccgttaacatcctcgtaactcgcctcatcctgctcacggaggaccagcccactctggagatcacccaccatgccgggaagtccctggacagcttctgtaagtggcagaaatccatcgtgaaccacagcggccatggcaatgccattccagagaacggtgtggctaaccatgacacagcagtgctcatcacacgctatgacatctgcatctacaagaacaaaccctgcggcacactaggcctggccccggtgggcggaatgtgtgagcgcgagagaagctgcagcgtcaatgaggacattggcctggccacagcgttcaccattgcccacgagatcgggcacacattcggcatgaaccatgacggcgtgggaaacagctgtggggcccgtggtcaggacccagccaagctcatggctgcccacattaccatgaagaccaacccattcgtgtggtcatcctgcagccgtgactacatcaccagctttctagactcgggcctggggctctgcctgaacaaccggccccccagacaggactttgtgtacccgacagtggcaccgggccaagcctacgatgcagatgagcaatgccgctttcagcatggagtcaaatcgcgtcagtgtaaatacggggaggtctgcagcgagctgtggtgtctgagcaagagcaaccggtgcatcaccaacagcatcccggccgccgagggcacgctgtgccagacgcacaccatcgacaaggggtggtgctacaaacgggtctgtgtcccctttgggtcgcgcccagagggtgtggacggagcctgggggccgtggactccatggggcgactgcagccggacctgtggcggcggcgtgtcctcttctagccgtcactgcgacagccccaggccaaccatcgggggcaagtactgtctgggtgagagaaggcggcaccgctcctgcaacacggatgactgtccccctggctcccaggacttcagagaagtgcagtgttctgaatttgacagcatccctttccgtgggaaattctacaagtggaaaacgtaccggggagggggcgtgaaggcctgctcgctcacgtgcctagcggaaggcttcaacttctacacggagagggcggcagccgtggtggacgggacaccctgccgtccagacacggtggacatttgcgtcagtggcgaatgcaagcacgtgggctgcgaccgagtcctgggctccgacctgcgggaggacaagtgccgagtgtgtggcggtgacggcagtgcctgcgagaccatcgagggcgtcttcagcccagcctcacctggggccgggtacgaggatgtcgtctggattcccaaaggctccgtccacatcttcatccaggatctgaacctctctctcagtcacttggccctgaagggagaccaggagtccctgctgctggaggggctgcctgggaccccccagccccaccgtctgcctctagctgggaccacctttcaactgcgacaggggccagaccaggtccagagcctcgaagccctgggaccgattaatgcatctctcatcgtcatggtgctggcccggaccgagctgcctgccctccgctaccgcttcaatgcccccatcgcccgtgactcgctgcccccctactcctggcactatgcgccctggaccaagtgctcggcccagtgtgcaggcggtagccaggtgcaggcggtggagtgccgcaaccagctggacagctccgcggtcgccccccactactgcagtgcccacagcaagctgcccaaaaggcagcgcgcctgcaacacggagccttgccctccagactgggttgtagggaactggtcgctctgcagccgcagctgcgatgcaggcgtgcgcagccgctcggtcgtgtgccagcgccgcgtctctgccgcggaggagaaggcgctggacgacagcgcatgcccgcagccgcgcccacctgtactggaggcctgccacggccccacttgccctccggagtgggcggccctcgactggtctgagtgcacccccagctgcgggccgggcctccgccaccgcgtggtcctttgcaagagcgcagaccaccgcgccacgctgcccccggcgcactgctcacccgccgccaagccaccggccaccatgcgctgcaacttgcgccgctgccccccggcccgctgggtggctggcgagtggggtgagtgctctgcacagtgcggcgtcgggcagcggcagcgctcggtgcgctgcaccagccacacgggccaggcgtcgcacgagtgcacggaggccctgcggccgcccaccacgcagcagtgtgaggccaagtgcgacagcccaacccccggggacggccctgaagagtgcaaggatgtgaacaaggtcgcctactgccccctggtgctcaaatttcagttctgcagccgagcctacttccgccagatgtgctgcaaaacctgccagggccactagggggcgcgcggcacccggagccacagctggcggggtctccgccgccagccctgcagcgggccggccagagggggccccgggggggcgggaactgggagggaagggtgagacggagccggaagttatttattgggaacccctgcagggccctggctggggggatggagaggggctggctatccccccagagcccctcttcagcatccgccccttccagttcacatagtgagaccccccctccagggtgggtctggggaggggacagctgttcaccccagcaccctttgaacccacccttagggagtccccaacactccccccctcctttgatcggaatatgtactgtgaagagtaggggtggggaggtggtctgccggtgccctgccccccagcactgccctacccctccactccgagctgggggggaatctgtgtctgctatgggaggggggggggtagcaccacctccctgacaccctcccctgacctgactagggggaggatccaccccaacctctgccctgcccgccccaggggcaccccgacatccaggccaccccctcatggtgctacagaccctgccctggggcccacacactcctgccaggaagccctacatcaataaagttctgtcttgtgtagatttctacg

SEQ ID NO: 56663 - DNA, 863 bp, Homo Sapiens
atgagttcctattttgtgaatcccactttccccgggagccttcccagcggccaggactccttcttgggccagctgcccctctaccaggctggctatgacgcgctgaggcccttcccggcctcgtacggggcgtcgagtctcccggacaagacgtacacctcaccttgtttctaccaacagtccaactcggtcctggcctgcaaccgggcgtcctacgagtacggggcctcgtgtttctattctgataaggacctcagtggcgcctcgccctcgggcagtggcaagcagaggggccccggggactacctgcacttttctcccgagcagcagtacaaacccgacagcagcagcgggcagggcaaagcactccatgacgaaggcgccgaccggaagtacacgagcccggtttacccttggatgcagcggatgaactcctgcgcgggtgctgtgtatgggagccatgggcgccgaggccgccagacctacacgcgctaccagacactggagctggagaaggagttccacttcaaccgctacctgacacggcgccgccgcatcgagatcgccaacgcgctctgcctcaccgagcgccagatcaagatctggttccagaaccgccgcatgaagtggaaaaaggaaaacaagctcatcaattccacgcagcccagcggggaggactcagaggcaaaggcgggcgagtagatgcctgggcagggaccaggccagcgctgcaacctccttcggctttgcccccttgccctcgcctgttccccaacttttctccccgcctgctcccatctgggggcttccgcagcttcaggggagcccggagctttgcaagcgtctgtgcatttatttcttac

SEQ ID NO: 56664 - DNA, 4542 bp, Homo Sapiens
atgagcctttcattttgtggtaacaacatttcttcatataatatcaacgatggtgtactacaaaattcctgctttgtggatgccctcaacctggtccctcatgtctttctgttgtttatcacttttccaatattgtttattgggtgggggagccaaagctcaaaagtacaaattcaccacaacacatggcttcattttccgggacataacctgagatggattcttacattcgctctcctgtttgtgcatgtctgtgaaatagcagaaggcattgtttcagactcgcggcgggaatcaaggcacctccacctctttatgccagccgtgatgggattcgttgccactacaacatcgatagtgtattatcataatatcgaaacatcaaattttcctaaattacttttagccctgttcctgtattgggtaatggcctttattacaaaaacaataaaattggttaagtactgtcagtctggcttggacatatcaaacctgcgtttctgcatcacaggcatgatggtcatcttgaatgggctcttgatggctgtggagatcaatgtcattcgagtcaggagatatgtatttttcatgaatcctcagaaagtaaagcctcctgaagacctccaggatctgggagtgagatttcttcaaccatttgtgaatttgctgtcaaaagcaacatactggtggatgaacacacttattatatctgctcacaaaaagcctattgatctgaaggcaattggaaaattgccaatagcaatgagagcagtaacaaattatgtttgcctgaaagatgcatatgaagaacaaaagaaaaaagttgcagatcatccaaatcggactccatctatatggcttgcaatgtacagagcttttgggcgaccaattctacttagtagcacattccgctatctggctgatttactgggttttgctggacctctttgtatttctggaatagttcagcgtgtgaatgaaacccagaatgggacaaataacacaactggaatttcagaaaccctctcatcaaaggaatttcttgaaaacgcttacgttctagcagttcttctcttcttggctcttattctgcaaaggacatttttgcaggcttcctactatgtaaccatagagactggcattaacctccgtggagctctgctggccatgatttataataaaatccttaggctctctacgtctaacttatccatgggggagatgactctggggcagatcaacaacttagtcgccattgaaactaatcaactcatgtggtttttgttcctgtgtcccaatctatgggctatgcctgttcagatcataatgggcgtgattctgctctataatttacttggatcaagtgcattggtcggtgcagctgtcattgtgctccttgcgccaattcagtactttattgctacaaagttggcagaggctcagaaaagtacacttgattattccactgagagactcaagaaaacaaatgaaatattgaaaggcatcaaacttctaaaattgtatgcctgggaacacattttctgcaaaagtgtggaggaaacaagaatgaaagaactatctagtctcaaaacctttgcactatatacatcactctccatcttcatgaatgcagcaattcccatagcagctgttcttgctacatttgtgacccatgcgtatgccagtggaaacaatctgaaacctgcagaggcctttgcttcactgtctctcttccatatcctggtcacaccactgtccctgctcttcacggtggtcagatttgcagtcaaagccatcataagtgttcaaaagctgaatgagtttctcttgagtgatgagattggtgacgacagttggcgaactggtgaaagttcgcttccttttgagtcctgtaagaagcacactggagttgtcacaaatggatacttttcatggggcagtggtttagctacattatccaatatagatattcgaattccaacaggtcagttaaccatgattgtgggccaagtaggatgtgggaagtcctctcttctccttgccatcctcggtgagatgcagacattggaaggaaaagttcactggagcaatgtaaatgaatctgagccttcttttgaagcaaccagaagtaggaacaggtactctgtggcatatgcagctcaaaagccttggctattaaatgctacagtagaagaaaatattacttttggaagtccttttaacaaacagaggtacaaagctgtcacagatgcctgttctcttcagccagatattgacttattaccatttggagatcaaactgaaattggagagaggggcatcaacctgagtgggggacagaggcagagaatctgtgtggcacgagcgctgtatcaaaacaccaacattgtctttttggatgatccattctcagccctggacattcacttgagtgatcatttaatgcaggaggggattttgaaattcctgcaagatgacaaaaggacactcgttcttgtgactcacaaattacagtatctgacgcatgctgactggatcatagccatgaaagatggaagtgtcctaagagaaggaactttgaaggacattcaaaccaaagatgttgagctttatgaacactggaaaacacttatgaatcggcaagatcaagaattagaaaaggatatggaagctgaccaaactactttagagaggaaaactctccgacgggccatgtattcaagagaagccaaagcccagatggaggacgaagacgaagaggaagaagaggaggaagatgaggatgataacatgtccactgtaatgaggctcaggactaaaatgccatggaaaacctgctggcgctacctgacatctggaggattcttcctgctcatcctgatgattttctctaagcttttgaagcattcggtcattgtagctatagactattggctggccacatggacatcggagtacagtataaacaatactggaaaagctgatcagacctactatgtggctggctttagcatactctgtggagcaggcattttcctttgccttgttacatccctcactgtagaatggatgggtctcacagctgccaaaaatcttcaccacaaccttctcaataagataatccttggaccaataaggttttttgataccacacccctgggactgattctcaatcgcttttcagctgatactaatatcattgatcagcacatccctccaaccttggaatctctaactcgctcaacactgctctgcctgtctgccattgggatgatttcttatgctactcctgtgttcctggttgctctcctgccccttggtgttgccttttattttatccagaaatactttcgggttgcctctaaggacctccaggaactcgacgatagtacccagctccctctgctctgtcacttctcagaaacagcagaaggactcaccaccattcgggcctttaggcatgaaaccagatttaaacaacgtatgctggaactgacggatacaaacaacattgcctacttatttctctcagctgccaacagatggctggaggtcaggacggattatctgggagcttgcattgtcctcactgcatctatagcatccattagtgggtcttccaattctggattggtaggcttgggtcttctgtatgcacttacgataaccaattatttgaattgggttgtgaggaacttggctgacctggaggtccagatgggtgcagtgaagaaggtgaacagtttcctgactatggagtcagagaactatgaaggcacaatggatccttctcaagttccagaacattggccacaagaaggggagatcaagatacatgatctgtgtgtcagatatgaaaataatctgaaacctgttcttaagcacgtcaaggcttacatcaaacctggacaaaaggtgggcatatgtggtcgcactggcagtgggaaatcatcgttatctctggctttcttcagaatggttgatatatttgatggaaaaattgtcattgatgggatagacatttccaaattaccactgcacacactacgttctagactttcaatcattctgcaggatccaatactattcagtggttccattagatttaatttagatccagagtgcaaatgcacagatgacagactctgggaagccttagaaattgctcagctgaagaatatggtcaaatctctacctggaggtctagatgcggttgtcactgaaggtggggagaattttagcgtgggacagagacagctattttgccttgccagggcctttgtccgcaaaagcagcattcttattatggatgaggcaacagcttccattgacatggccacagagaatattttgcaaaaagtagtaatgacagcctttgcagaccggaccgtggtgacaatggctcaccgtgtctcttctattatggatgcaggccttgttttagtcttttctgagggtattttagtggagtgtgatactgtcccaaatttgttcgcccacaagaatggccccttttccactttggtgatgaccaacaagtag

SEQ ID NO: 56665 - DNA, 1900 bp, Homo Sapiens
gcggccgcggaggaggaggaaggggaggagggcgaggcgggaggtgcaggagggaccctcgccatgggtccacgggcctagagtggcggaagataccggcctggtgccaaactggctactgctgcttcctgtggcctccatggctgaggactggctggactgcccggccctgggccctggctggaagcgccgcgaagtctttcgcaagtcaggggccacctgtggacgctcagacacctattaccagagccccacaggagacaggatccgaagcaaagttgagctgactcgatacctgggccctgcgtgtgatctcaccctcttcgacttcaaacaaggcatcttgtgctatccagcccccaaggcccatcccgtggcggttgccagcaagaagcgaaagaagccttcaaggccagccaagactcggaaacgtcaggttggaccccagagtggtgaggtcaggaaggaggccccgagggatgagaccaaggctgacactgacacagccccagcttcattccctgctcctgggtgctgtgagaactgtggaatcagcttctcaggggatggcacccaaaggcagcggctcaaaacgttgtgcaaagactgtcgagcacagagaattgccttcaaccgggaacagagaatgtttaagcgtgtgggctgtggggagtgtgcagcctgccaggtaacagaagactgtggggcctgctccacctgcctcctgcagctgccccatgatgtggcatcggggctgttctgcaagtgtgaacggagacgctgcctccggattgtggaaaggagccgagggtgtggagtatgccggggctgtcagacccaagaggattgtggccattgccccatctgccttcgccctccccgccctggtctcaggcgccagtggaaatgtgtccagcgacgttgcctacggggtaaacatgcccgccgcaagggaggctgtgactccaagatggctgccaggcggcgccccggagcccagccactgcctccaccacccccatcacagtccccagagcccacagagccgcagccctacacgaaccgccggcagaaccgcaagtgcggggcctgtgcagcctgcctacggcggatggactgtggccgctgcgacttctgctgcgacaagcccaaattcgggggcagcaaccagaagcgccagaagtgtcgttggcgccaatgcctgcagtttgccatgaagcggctgctgcccagtgtctggtcagagtctgaggatggggcaggatcgcccccaccttaccgtcgtcgaaagaggcccagctctgcccgacggcaccatcttggccctaccttgaagcccaccttggctacacgcacagcccaaccagaccatacccaggctccaacgaagcaggaagcaggtggtggctttgtgctgcccccgcctggcactgaccttgtgtttttacgggaaggcgcaagcagtcctgtgcaggtgccgggccctgttgcagcttccacagaagccctgttgcaggcagtagacccaggcctgccttctgtgaagcaagagccacctgacccagaggaggacaaggaggagaacaaggatgattctgcctccaaattggccccagaggaagaggcaggaggggctggcacacccgtgatcacggagattttcagcctgggtggaacccgcttccgagatacagcagtctggttgccaagtctgcagggcaggcactcgggaagggaagatggatgtaaagtgtgggagaccgaggacacagtggagcccacgagcacgagctggaacccacgaggatggcctggaacccatgtcagtctctcaccacctccagcttcgatgatgtgggtgtcctgcagaagaagctggtgcccttcctcacagagttaa

SEQ ID NO: 56666 - DNA, 1595 bp, Homo Sapiens
ggctctggggcggcgctgacagtctggtccgcgccgggcagcgggcgcagcagcgggcaggctgccggcaggcacacggaggcagagccccgccgcgcgcgccccggcccgcccgcgggcgcccacctgcagccccgacgggaggccccccgcggccgcagccgctgccccgggccgggcgcccgcggcggcaccatgagtccccgctcgtgcctgcgttcgctgcgcctcctcgtcttcgccgtcttctcagccgccgcgagcaactggctgtacctggccaagctgtcgtcggtggggagcatctcagaggaggagacgtgcgagaaactcaagggcctgatccagaggcaggtgcagatgtgcaagcggaacctggaagtcatggactcggtgcgccgcggtgcccagctggccattgaggagtgccagtaccagttccggaaccggcgctggaactgctccacactcgactccttgcccgtcttcggcaaggtggtgacgcaagggactcgggaggcggccttcgtgtacgccatctcttcggcaggtgtggcctttgcagtgacgcgggcgtgcagcagtggggagctggagaagtgcggctgtgacaggacagtgcatggggtcagcccacagggcttccagtggtcaggatgctctgacaacatcgcctacggtgtggccttctcacagtcgtttgtggatgtgcgggagagaagcaagggggcctcgtccagcagagccctcatgaacctccacaacaatgaggccggcaggaaggccatcctgacacacatgcgggtggaatgcaagtgccacggggtgtcaggctcctgtgaggtaaagacgtgctggcgagccgtgccgcccttccgccaggtgggtcacgcactgaaggagaagtttgatggtgccactgaggtggagccacgccgcgtgggctcctccagggcactggtgccacgcaacgcacagttcaagccgcacacagatgaggacctggtgtacttggagcctagccccgacttctgtgagcaggacatgcgcagcggcgtgctgggcacgaggggccgcacatgcaacaagacgtccaaggccatcgacggctgtgagctgctgtgctgtggccgcggcttccacacggcgcaggtggagctggctgaacgctgcagctgcaaattccactggtgctgcttcgtcaagtgccggcagtgccagcggctcgtggagttgcacacgtgccgatgaccgcctgcctagccctgcgccggcaaccacctagtggcccagggaaggccgataatttaaacagtctcccaccacctaccccaagagatactggttgtattttttgttctggtttggtttttgggtcctcatgttatttattgccgaaaccaggcaggcaaccccaagggcaccaaccagggcctccccaaagcctgggcctttgtggctgccactgaccaaagggaccttgctcgtgccgctggctgcccgcatgtggctgccactgaccactcagttgttatctgtgtccgtttttctacttgcagacctaaggtggagtaacaaggagtattaccaccaca

SEQ ID NO: 56667 - DNA, 993 bp, Homo Sapiens
gttttctatcagatgttccacgtaataatgctggagttaagaagtttccattattttgctccaaaccagaagactctgttccctgtatatagaataggagtaatatttgaaaacaactggctgatgtttaaaactgaagattgtcatgattgtttatcctaatcccaatgctgaagtaagattgtcttggaaatactaagttggggtaatccaaatctatttctggaaccatgaaaattttgctagtttttgactttgacaatacaatcatagatgacaatagtgacacttggattgtacaatgtgctcccaacaaaaagcttcctattgaactacgtgattcttatcgaaaaggattttggacagaatttatgggcagagtctttaagtatttgggagataagggtgtaagagaacatgaaatgaaaagagcagtgacatcattgcctttcactccagggatggtggaactcttcaactttataagaaagaataaggataaatttgactgcattattatttcagattcaaattcggtcttcatagattgggttttagaagctgccagttttcatgacatatttgataaagtgtttacaaatccagcagcttttaatagcaatggtcatctcactgttgaaaattatcatactcattcttgcaatagatgcccaaagaatctttgcaaaaaggtagttttgatagaatttgtagataaacagttacaacagggagtgaattatacacaaattgtttatattggtgatggtggaaatgatgtctgtccagtcacctttttaaagaatgatgatgttgccatgccacggaaaggatataccttacagaaaactctttccagaatgtctcaaaatcttgagcctatggaatattctgttgtagtttggtcctcaggtgttgatataatttctcatttacaatttctaataaaggattaatatgtcgaaaaaaaaaaaaaaaaaaaaaaaaaaaaaa

SEQ ID NO: 56668 - DNA, 971 bp, Homo Sapiens; identical to SEQ ID NO: 31535

SEQ ID NO: 56669 - DNA, 3769 bp, Homo Sapiens; identical to SEQ ID NO: 29884

SEQ ID NO: 56670 - DNA, 1929 bp, Homo Sapiens
ataacgggcgttaataaccataccctgttagactaagcatggtccacccgcgaatcctctacagagatggccaagcgctggggtcgtggctgcgtcctctaggccagccttgtgcaaaggaccttctcaccacagatcagccagaccatcttcctccttccaagtcatcaaagagttccaagctggtcacctgtcccttgatgttcccaggaaaccaggaaagaggacccctgcattttatcttcccatccagagtggcaggatctctgcctgggaaacaggcttcattcagcacagctgtggtagcattaacaaagcaaagtgggcacatgtagaagttgaagctaaaacattcaagaactccagtctgtttctgtggatgttaagggggtgaagataaaacaatggaggtgatgaggaggaataacttgaagacagtttaaagccacagtgatacaaagaatgaagagaaggaaggtgctggattttactaagaaaacagactgagttcaggagtctcaccagtagaactttatagtattgcgtttcgattacatgtgtgtgaattttaaaaactgattaccctccagtaaaaatgtggaaccaatttgcatttggattaaaacattaggtttggggacaaaagtggaccccatgctgcctgagatgaagagagagagcaggatggcagaggaatcaccagctcaagaaaccccaagacttggacagtcttccagcagaagaggccagggtctctcagtgtactactccaaacaggcctctcctagagatgtagtctgggaaggtccaaaacccaccagacaggcacatccagtggggaaaagacttcccattccagtgtggcctgcatccctcacctctgcttcccagtcttctgctgacctcagaggagcagggtggccattgctgatctgggttagggagatgccagaaacacacccaggtttgaaccacaggttagtggtacaaagtcacagtccttgtgccttcagaaaacccagaggccccaaatacgagtgggaagagagttgggaaaaactgaaccagactcttccaatggccattaaagagaaaattcagcaacgcttgcctttgtctttgaccctgagaagttaagggacacagattgtggcgccgtgatggaacatggagggaaggcatggtgtgcttcctgcagagatgcctctggagtccctgtggccacgggatctcactggccccctcttcaggcaccttgatggggctcagtggggccaggccaaagggtggaagtagaaaagcatcaacaggctgtccagatcaattggcaccatccaaggccctgctgcacccacacatggaggtcaccagctcagccccaggggttctttcacacacaagctccttccctaaggagtcctgtggggttccacactcagtgtgctgcccaagtcagagatttaccacagatctgtctccccctcaacctggactcaagttactgtggtgagaaacctcactgtccatggttaactgaagaaatccctccttcagaaagaacttgagtagtagatgaggtggttagacaggatctttttccctcaagctgtttggacgccacagccaggaccaactctgacagctgcgagagagagagcccctccaatgtggaacctcctacacagccccccttttgggtccctggatatgagcccccagcaggaccaccactctagggggaagtctccctcccatccctcagatccccacattgttcctcctgtaggagaaaagtcagccctgcccctggagcttctccaagatggcactggactcgccgttatcttgaggagccaggagctgaaatggctccggcttagcaacccagtatggccaaagtggaaaggttctctgtcctttgcagtcacc

SEQ ID NO: 56671 - DNA, 3169 bp, Homo Sapiens
agcggaatcgtgagaaggaccggttccctccgtgctgcttcctccccgtgcagtgctgggtgtgcgtgtgcgagtgtgagtgcaagtgcgcgcgcgcacgggtgcgagtgtgtgtgagtgtgagcgtgtgtctgtgtgtgcgtgcgcggccgccctgcctctgcccgctccccgggcgcggagccgcgggtttcatggggcgattgcagcgattcccccacccagagcgacctgcgggcagcggcggcagtggcaggagccgcctttccgattccctacgatgcgggtgctgagctatggcaaagggcagcgaagtgacgagcgagacccgcgtacgactgtgaaagccacctggagccaccttgccgggattgtacctgcaggcagaaagtcttcctacgaccgtcttttcccttagaggcaccagaatccctgtaaccattcatccaggtgttgagaagatatgtagcagccgagcacccatcttttgacaccgtcctctgaaatcagctttggagatgctttcactctgtccgtcttctgcagcagccaggcagagtgccgactccttcacagccgtgaggaactcttcaggctccagaagctcttaaacctgatctacaatggaaaaaattcttttttatctgtttctcattggcatagcagtgaaagctcagatctgtccaaagcgttgtgtctgtcagattttgtctcctaatcttgcaaccctttgtgccaagaaagggcttttatttgttccaccaaacattgacagaagaactgtggaactgcggttggcagacaattttgttacaaatattaaaaggaaagattttgccaatatgaccagcttggtggacctgactctatccaggaatacaataagttttattacacctcatgctttcgctgacctacgaaatttgagggctttgcatttgaatagcaacagattgactaaaattacaaatgatatgttcagtggtctttccaatcttcatcatttgatactgaacaacaatcagctgactttaatttcctctacagcgtttgatgatgtcttcgcccttgaggagctggatctgtcctataataatctagaaaccattccttgggatgctgttgagaagatggttagcttgcatacccttagtttggatcacaatatgattgataacattcctaaggggaccttctcccatttgcacaagatgactcggttagatgtgacatcaaataaattgcagaagctaccacctgaccctctctttcagcgagctcaggtactagcaacctcaggaatcataagcccatctacttttgcattaagttttggtggaaacccattgcattgcaattgtgaattgttgtggttgaggcgtctgtccagagaagatgacttagagacctgtgcttctcctccacttttaactggccgctacttttggtcaattcctgaagaagagtttttgtgtgagcctcctctcattactcgtcatacacatgagatgagagtcctggagggacaaagggcaacactgaggtgcaaagccaggggagaccctgagcctgcaattcactggatttctcctgaagggaagcttatttcaaatgcaacaagatctctggtgtatgataacggaacacttgacattcttatcacaactgtaaaggatacaggtgcttttacctgcattgcttccaatcctgctggggaagcaacacaaatagtggatcttcatataattaagctccctcacttactaaatagtacaaaccatatccatgagcctgatcctggttcttcagatatctcaacttctaccaagtcaggttctaatacaagcagtagtaatggtgatactaaattgagtcaagataaaattgtggtggcagaagctacatcatcaacggcactacttaaatttaattttcaaagaaatatccctggaatacgtatgtttcaaatccagtacaatggtacttatgatgacacccttgtttacagaatgatacctcctacgagcaaaacttttctggtcaataatctggctgctggaactatgtatgacttgtgtgtcttggccatatatgatgatggcatcacttccctcactgccacaagagtcgtgggttgcatccagtttactacggaacaggattatgtgcgttgccatttcatgcagtcccagtttttgggaggcaccatgattattattattggtggaatcattgtagcatctgtgctggtattcatcattattctgatgatccggtataaggtttgcaacaataatgggcaacacaaggtcaccaaggttagcaatgtttattcccaaactaacggggctcaaatacaaggctgtagtgtaacgctgccccagtccgtgtccaaacaagctgtgggacacgaagagaatgcccagtgttgtaaagctaccagtgacaatgtgattcaatcttcagaaacttgttcgagtcaggactcctctaccactacctctgctttgcctccttcctggacttcaagcacttctgtgtcccaaaagcagaaaagaaagactggcacaaagccaagtacagaaccacagaatgaagccgtcacaaatgttgaatcccaaaacactaacaggaacaactcaactgccttgcagttagctagccgtcctcccgattctgtcacagaggggcccacgtctaaaagagcacatataaagccaaatgctttgctgactaatgttgaccagattgtccaggaaacacagaggctggagttaatctgaagagcaccacttctcctctctctcctgaaaaaatttgccactgatatttttactggataaaattcaaaaatgtttcaattcacaaaggctaattgttgaactggtgtcatagaagaaattgtctacaggagccaaggtgaaagtctctgatgacggcggaactggctccattagaccatggttcatcctcttttaaaaccaaatttttttttcttctggcctacaagtattttttttttaaaaaagaaaaaaagcctacattggcatcaagttctgtatcaatccatcttacattgccatccatgatttaacagactgtagaatcttgaataatctatatcactttaacaaataaatgttttactatgacaaaaaaaaaaaaaaaa

SEQ ID NO: 56672 - DNA, 2537 bp, Homo Sapiens; identical to SEQ ID NO: 31481

SEQ ID NO: 56673 - DNA, 4862 bp, Homo Sapiens
aggacccggaagtgagggtgtgagaggcctctctggaagttgtcccgggtgttcgccgctggagcccgggtcgagaggacgaggtgccgctgcctggagaatcctccgctgccgtcggctcccggagcccagccctttcctaacccaacccaacctagcccagtcccagccgccagcgcctgtccctgtcacggaccccagcgttaccatgcatcctgccgtcttcctatccttacccgacctcagatgctcccttctgctcctggtaacttgggtttttactcctgtaacaactgaaataacaagtcttgatacagagaatatagatgaaattttaaacaatgctgatgttgctttagtaaatttttatgctgactggtgtcgtttcagtcagatgttgcatccaatttttgaggaagcttccgatgtcattaaggaagaatttccaaatgaaaatcaagtagtgtttgccagagttgattgtgatcagcactctgacatagcccagagatacaggataagcaaatacccaaccctcaaattgtttcgtaatgggatgatgatgaagagagaatacaggggtcagcgatcagtgaaagcattggcagattacatcaggcaacaaaaaagtgaccccattcaagaaattcgggacttagcagaaatcaccactcttgatcgcagcaaaagaaatatcattggatattttgagcaaaaggactcggacaactatagagtttttgaacgagtagcgaatattttgcatgatgactgtgcctttctttctgcatttggggatgtttcaaaaccggaaagatatagtggcgacaacataatctacaaaccaccagggcattctgctccggatatggtgtacttgggagctatgacaaattttgatgtgacttacaattggattcaagataaatgtgttcctcttgtccgagaaataacatttgaaaatggagaggaattgacagaagaaggactgccttttctcatactctttcacatgaaagaagatacagaaagtttagaaatattccagaatgaagtagctcggcaattaataagtgaaaaaggtacaataaactttttacatgccgattgtgacaaatttagacatcctcttctgcacatacagaaaactccagcagattgtcctgtaatcgctattgacagctttaggcatatgtatgtgtttggagacttcaaagatgtattaattcctggaaaactcaagcaattcgtatttgacttacattctggaaaactgcacagagaattccatcatggacctgacccaactgatacagccccaggagagcaagcccaagatgtagcaagcagtccacctgagagctccttccagaaactagcacccagtgaatataggtatactctattgagggatcgagatgagctttaaaaacttgaaaaacagtttgtaagcctttcaacagcagcatcaacctacgtggtggaaatagtaaacctatattttcataattctatgtgtatttttattttgaataaacagaaagaaattttgggtttttaatttttttctccccgactcaaaatgcattgtcatttaatatagtagcctcttaaaaaaaaaaaacctgctaggatttaaaaataaaaatcagaggcctatctccactttaaatctgtcctgtaaaagttttataaatcaaatgaaaggtgacattgccagaaacttaccattaacttgcactactagggtagggaggacttagggatgtttcctgtgtcgtatgtgcttttctttctttcatatgatcaattctgttggtattttcagtatctcatttctcaaagctaaagagatatacattctggatacttgggaggggaataaattaaagttttcacactgtgtactgtgttttactgattggttggatattgcttatgaaaattccatagtggtatttttttggattcttaatgtgtaacttaaacatactttgaagtggaggagagtcataagacagaacatttggcaggaattgtccttatgaaacaagaaaaagaaaatgaaaagtattattaagcttctgtgtttgtctaaaaatgtggcatatggatggcatttaaaactttgaatgaattatacctaaatctgggacagggaggtgacagtggaacaggctaccaatcagaactagatgacttttaaggctcctcctattatgagacttcaatttccaaagagaagaactagcagagaaattgtatttcagtaattttaagctccttctgtcttgtagagtcttgttatagttgtataaatcaaaaacacagaataaggaacatatttaactttttttcattataaaatggttagaggaccctaccccctctagattccctgatttccccaggcctgcagcatacagtaagatgggtccctgtgccaggcctcaatactgccagggaataaaaccagagggagaggaccctcagtgtcatatcaggaagcccagtgccagaggacagacaggttcaaaactggcttttcctctgggcctgggttggtgctataggccaagggtcattttatacttgggtataaatcaatcccagtttgggaaaagattatttttaagcttaaaaggctgacatgtgccattatatgtagtatgtaatatatgtaacatcttccaattcttttaaaataaaattaatatttataatggatatttaatgattgttatttttaaaaaccagcttataattcctcgttatgcatgatttatccaaagtttccatagttttattcaaaataataaatgttaataaggtgataaggggtatatttaatgtattgtatcaaattgtgaataagaaagtaggatggagctttctagaggttgggccttagttctgttatcctcattgcttttaaccaataagttaaatgaagttagagttatggtcttcaggttagattatggaccagatctgtgagggtcagcatggaaattcacattcaacaaggtagcacacaggaccaagagcagcacatgcaatcaactggaataatatagtaatcctgtaactgggtttgaaaaaataatcaacaaaagatacaattcaagggttaggttgcagagagctggcttgagagtagttattatgaaaaaggcctcaaggagtacgtgttcagtatgctctaagatgataaagtggctgttaaaaagggagttgatttgaggaagtattacttagcattcatgcatattgggcttaggctctagccctgccactatcattgtcttctctggactgtgaagtcactgaggacaaggaaactaaatttaatgtctgtatcactagtgcctagaatttctggacacttagtagtcaccatcaggcgtttatttaatgaatgagaagcaaagtgaccttggttacttttttaccctgaggggctcagcactcattaggacttggtgcctaattttataaaaagtcactaagctcaagtgcttggatgaaaggacagcgtggataaaaaggtttttaaaacatggatgttaaggctgttttgcttggagaagacttgggactgggacagtctttagatattatttgaaatgctggcactgtctatctggatcccagggcttgaactaggatttgaggaagtcacagggaagcagatttcagtctgacatttattcagtgcaagttttttggtgctgtagtatatgatgaaagatgtaaagctgaataaagcattatttctgccctagagttgttcacagcctagtcaggcatatggatatgtaaacaatgactgtaacgtgttatagatgtaaagacaaaataaaggttaaagagggcataaaggagcactcaattgcagagatttgaggacattatttttattttgagctttaaaaagatgaataggtgttctcaggaggtagggatctggctgagagggaataatctgagcaaaggtatgaaacagcctaatgcattagagaaaaaagttcttttagtaaggcatttggggttggggaagctagaaaaagaaatgggagctggtcacacagggccttgtgtgccagactaaggggtttgtagtatatattgtaggcagaagagatccatcaacagattgcaagcaaggaagtatgttcactttaaagtttgagaaagaatagtgtggaagcacgtctcaaatttagacttgttccccctctgaaccgtgaatcagaccatttcaggtagaagtcttccccggtttatctgatctactcggggcctcaggcttctcagctgggaagagaggatgcaagaccagactgaagaacacggttgagtccccagaaccaaaagggggcctttctgcttcttagccagctacctcttcgagtttttcaaattgtgagggggaccataaaaggatggaaacttttagatgacattctacaaattatttttttctttaaattaaaagaacctagccaataagatagagaatgggcatctaaggcatctcagagctctctgatgaagccaggttgtcaaagatcatttgcaaaagaagggaaaactggcatgacaaaagctacagagaggagagtgaaatatagaagtgtttgaaatgttcaagctcacaataagcttaaatttatagaaaatgctaaggttgtcaagaaggcttttttttttttcttttttaaacctgagggcaaaaaggaatggataaagtagtgtaatggattgacaatcaggaagaacagaataactcagttttttttctcctacaaggagatatggctggaccaaaataaaatgacatgaaattgcaaaaatgaaaa

SEQ ID NO: 56674 - DNA, 6051 bp, Homo Sapiens
gctgcagaagctgccgccacctccaatgcacaaggtgtctcatctgaaaagaaacctgagccccagggaggcggcgcggagcgaccctggcagagctggcgcaaacagggcgagaggtcgctgggcagcgttcgaggaccagagggagctcggccacagaagaccccagtgatctgatcccgggatcccggctccaagctctcctcgcattttacagatttcacccccgcgactatctccccaaaacggagcctttatatcaagagaaggtgcgggagctggggcaaccaggactttctcgggcacccaagatgcgctccattaggaagaggtggacgatctgcacaataagtctgctcctgatcttttataagacaaaagaaatagcaagaactgaggagcaccaggagacgcaactcatcggagatggtgaattgtctttgagtcggtcacttgtcaatagctctgataaaatcattcgaaaggctggctcttcaatcttccagcacaatgtagaaggttggaaaatcaattcctctttggtcctagagataaggaagaacatacttcgtttcttagatgcagaacgagatgtgtcagtggtcaagagcagttttaagcctggtgatgtcatacactatgtgcttgacaggcgccggacactaaacatttctcatgatctacatagcctcctacctgaagtttcaccaatgaagaatcgcaggtttaagacctgtgcagttgttggaaattctggcattctgttagacagtgaatgtggaaaggagattgacagtcacaattttgtaataaggtgtaatctagctcctgtggtggagtttgctgcagatgtgggaactaaatcagattttattaccatgaatccatcagttgtacaaagagcatttggaggctttcgaaatgagagtgacagagaaaaatttgtgcatagactttccatgctgaatgacagtgtcctttggattcctgctttcatggtcaaaggaggagagaagcacgtggagtgggttaatgcattaatccttaagaataaactgaaagtgcgaactgcctatccgtcattgagacttattcatgctgtcagaggttactggctgaccaacaaagttcctatcaaaagacccagcacaggtcttctcatgtatacacttgccacaagattctgtgatgaaattcacctgtatggattctggcccttccctaaggatttaaatggaaaagcggtcaaatatcattattatgatgacttaaaatataggtacttttccaatgcaagccctcacagaatgccattagaattcaaaacattaaatgtgctacataatagaggagctctaaaactgacaacaggaaagtgtgtaaagcaataaagcacattttgaaacaaacaatatgcacttcttttctgaagatgcttccgaagatttgaaaataggatccaaaacacggctgggtttcagcatccaccaatgaactgaaaggtgaataaaggacgttcatgagaaatcgactaccagctgatgaaatacctgcaaagtgctctaaaaattaaatattttgactttaagggtcctagtaagtgccacttccactaagaatacagtttgaatgtataatcagtagtgtttacaagatccaacagtgcactcatcattagttaacaaagcaaatatgttcatcactgtcaggctgcccacagcaacaccaagcatattagaagaggaaccccaggaacgcaactcagaccttgggaaattaaaccatccttgtcagcagaagccaagatggaagcagtttgagcaatgaaatccgtaagattaaacaactcaagtaaatgcttcagtcaggactctgagtctgatcatgaattttatgttttaatttatgttttttttttgtcttctggaatctcttttggtttggatattgggatgcttagaaatcctttctgagatgcatatgagtgaggaaataaactttaagtaattatttttaaagttcttatactttttaaaagctatcacacaaagacttttttttttttttttgtctcgctctgttgcccaggctggagtacagtggcgcgatctcagctcactgcaagctccgcctcccaagttcactccattctcctgcctcagcctccggagtagctgggactgcaggcgcctgccaccacgcctggctaattttttgtatttttagtggagacggattttcaccgtgttagccaggatggtctcaatctcctgacctcgtgatccacccgccttggcctcccaaagtgctgggattacaggcgtgagccaccgtgcctggccgacatttttaaaaaagttttattttgcacggctctaaacctccatgttattttccagtggtgtagaaggtaccagctaaagtgaaccactatgtaatattaggccattctaaaggaaagatgttccatgtcatcagagatggtaaaataggcagggaaaaaaaaatctttggtaccaaagattacacttgtgtttctacacagcaaaccatttttctttcatgaaaataatatattattaacatgaatatattattttgctattaatgtgaaagttgtctctaaatattttttaattttcaaactcatactttattttcatttgaaatgtttttcacaccttttgcattacataataattttgtggaagcattttgccctttagaataaatattagattgatatagctgaaatgtgacttccagttctttgatattccccttgttattcaaatagaaatatggaaatgctttatatattactgttaaatttcttagtgcagaaataacattattaatagagtattgttttcaaaacagatgattaatttcaagaggtttaacagtgaaattgtgtcaatattttgcatttaaaatgaatttaattgaccgatattttctgtagttaaatttagtcacaatatcacatatgttcttcaagaaacacatgaaattattaataaagtaattaaaaaatttttaatgtataacagaattgaccaataggccagttttctggtaacttatgatagtagattgtttctttagaaactgggcagaagctctgcattctcacttgtactttgatttcttatttcttgggcaggcaatttgaggaaagaagaaatggcatggggaatatatatgttttgtttcttagggaaaacagtctgagaaatgaataaaaagcatgaagtacgtgtgtgtgtgtgtgtgttaccatggaaaaggatattcacagtagtacagttctcaatatttttaattagatgtcatatttttttaatatagtaaaaccttgggatatagaatattacatcttttgagaatgtatgtgtctctaagtaagtaaaatctaatgcgtataggagactgatagctaaaaatgaatggaacattaatgtacttttataattaaacctcttatctatcagaaattgtaagagaatagatacatgttttgaatgtaaagttgaaaagtctggtttacttaataaattgaaagtgatttataaaatctaaatttggactacttgcaaatgataagctattctagtagcctttagtttaaatccaacagaaatctagaagtcacaagcaaatatcttaaaggtaaaatccatctgggcactcatttaaagtatatcttaaaaaagcagcagcaaggtaccttgccatttttagcatattttcttcctttttcttttttcttttttttttttttttgagatggagtctcactctgtcacacaggctggaatgcagtgatgccatctcagctcactgcaacctccacctcctgggttcaagtgattctcgtgcctcagcctcccaagtagctggggttacaggcgcccaccaccacactcggctaattttgtgtttttagtagagacaaagtttcaccatgttggccaggctggtcttgaacttcctgacctcaggttatccacccacctcagcctcccaaagtgctgggattacaggtgtgagccaccgcagccggaccatttttagtatattttcagtaaatacatttaaacaatgttaaggccacagcacacatatctcagccattcattgttctgtgcattgatgtttatctcatagatgcattgagtagtgcctttttagctttttcacattactttgtcaccatatcctttgtgttctctaaatacattgcccacttccaaaaatgttcagcatgaaaaaaagggcttcagtgtcgattgagattgcttttgttcatctcagggatttcaatagtcaagaatgaattcagttaaaggtatttagggttcaaagaagacaaactgtacaagcccatttcattccttgttgtatacctttccatctgccctcccattttaactatctactgtggcctttttatggaaacagagcaagatcaatgaaggctaatggcaagaataagaaaaagagttgagatttaaccaatagcggagcataaaggatcatgacaaaatcaaattataaaagcatacttgaaataggtggagctttttcttttgaaaatatatattcacaattttaatattttaatttattttttactatttaaccctgtacttggcaatgctcaggcagctgattgtgaaatattcttgtcctttacagaacatggttgttattgtgctgttgacatgaatagaccatggaaacattttcatcattattattcagcctgtgctgtagttaatgttaagttgctgaaataaaaagtgagcaagtaatagattttcttggcaaatctaatgattcagcccacaggactgttgaaactactgcggaagtttttctatctgaaagaaggtgctgggcattcaaatgtgttcatgtattgtatatcatatgaattgtatatcaattactaatgggaatttctacatatatgcttacaaaagcaatttatttaagtaatgctaggggtagtgtacataccaattagttattcagctactatacagaaaaaggatgaacaaattaatttatttctaattgagccagttagacataatgcatataacgtgatatttggttcatgaaagagttgttttcatgtggttattgtagggagtatatataattgtggaaggggtatgggaagagttgtgtatagttagttgttatctctacaagtttgaaagttttcccatcaaacattatcaatataccaatgttttaaaaattgagtgagggttattatttgtatttgatgaaagaaaatccaaataaagcccacctagaaatagatattttattatatatgtgctatagatatacctatatagtacaaatagacatgtgtgatgcatatatacaatgttatatatgtgtatatgtctgtatacacactgagtctgtaatatgtatacactaaatttgtgttatgctaacatcttcagggtctgcactgtgaactcccctggagataagtaagtccactttagaataaagaagttcttttgagacttcagttactaacgtgctttaagaggtatctactttataactgaattctatgtcgttcatacgtagagttacagtaagggtctagtatgtccaaatcttaataataaagaagaaaagtaaaggcttcaagctagcaatgtattcgaattacagttttcagattgtggctccaggccttgtgtttctcatttaagtagcaccttttaataaaaaccgtttctttgtgtaggcaaaagcacaagtgtttcaaatgtaaatagcaggaaaaaaaaagagtttacagagatagcattgctgcacagaataattgctactgagtatttcttatagaatttgtggaactgaaagatgaggtttattctgtcaagttcaagttcattctgttcaacactgttttcttattgtttgtgtatagcaaccgggtattattgttttatcatttgtaaaattgtaaaataaattaatccctttttttcactgaaaaaaaaaaaaaaa

SEQ ID NO: 56675 - DNA, 7935 bp, Homo Sapiens
agcgacggcggcggctgcggcttagtcggtggcggccggcggcggctgcgggctgagcggcgagtttccgatttaaagctgagctgcgaggaaaatggcggcgggaggatcaaaatacttgctggatggtggactcagagaccaataaaaataaactgcttgaacatcctttgactggttagccagttgctgatgtatattcaagatgagtggattaggagaaaacttggatccactggccagtgattcacgaaaacgcaaattgccatgtgatactccaggacaaggtcttacctgcagtggtgaaaaacggagacgggagcaggaaagtaaatatattgaagaattggctgagctgatatctgccaatcttagtgatattgacaatttcaatgtcaaaccagataaatgtgcgattttaaaggaaacagtaagacagatacgtcaaataaaagagcaaggaaaaactatttccaatgatgatgatgttcaaaaagccgatgtatcttctacagggcagggagttattgataaagactccttaggaccgcttttacttcaggcattggatggtttcctatttgtggtgaatcgagacggaaacattgtatttgtatcagaaaatgtcacacaatacctgcaatataagcaagaggacctggttaacacaagtgtttacaatatcttacatgaagaagacagaaaggattttcttaagaatttaccaaaatctacagttaatggagtttcctggacaaatgagacccaaagacaaaaaagccatacatttaattgccgtatgttgatgaaaacaccacatgatattctggaagacataaacgccagtcctgaaatgcgccagagatatgaaacaatgcagtgctttgccctgtctcagccacgagctatgatggaggaaggggaagatttgcaatcttgtatgatctgtgtggcacgccgcattactacaggagaaagaacatttccatcaaaccctgagagctttattaccagacatgatctttcaggaaaggttgtcaatatagatacaaattcactgagatcctccatgaggcctggctttgaagatataatccgaaggtgtattcagagattttttagtctaaatgatgggcagtcatggtcccagaaacgtcactatcaagaagcttatcttaatggccatgcagaaaccccagtatatcgattctcgttggctgatggaactatagtgactgcacagacaaaaagcaaactcttccgaaatcctgtaacaaatgatcgacatggctttgtctcaacccacttccttcagagagaacagaatggatatagaccaaacccaaatcctgttggacaagggattagaccacctatggctggatgcaacagttcggtaggcggcatgagtatgtcgccaaaccaaggcttacagatgccgagcagcagggcctatggcttggcagaccctagcaccacagggcagatgagtggagctaggtatgggggttccagtaacatagcttcattgacccctgggccaggcatgcaatcaccatcttcctaccagaacaacaactatgggctcaacatgagtagccccccacatgggagtcctggtcttgccccaaaccagcagaatatcatgatttctcctcgtaatcgtgggagtccaaagatagcctcacatcagttttctcctgttgcaggtgtgcactctcccatggcatcttctggcaatactgggaaccacagcttttccagcagctctctcagtgccctgcaagccatcagtgaaggtgtggggacttcccttttatctactctgtcatcaccaggccccaaattggataactctcccaatatgaatattacccaaccaagtaaagtaagcaatcaggattccaagagtcctctgggcttttattgcgaccaaaatccagtggagagttcaatgtgtcagtcaaatagcagagatcacctcagtgacaaagaaagtaaggagagcagtgttgagggggcagagaatcaaaggggtcctttggaaagcaaaggtcataaaaaattactgcagttacttacctgttcttctgatgaccggggtcattcctccttgaccaactcccccctagattcaagttgtaaagaatcttctgttagtgtcaccagcccctctggagtctcctcctctacatctggaggagtatcctctacatccaatatgcatgggtcactgttacaagagaagcaccggattttgcacaagttgctgcagaatgggaattcaccagctgaggtagccaagattactgcagaagccactgggaaagacaccagcagtataacttcttgtggggacggaaatgttgtcaagcaggagcagctaagtcctaagaagaaggagaataatgcacttcttagatacctgctggacagggatgatcctagtgatgcactctctaaagaactacagccccaagtggaaggagtggataataaaatgagtcagtgcaccagctccaccattcctagctcaagtcaagagaaagaccctaaaattaagacagagacaagtgaagagggatctggagacttggataatctagatgctattcttggtgatctgactagttctgacttttacaataattccatatcctcaaatggtagtcatctggggactaagcaacaggtgtttcaaggaactaattctctgggtttgaaaagttcacagtctgtgcagtctattcgtcctccatataaccgagcagtgtctctggatagccctgtttctgttggctcaagtcctccagtaaaaaatatcagtgctttccccatgttaccaaagcaacccatgttgggtgggaatccaagaatgatggatagtcaggaaaattatggctcaagtatgggtgggccaaaccgaaatgtgactgtgactcagactccttcctcaggagactggggcttaccaaactcaaaggccggcagaatggaacctatgaattcaaactccatgggaagaccaggaggagattataatacttctttacccagacctgcactgggtggctctattcccacattgcctcttcggtctaatagcataccaggtgcgagaccagtattgcaacagcagcagcagatgcttcaaatgaggcctggtgaaatccccatgggaatgggggctaatccctatggccaagcagcagcatctaaccaactgggttcctggcccgatggcatgttgtccatggaacaagtttctcatggcactcaaaataggcctcttcttaggaattccctggatgatcttgttgggccaccttccaacctggaaggccagagtgacgaaagagcattattggaccagctgcacactcttctcagcaacacagatgccacaggcctggaagaaattgacagagctttgggcattcctgaacttgtcaatcagggacaggcattagagcccaaacaggatgctttccaaggccaagaagcagcagtaatgatggatcagaaggcaggattatatggacagacatacccagcacaggggcctccaatgcaaggaggctttcatcttcagggacaatcaccatcttttaactctatgatgaatcagatgaaccagcaaggcaattttcctctccaaggaatgcacccacgagccaacatcatgagaccccggacaaacacccccaagcaacttagaatgcagcttcagcagaggctgcagggccagcagtttttgaatcagagccgacaggcacttgaattgaaaatggaaaaccctactgctggtggtgctgcggtgatgaggcctatgatgcagccccaggtgagctcccagcagggttttcttaatgctcaaatggtcgcccaacgcagcagagagctgctaagtcatcacttccgacaacagagggtggctatgatgatgcagcagcagcagcagcagcaacagcagcagcagcagcagcagcagcagcaacagcaacagcaacagcaacagcagcaacagcagcaaacccaggccttcagcccacctcctaatgtgactgcttcccccagcatggatgggcttttggcaggacccacaatgccacaagctcctccgcaacagtttccatatcaaccaaattatggaatgggacaacaaccagatccagcctttggtcgagtgtctagtcctcccaatgcaatgatgtcgtcaagaatgggtccctcccagaatcccatgatgcaacacccgcaggctgcatccatctatcagtcctcagaaatgaagggctggccatcaggaaatttggccaggaacagctccttttcccagcagcagtttgcccaccaggggaatcctgcagtgtatagtatggtgcacatgaatggcagcagtggtcacatgggacagatgaacatgaaccccatgcccatgtctggcatgcctatgggtcctgatcagaaatactgctgacatctctgcaccaggacctcttaaggaaaccactgtacaaatgacactgcactaggattattgggaaggaatcattgttccaggcatccatcttggaagaaaggaccagctttgagctccatcaagggtattttaagtgatgtcatttgagcaggactggattttaagccgaagggcaatatctacgtgtttttcccccctccttctgctgtgtatcatggtgttcaaaacagaaatgttttttggcattccacctcctagggatataattctggagacatggagtgttactgatcataaaacttttgtgtcacttttttctgccttgctagccaaaatctcttaaatacacgtaggtgggccagagaacattggaagaatcaagagagattagaatatctggtttctctagttgcagtattggacaaagagcatagtcccagccttcaggtgtagtagttctgtgttgaccctttgtccagtggaattggtgattctgaattgtcctttactaatggtgttgagttgctctgtccctattatttgccctaggctttctcctaatgaaggttttcatttgccattcatgtcctgtaatacttcacctccaggaactgtcatggatgtccaaatggctttgcagaaaggaaatgagatgacagtatttaatcgcagcagtagcaaacttttcacatgctaatgtgcagctgagtgcactttatttaaaaagaatggataaatgcaatattcttgaggtcttgagggaatagtgaaacacattcctggtttttgcctacacttacgtgttagacaagaactatgatttttttttttaaagtactggtgtcaccctttgcctatatggtagagcaataatgctttttaaaaataaacttctgaaaacccaaggccaggtactgcattctgaatcagaatctcgcagtgtttctgtgaatagatttttttgtaaatatgacctttaagatattgtattatgtaaaatatgtatatacctttttttgtaggtcacaacaactcatttttacagagtttgtgaagctaaatatttaacattgttgatttcagtaagctgtgtggtgaggctaccagtggaagagacatcccttgacttttgtggcctgggggaggggtagtgctccacagcttttccttccccaccccccagccttagatgcctcgctcttttcaatctcttaatctaaatgctttttaaagagattatttgtttagatgtaggcattttaattttttaaaaattcctctaccagaactaagcactttgttaatttggggggaaagaatagatatggggaaataaacttaaaaaaaaatcaggaatttaaaaaaacgagcaatttgaagagaatcttttggattttaagcagtccgaaataatagcaattcatgggctgtgtgtgtgtgtgtatgtgtgtgtgtgtgtgtgtatgtttaattatgttaccttttcatcccctttaggagcgttttcagattttggttgctaagacctgaatcccatattgagatctcgagtagaatccttggtgtggtttctggtgtctgctcagctgtcccctcattctactaatgtgatgctttcattatgtccctgtggattagaatagtgtcagttatttcttaagtaactcagtacccagaacagccagttttactgtgattcagagccacagtctaactgagcaccttttaaacccctccctcttctgccccctaccacttttctgctgttgcctctctttgacacctgttttagtcagttgggaggaagggaaaaatcaagtttaattccctttatctgggttaattcatttggttcaaatagttgacggaattgggtttctgaatgtctgtgaatttcagaggtctctgctagccttggtatcattttctagcaataactgagagccagttaattttaagaatttcacacatttagccaatctttctagatgtctctgaaggtaagatcatttaatatctttgatatgcttacgagtaagtgaatcctgattatttccagacccaccaccagagtggatcttattttcaaagcagtatagacaattatgagtttgccctctttcccctaccaagttcaaaatatatctaagaaagattgtaaatccgaaaacttccattgtagtggcctgtgcttttcagatagtatactctcctgtttggagacagaggaagaaccaggtcagtctgtctctttttcagctcaattgtatctgacccttctttaagttatgtgtgtggggagaaatagaatggtgctcttatctttcttgactttaaaaaaattattaaaaacaaaaaaaaaataaatttttttgcaatcctttcctcagacctggctccaggctaactggaaggcagcactcccttttttatatagtagaaaaatgaagtttattataagtttttatattttctacttgttcatttggtgcaaactcaagatttcttttaataggtgcagtctttgagataatttgtttttacctgtattgccctttatcttttttaggtaattctttgtactcctgctgtctacctctcctcacaccccagcaccccccattttttcaaaccttggtatctgttgggtgaacagtataatcttttcatctgcttttagaatgtgggatatttccagtacctactttttttttttttttttgctgaatccaaagatatataaataaaatatatatattttataaagatcagaatgatataaaggagatacatgtttcttcctttaaaaaataaacggaagttacattgttaatgttcatattatgatgccacttttctaaactgcatctggattgaaaggtgtaaatatcaataacagtgctacttagttatcagtatttaatatctgaggtgagttgggggtatctatattaggggtagggtattacagaagataattggcttgatgtcctagaagttctttgatccagaggtgggtgcagctgaaagtaaacagaatggattgccagttacatgtatgcctgcccagttccctttttatttgcagaagctgtgagttttgttcacaattaggttcctaggagcaaaacctcaaggattgatttattgttttcaactccaaggcacactgttaataaacgagcagggtgttttctctcttcctttctaatatatggagtttcgaagaataaaatatgagagcaatatttaaattctcaggaattgacttatactcttgagaatgaattcagtttcaatcaagtttacattatgttgcttaaaaaaatagaaattattctttatcttgcaaagaattgaaaccacatgaaatgacttatgggggatggtgagctgtgactgctttgctgaccattttggatgtcattgtaaataaaggtttctatttaaaa

SEQ ID NO: 56676 - DNA, 2549 bp, Homo Sapiens
cagtctaagggcacagaatggaaaggttctcattttcctcctccaatgagaattggcaccccaacagcaggccctgggccctcggctgtgatggaggggtgtctcggggtagcagtactaaggaagctctccaccttcagtgcatacttggaggaccacagctacaacgtggagcagatatggagggatattgaggacgtcatcatcaagaccctcatctcggcccaccccatcatcaggcataactaccacacctgcttccccaaccacacactcaacagcgcctgctttgagatcctgggctttgacattttgttggaccacaaactcaaaccctggctgctggaggtcaaccactctccaagcttctccaccgactctcggttggataaagaggtgaaagatggtctgctgtatgacaccttagtcctgatcaacctggaaagctgtgacaagaagaaagtcttggaggaggagagacaacgggggcagttcctgcagcagtgttgttctcgggagatgaggattgaggaagccaagggtttccgggccgtgcagttaaagaaaactgaaacgtatgagaaggaaaactgtggagggttccgactgatttatcccagtctgaattcggagaagtatgagaagtttttccaggacaacaactccctcttccagaatactgttgcttccagggctcgggaggagtatgcccggcaactgatccaggagctgagactaaaacgggagaaaaagcccttccaaatgaagaagaaggtagagatgcagggggaatcggcaggcgagcaagtgagaaagaagggcatgaggggctggcaacagaaacaacagcagaaagacaaggccgccacccaagcctccaaacagtacatccagccattgacattagtatcctacacacctgacttgctcttgagtgtcagaggtgaaaggaaaaatgaaacagacagcagcctcaaccaggaggctcccacggaggaggccagctctgttttccccaagctgacgtctgcgaagcccttcagttctctacccgatctgaggaatatcaatctcagcagctcgaagttggagcccagtaaacccaacttcagcatcaaggaggccaagtctgcctctgcagtgaacgtattcactggcactgtgcacttaacctccgtagaaaccaccccagaatccaccacccaactctcaatctccccaaagtctccgccaaccctggctgtgaccgccagctctgagtacagtggcccagagacggacagggtggtatcctttaaatgcaagaagcagcagacccctccacacttaacccagaagaaaatgttaaaatcttttctgcccacaaaatccaagagcttctgggagagtccgaacacaaactggactttgctaaagagtgacatgaacaagccacatttgatatccgagctactcaccaagcttcaactgagtgggaagctctccttcttcccagctcactacaaccccaagctggggatgaataacctgtcacaaaacccctccctgcctggggagtgccactcccgcagtgacagctctggcgagaagaggcagctggatgtgtcctccctcctcttgcagagtcctcagagctataatgttactctgagggacctgctggtgattgccactccagcccaactggatccaaggccttgtagaagccacgcaagtgctatgagggacccatgtatgcaggatcaagaagcatacagccattgcctgatctctggccaaaaaggatgtgagaggagctagaatcagactggatctctgccacttttcccttcctacctcttaacttgcaggaaacaatgtgtctcttccggcagtgtctccagtgttcacagaatcaactgaagttttgtttgctcatctagatatactggtcttccattagttcctagtagcagcagtggggccaacagccctgcctctgttccctcccagttagcttacagtgctacaggaccatgatttctggggttggattggtgctgccccaggacacactccagttgccgtaccagtggcacttctctgggttcttcacatggcaccatcatccagaatactcccccagataaagcaacttcgggagtagtgtttcagagaaggactcatgatttccaggagtcaaaagccctcagtccaccaacagaactatgccagttggtcttcatctccaagataaaagatgaggtcagggatgggcatggtgcataactctgagccctgagtgagagaactgaggcagctgcaacttcacaaggtcaaggcccgacctccgcccatccccaccagcccaaagacttgccacctcagtgcccgagcatcctctggtgacctccctcaccagcccaacttaatctcaccagtgaaaacagaggtgaggcgagagtacccagcctgaagatgcttcttctatcagcctgcagaaatgttacactttcccttcaggcatccattaataaaagaaattgccatgcttaaaaaaaaaaaaaaaa

SEQ ID NO: 56677 - DNA, 5443 bp, Homo Sapiens
cccttttctccgccttttccgcgctccatcttgccctcctccctccttcgcccccgctcctactctccccttcttcccctctctccctaccccctccctttctggggcaggcgtttctccgaggcgcactgaggctccggggcgagtccgcgcagcgcgagctggggaaagccgtccggggctcccgatgaccctgcactccgccgggaggccgcccttcggaaaagccgtggaaacacacccggattgaaatgcccctggcccgcctgacccgaccctaggagaagcagccgagttacccgacatcgtggtcagcaggagctgggtcggtggctggatgctgcagcagcagggactcagcgcctgggagggctcctggggcagggagagaagcagagatgcaacatttttaaaatttcacaaagcatccggctgcacccaggtccctggaacaggagacaaacagaattaatgttttataccttcgggtataggtttgagttttttccccctcatgccaagtatttaaaacctctagaaacccatgatttgacaatcaatgattgcgcgatactttcaatttgaatattcaaaggcttaacaaaatggactatcttctgcagaaatcctgcacacaggcaccccacagagagtccagagaaacagggagtgagacccctttgggtcctggcccttgcttttattatagtttgagcattttgtcctccttcccacagatagagcagatgtcctcaaagatgctctgtatttcagccttcagggcagctaagaagccatgagtgacttaggctgccctggccatgaacaccggagccagactggctggccagactgattcccgcatcccccatctgtgttttgaggggaaatctcaggttttgaggaatgaacatggcagctagtgggtgtggcacagcaagaagtcgctctgggcccaggtggcaggccagcggcctagcagaggccttcgctctgcacctcctatttttctggctccgcctggctaccagcgggcttccctccccctttcatcccgctcttcctgggcccgacactggggtttctgctcagaatgactgcccattaagaccctttcctcctccccacagagctggggatgccaggagcctcatcctctggagactttctgactctgggtttcaccaccgcactgcgaagtgccctctttgctttttcgccttctagagccacccctgcctttttgctgtaggagcacatgttaggaaacaatgacaagtttggctcctgctcattttaactgaaaggatgtggacttaggttcaagccttctcccattggggtgagaagggggagggacttgggatcaggcttcccccttggtccaggcccaagcccctcactaatgacttgggattctactgggtcatcttctgtgagtacttactgtgcctcttccatgtgatttggaaggtgaggagacaggaatggtccacagagggagagagtgccaggccaagtcctctcatagccacccgccccctccacagaaggggacagcaagagaagagagaggcatggtgaggttccttttgcaaataaccaagatatttccaggattcaagaccagtccatggttttaggcctctgctgtttattctctgagttctcagaaatgcaaaaagtgtagtttagccccagaggcctcaagaaaaagattggggtgcccccaaatgtgtcaaatacagagggaaacacacagagcttagggaaagggcaactgagaatgacaagactgataggaattgcttggcagctgaagccacatctctgggggagaggagcaggcctgggaacacctgaggtggcacctggcagtggagggcaggatggatgtattgaaatctgacagcttctggaacttctttctacaaatgcccctgagcctgtgtcctaggtttccctgatggaccagacctgaggaggggaaggacaatgggggtggagatggcacctcccctccctgcatgccttcttcctcgctgtgcctaggccttgccccctctgaaggaacagtgaaccaagcagcttggaatctagggatggtctcttgtcctcatagcgtcttccattacttcttttcttcgctgctctcctcctttttgttatactcttattttttgatttgcttttaaaaaccttctttgttgcatttttgtttatttctttctgtgtttctttgtctctcttcctgtcattgctttcttccatttcttatctgtactactggttttctccctggcttcacgtgtctctgtgttcccctatgctggggtgtcctcccagtgctttcaggcttcatctccttcctaacctctcctttctattttttttttttttttttttgagatggagtcttgctcagtcgcccaggctggagtgctaacctctcctttcatgtggagatggacagggatggcaggagcactgagtgctcttgacaacaccattgaagatgatgctgacgatcagctaccctgtggagaaggcaggccaggctgggtgagaggggagctccttggaagtcagggggtctgtaaggacagcaaggatctctttgtcccaacctccagcagcctttatgggtgcttctgtgttggccttgtttctgggatggccatctcagtgctgttgctggctagcgatttcagaaaactagatttttctaggcctgagccctgttttgagaaagaagcttccctctggtttgtagctcaacattaatgagttttggttcctgttgtttctataattacaaaaccccagcacaggtatttaagagccaaaggccatgcttgtggaagtaagggaggatctttctaaatggatcctgcaaatcctccttacagatctgagtggatgatcaggcccagagcaaccctgagaccccaggtacccacagcattggctgttcttcataggagactcagagaagacttcataggagactcattattgtttactggacatcaggtgctatattgtatagcattcacattccacaggtgaggaaacaggctcagaggaataagtggcatgccaagatcactgagtatatcagtagcagaattaggattcagactttgttaggcctaactccaaagccctggctttttttttttttgagatggaatcttactctgtcaccgggctggagtgcagtggcatgatctcagctcactgcaatctctgcctcctgggttcaagtgattcccctgccttagcctcctgagtagctgggactacaggcatgcaccaccacgcccagctaatttttgtgtttttagtagagaggaggtttcaccgtgttggccaggatggtctcaatctcttgaccttgtgatctgcctgcctcggcctcccaaagtactgggattataggcatgagccaccatgcccggcctttgctcttaactactgatgttgtcttcctgatcttttctacaagaagcttttaaactttttggactttaacctacaataagaaatccattttacatgttcacatgtatctataacaacatttatatttctaaaacaaacttttcatgaaacaagatatacctacatatgtcaggcactctgatattttctattctagtccaccttttccatttcattctatttatgggaaatatatgttggttgggagtcactgagttaatttaatgacccactaataggctgtgagtggcattggaaaaatacctgcttgtaagatatgcgaacacacgtttcaaggttgtttgtgcatgtggaaatattttggggtgctatctgttttaccatcagtttgtacaaggacactaagacagtgtagcctgctgacttgagaatgttctgtaaggactggaaacactagaatcttgaagaaacgcctggctagaggtgagggtaagctgttaattacactgattacagtttgtgcctctcagactgagaactcttttcttcttgctgggggcattgctatctctaggatgtttgccctgaagtcctgatagtctctttggggttttaataaatggctgaaaaaattgttgtggggtttcaacaggcgttcataggcacccttgcttggcaatataacatggcttttgatgtttgggtgttggaagggatctttgaagtgctgagagggactcagtctttttccaaaatctctgcttgtgtctgtccagcctctggctccactgcttggctgagatcctggcccatagtagaatctgtgtagaggaaacgagagctcactatttgtgaggcagcctgttccactattggactgctttaaatgtagtgatcagtgattatgctataatccaatcatgtattaattgggcaccaactatgcactaggcatggtatcaagtaccaggagtacaaaaataagtaaaccttgatttctgctatcaattactctcttctcctacttctgtactactgcttttctattgtgagtttgtttagttcattaattggtttattcattcattcaacaatcatatactgattagctactctgaccaggtccagtactaactctgaagaagttatgcccatcccatcttcaccccaagccttctccttttgagactcctcatccagtttctttagttcttcatatatcactgtttttcagatctctggctatccttgccattgacctcagaaatcctgtatttgaccttaaccttcttatacccagtccatacccaaagtgatggaaatggaatagatttctttttaaagttttaaacgaatattttgactgaaaaattttggcagtcttgtatgcaaatgacactgcagagcattgttttctcccccccacgtaggagattttattcaactaaggcacaggcatattaaaagactttcagtataaggaaaaggggtagtttattccctccaaatttgactacagctcgaaattgtctttattaatgcaaagttcttttgtcaccttgactttgggacactgttaccaaacctcgtgggaaatatcaagttccagaagattgaatacatgcaggaaacaaatgttttttgggccctagagtgaacatttggtccatatgaaaatgaccaggaagacaattaggtgaaggttttttaatgatttgtgctacgtcagtctcttcccataagacatattcaaagttttaacttttccttaagaggcttccatggggagcaagcatttgataattcatcctttaagaaaaacaccaccgtacactgcttgaagagttcctcttctattacttaaaacgtttttattgtgcaacatttaaggcatacaaaaacatataaagaataccatgatgaaaatctatgactgtattaccaagcttaagaaataaaacagttgagtgatctctca

SEQ ID NO: 56678 - DNA, 2756 bp, Homo Sapiens; identical to SEQ ID NO: 25259

SEQ ID NO: 56679 - DNA, 3024 bp, Homo Sapiens
aggatatctttagccaaaggaaaagctccgcattcccacccagtccagaaattgaaatactatcagggggcaagagcctttctctccagctacacactccatctcccgggagcaaggggaaactccgagaggagggcaacagagccagcatcttgccagggccccggaggaggggttccccgctacgcctgtgccggaggagttccagtcaccgagcgaggggcgcaagggtgggtgcatcctgcgctgcggcgggcgcgctacccagacgctggtgtgcagagccacatgaagcctgctggggactgggggccagggagcagcaagccagctgggactgaggcggacgctgtctcagggagacgctgactcgcaaagacactcccttccttgtgcctgggtaaaaagtctcctcctggggtccctggccatcctgaatatccagaatggtgtttctgaagttcttctgcatgagtttcttctgccacctgtgtcaaggctacttcgatggccccctctacccagagatgtccaatgggactctgcaccactacttcgtgcccgatggggactatgaggagaacgatgaccccgagaagtgccagctgctcttcagggtgagtgaccacaggcgctgctcccagggggaggggagccaggttggcagcctgctgagcctcaccctgcgggaggagttcaccgtgctgggccgccaggtggaggatgctgggcgcgtgctggagggcatcagcaaaagcatctcctacgacctagacggggaagagagctatggcaagtacctgcggcgggagtcccaccagatcggggatgcctactccaactcggacaaatccctcactgagctggagagcaagttcaagcagggccaggaacaggacagccggcaggagagcaggctcaacgaggactttctgggaatgctggtccacaccaggtccctgctgaaggagacactggacatctctgtggggctcagggacaaatacgagctgctggccctcaccattaggagccatgggacccgactaggtcggctgaaaaatgattatcttaaagtataggtggaaggatacaaatgctagaaagagggaatcaaatcagccccgttttggagggtgggggacagaagatggggctacatttcccccatacctactatttttttatatcccgatttgcactttgagaatacatctaaggtcatctttcaaaagagaaaaattggacacttgagtgactttgtttttagttttgtttttgtacattatttatgtgattgttatggaattgtcacctggaaagaacaattttaagcaatgtcatttctagatgggtttctaattctgcagagacacccgtttcagccacatctaaaagagcacagtttatgtggtgcggaattaaacttccccatcctgcagattatgtggaaatacccaaagataatagtgcatagctcctttcagcctctagccttcactcctgggctccaaaagctatcccagttgcctgtttttcaaatgaggttcaaggtgctgctttgcatgcctgccaacccatggaagttgtttcttacttcttttctctcttatttattaaccatggtctgagagttgtttttgttctatgtaacagtattgccacaaaactataggcaaatcgtgtttgcagggagatttctgatgcctctgtgggtgtgtgtaagttaaagtggccacatttaagaaggccaagctttgtagtggttgcacagtcacactgatatgctgatttgctctttctcattgtatgtctatgctttgtcatcagtgctatagtaaattacaaagaaataggtagattgtatgaacatacccacaaatgcctatgatttaggttaccaatgtattctttctcatttggggttttgcttctgtctgtctgtttattggaaacttgtacttcaagtagggggaatcctaattctaataactccttagctaagttttattattcaggcaataaacatgttttcatgtaatactggcttactttgtaatttacatctgtaactttcatatttctaaaaggggccaatgcaaaaggagagagaaggactggatttaagccagtttacttagagtatatgataaagaaggcagaggaatagctacatatttggcaattctcctctctgtagtcaccctgacatcctcacaagaaaacaaatctagccattgcccaaactttaaatttgatctctataggtctgcttaaagactcaaattttctccagtttctctcataaattcaattgcaaaagtttctgacaaggctcataccctgtacccttatgcagagcaagcattccatcctaagttataaactacagtgatgtttaattttgaagccaggtctacattatttaattaatggcttcaaaaggtggagatgcactttatttaatgtctttccctagctaattcttactctcaccttaaatatgctttcttgttgcatatatgcacagatacacacacacacacacacgaaaataaataaatgttcatattcttctgttcaacagacatttattttctcctctcccttgaataagaaaataagttttccattcctatgaactgtctaatatctttctattacagaaggggaaactgaggctgggaaaggctaaatgacttatcctccatcagttataacagcccctggtcttcttaaatttaaacacgggacttcccgaactaatttttttaaggatactgaaaaatgagagagagtggtcgaatgcctgaaattttgcttaacttactgtacttaaaatcaattataacttctttttgttactcagggccccactttttgttgctttctagacttgtgtgtagaaagaagattaatgatcacttaaagtagtttccttctttattctgaaaaaatgaggaaaaaataacaacagtggcaaataaaatcatatttggtactaaaaaaaaaaaaaaaaaaaaa

SEQ ID NO: 56680 - DNA, 7401 bp, Homo Sapiens; identical to SEQ ID NO: 24965

SEQ ID NO: 56681 - DNA, 1909 bp, Homo Sapiens
ggaaaaaagctaccgtggcacgtgccccggggagtgatgcggtggcccggtttgcacggagagcgggacaccgcctggggagccgcgctcgtagcctgggggcgggacgcggcggccgctccctccgcccccgagtagctgccaccgcctggctgcgccccagcccagtagctcagacgcggccgcatcccggtggactgtagaggcggcagcgagctagagcccgagtcgcagctccgggccgcagagcgctgggcgagcgcgagcgccagggcaccggcagggcaggcagctgcgcgcggctggagtcatgctatactgaaaagacacttcatcaagataactctgggagaagcagaaaaccctgtgccagggacaggaaagataggagaaagaaagtttatcagaattttttaaacctgtctcagaaataacaacatattttaatcagagatttatgttgctatgaggacagattcatcaaaaatgactgacgtggagtctggggtcgccaattttgcatcttcagcaagggcaggccgccggaatgccttaccagacatccagagttcagctgccacagacggaacctcagatttgcccctcaaactggaggctctctccgtgaaggaagatgcaaaagagaaagatgaaaaaacaacacaagaccaattggaaaagcctcaaaatgaagaaaaatgaaggctcataatctatcaagagtgctgaatttctgcatgttgaaagacttagtggttctgttttcttgagacatttaatctggtggtaactgtggtaacattgcagccctaagcagcatgtgtatattagataattgtgttgtgatgctactcactttgattgcaatgatgatgtccaaggtaagctattaaaaggcaggttacttccaaatcgcactgaaggaaaaggttaagaataatacatgatcacagaaatgcataccactgtctgtaaacccaacaaaattcactgttctcttttggatttatttagcctgatgtatttttaattcaatttttatggtgatgggcaaatcattcttggtaaatgtaaatcaaacatgattgatttaaaacttcatggaatttgtagaaaattatggacatttttggtgagaaagaacaatagtcaaaactcacatggatagagtgtgtttgttttttgccaaaaatgccccagactttttcccaaacctcaaaaacgtcttggaaaaattgtaaaagtttgataacagaaacatctttaggatatttttgtctgacatattttgcttctagtatgtgcctactgtgatttttttcatgtggaaaatgcaaaatttgtaacaaaatggttatatggaacatgcctattaaatgaattttactatcttccctaactttggtctgtgtatgtgtgtgtgttttactttaatatgaattatacaaaatactagttgttttacactctcttttcttattcttagggcttttgtgtatgtctgacttgtttttaaataacttcctcagcaatgcagaccttaatttttatatttttttaaagtagctaacatagcagtaggcacttaagcatttagtcaatgatattggtagaaatagtaaaatacatcctttaaatatatatctaagcatatattttaaaaggagcaaaaataaaaccaaagtgttagtaaattttgatttattagatattttagaaaaataatagaattctgaagttttaaaaatgtcagtaattaatttattttcattttcagaaatatatgcatgcagttatgttttatttgattgttgacttaggctatgtctgtatacagtaaccaaataaactctttcactattaaagagatttcttactgaaaaaaaaaaaaaaaaaaaaaaaaaaaaaa

SEQ ID NO: 56682 - DNA, 7163 bp, Homo Sapiens; identical to SEQ ID NO: 24018

SEQ ID NO: 56683 - DNA, 2447 bp, Homo Sapiens
gcggccgctcagtctgggcgcttgcaggctgctaaacccaaccgcagttgactagcacctgctaccgcgcctttgcttcctggcgcacgcggagcctcctggagcctgccaccatcctgcctactacgtgctgccctgcgcccgcagccatgtgccgcaccctggccgccttccccaccacctgcctggagagagccaaagagttcaagacacgtctggggatctttcttcacaaatcagagctgggctgcgatactgggagtactggcaagttcgagtggggcagtaaacacagcaaagagaatagaaacttctcagaagatgtgctggggtggagagagtcgttcgacctgctgctgagcagtaaaaatggagtggctgccttccacgctttcctgaagacagagttcagtgaggagaacctggagttctggctggcctgtgaggagttcaagaagatccgatcagctaccaagctggcctccagggcacaccagatctttgaggagttcatttgcagtgaggcccctaaagaggtcaacattgaccatgagacccgcgagctgacgaggatgaacctgcagactgccacagccacatgctttgatgcggctcaggggaagacacgtaccctgatggagaaggactcctacccacgcttcctgaagtcgcctgcttaccgggacctggctgcccaagcctcagccgcctctgccactctgtccagctgcagcctggacgagccctcacacacctgagtctccacggcagtgaggaagccagccgggaagagaggttgagtcacccatccccgaggtggctgcccctgtgtgggaggcaggttctgcaaagcaagtgcaagaggacaaaaaaaaaaaaaaaaaaaaaaaaaatgcgctccagcagcctgtttgggaagcagcagtctctccttcagatactgtgggactcatgctggagaggagccgcccacttccaggacctgtgaataagggctaatgatgagggttggtggggctctctgtggggcaaaaaggtggtatgggggttagcactggctctcgttctcaccggagaaggaagtgttctagtgtggtttaggaaacatgtggataaagggaaccatgaaaatgagaggaggaaagacatccagatcagctgttttgcctgttgctcagttgactctgattgcatcctgttttcctaattcccagactgttctgggcacggaagggaccctggatgtggagtcttcccctttggccctcctcactggcctctgggctagcccagagtcccttagcttgtacctcgtaacactcctgtgtgtctgtccagccttgcagtcatgtcaaggccagcaagctgatgtgactcttgccccatgcgagatatttatacctcaaacactggcctgtgagccctttccaagtcagtggagagccctgaaaggaggctcacttgaatccagctcagtgctctgggtggccccctgcaggtggcccctgaccctgcgttgcagcagggtccacctgtgagcaggcccgccctggggcctcttcctggatgtgccctctctgagttctgtgctgtctcttggaggcagggcccaggagaacaaagtgtggaggcctcggggagtggcttttccagctctcatgccccgcagtgtggaacaaggcagaaaaggatcctaggaaataagtctcttggcggtccctgagagtcctgctgaaatccagccagtgttttttgtggtatgagaacaggcaaaaagagatgccccgagatagaaggggagccttgtgtttctttcctgcagacgtgagatgaacactggagtgggcagaggtggcccaggaccatggcacccttagagtgcagaagctggggggagaggctgcttcgaagggcaggactggggataatcagaacctgcctgtcacctcagggcatcactgaacaaacatttcctgatgggaactcctgcggcagagcccaggctggggaagtgaactacccagggcagcccctttgtggcccaggataatcaacactgttctctctgtaccatgagctcctccaggagattatttaagtgtattgtatcattggttttctgtgattgtcataacattgtttttgttattgttggtgctgttgttatttattattgtaatttcagtttgcctctactggagaatctcagcaggggtttcagcctgactgtctccctttctctaccagactctacctctgaatgtgctgggaacctcttggagcctgtcaggaactcctcactgtttaaatatttatttattgtgacaaatggagctggtttcctagatatgaatgatgtttgcaatccccattttcctgtttcagcatgttatattcttataaaataaaagcaaaagtcaaatatgaaaaaaaaaaaaaaaaaaaaa

SEQ ID NO: 56684 - DNA, 5826 bp, Homo Sapiens
ccaggagagcggcgtggacgcgtgcgggcctagaggcccacgtgatccgcagggcggccgaggcaggaagctgtgagtgcgcggttgcggggtcgcattgtggctacggctttgcgtccccggcgggcagccccaggctggtccccgcctccgctctccccaccggcggggaaagcagctggtgtgggaggaaaggctccatcccccgccccctctctcccgctgttggctggcaggatcttttggcagtcctgtggcctcgctccccgcccggatcctcctgaccctgagattcgcgggtctcacgtcccgtgcacgccttgcttcggcctcagttaagcctttgtggactccaggtccctggtgagattagaaacgtttgcaaacatgtcccggatcgaaaagatgagcattctgggcgtgcggagttttggaatagaggacaaagataagcaaattatcactttcttcagcccccttacaattttggttggacccaatggggcgggaaagacgaccatcattgaatgtctaaaatatatttgtactggagatttccctcctggaaccaaaggaaatacatttgtacacgatcccaaggttgctcaagaaacagatgtgagagcccagattcgtctgcaatttcgtgatgtcaatggagaacttatagctgtgcaaagatctatggcatggtgaaaaggtcagtctgagctctaagtgtgcagaaattgaccgagaaatgatcagttctcttggggtttccaaggctgtgctaaataatgtcattttctgtcatcaagaagattctaattggcctttaagtgaaggaaaggctttgaagcaaaagtttgatgagattttttcagcaacaagatacattaaagccttagaaacacttcggcaggtacgtcagacacaaggtcagaaagtaaaagaatatcaaatggaactaaaatatctgaagcaatataaggaaaaagcttgtgagattcgtgatcagattacaagtaaggaagcccagttaacatcttcaaaggaaattgtcaaatcctatgagaatgaacttgatccattgaagaatcgtctaaaagaaattgaacataatctctctaaaataatgaaacttgacaatgaaattaaagccttggatagccgaaagaagcaaatggagaaagataatagtgaactggaagagaaaatggaaaaggtttttcaagggactgatgagcaactaaatgacttatatcacaatcaccagagaacagtaagggagaaagaaaggaaattggtagactgtcatcgtgaactggaaaaactaaataaagaatctaggcttctcaatcaggaaaaatcagaactgcttgttgaacagggtcgtctacagctgcaagcagatcgccatcaagaacatatccgagctagagattcattaattcagtctttggcaacacagctagaattggatggctttgagcgtggaccattcagtgaaagacagattaaaaattttcacaaacttgtgagagagagacaagaaggggaagcaaaaactgccaaccaactgatgaatgactttgcagaaaaagagactctgaaacaaaaacagatagatgagataagagataagaaaactggactgggaagaataattgagttaaaatcagaaatcctaagtaagaagcagaatgagctgaaaaatgtgaagtatgaattacagcagttggaaggatcttcagacaggattcttgaactggaccaggagctcataaaagctgaacgtgagttaagcaaggctgagaaaaacagcaatgtagaaaccttaaaaatggaagtaataagtctccaaaatgaaaaagcagacttagacaggaccctgcgtaaacttgaccaggagatggagcagttaaaccatcatacaacaacacgtacccaaatggagatgctgaccaaagacaaagctgacaaagatgaacaaatcagaaaaataaaatctaggcacagtgatgaattaacctcactgttgggatattttcccaacaaaaaacagcttgaagactggctacatagtaaatcaaaagaaattaatcagaccagggacagacttgccaaattgaacaaggaactagcttcatctgagcagaataaaaatcatataaataatgaactaaaaagaaaggaagagcagttgtccagttacgaagacaagctgtttgatgtttgtggtagccaggattttgaaagtgatttagacaggcttaaagaggaaattgaaaaatcatcaaaacagcgagccatgctggctggagccacagcagtttactcccagttcattactcagctaacagacgaaaaccagtcatgttgccccgtttgtcagagagtttttcagacagaggctgagttacaagaagtcatcagtgatttgcagtctaaactgcgacttgctccagataaactcaagtcaacagaatcagagctaaaaaaaaaggaaaagcggcgtgatgaaatgctgggacttgtgcccatgaggcaaagcataattgatttgaaggagaaggaaataccagaattaagaaacaaactgcagaatgtcaatagagacatacagcgcctaaagaacgacatagaagaacaagaaacactcttgggtacaataatgcctgaagaagaaagtgccaaagtatgcctgacagatgttacaattatggagaggttccagatggaacttaaagatgttgaaagaaaaattgcacaacaagcagctaagctacaaggaatagacttagatcgaactgtccaacaagtcaaccaggagaaacaagagaaacagcacaagttagacacagtttctagtaagattgaattgaatcgtaagcttatacaggaccagcaggaacagattcaacatctaaaaagtacaacaaatgagctaaaatctgagaaacttcagatatccactaatttgcaacgtcgtcagcaactggaggagcagactgtggaattatccactgaagttcagtctttgtacagagagataaaggatgctaaagagcaggtaagccctttggaaacaacattggaaaagttccagcaagaaaaagaagaattaatcaacaaaaaaaatacaagcaacaaaatagcacaggataaactgaatgatattaaagagaaggttaaaaatattcatggctatatgaaagacattgagaattatattcaagatgggaaagacgactataagaagcaaaaagaaactgaacttaataaagtaatagctcaactaagtgaatgcgagaaacacaaagaaaagataaatgaagatatgagactcatgagacaagatattgatacacagaagatacaagaaaggtggctacaagataaccttactttaagaaaaagaaatgaggaactaaaagaagttgaagaagaaagaaaacaacatttgaaggaaatgggtcaaatgcaggttttgcaaatgaaaagtgaacatcagaagttggaagagaacatagacaatataaaaagaaatcataatttggcattagggcgacagaaaggttatgaagaagaaattattcattttaagaaagaacttcgagaaccacaatttcgggatgctgaggaaaagtatagagaaatgatgattgttatgaggacaacagaacttgtgaacaaggatctggatatttattataagactcttgaccaagcaataatgaaatttcacagtatgaaaatggaagaaatcaataaaattatacgtgacctgtggcgaagtacctatcgtggacaagatattgaatacatagaaatacggtctgatgccgatgaaaatgtatcagcttctgataaaaggcggaattataactaccgagtggtgatgctgaagggagacacagccttggatatgcgaggacgatgcagtgctggacaaaaggtattagcctcactcatcattcgcctggccctggctgaaacgttctgcctcaactgtggcatcattgccttggatgagccaacaacaaatcttgaccgagaaaacattgaatctcttgcacatgctctggttgagataataaaaagtcgctcacagcagcgtaacttccagcttctggtaatcactcatgatgaagattttgtggagcttttaggacgttctgaatatgtggagaaattctacaggattaaaaagaacatcgatcagtgctcagagattgtgaaatgcagtgttagctccctgggattcaatgttcattaaaaatatccaagatttaaatgccatagaaatgtaggtcctcagaaagtgtataataagaaacttatttctcatatcaacttagtcaataagaaaatatattctttcaaaggaacattgtgtctaggattttggatgttgagaggttctaaaatcatgaaacttgtttcactgaaaattggacagattgcctgtttctgatttgctgctcttcatcccattccaggcagcctctgtcaggccttcagggttcagcagtacagccgagactcgactctgtgcctccctccccagtgcaaatgcatgcttcttctcaaagcactgttgagaaggagataattactgccttgaaaatttatggttttggtatttttttaaatcatagttaaatgttacctctgaatttacttccttgcatgtggtttgaaaaactgagtattaatatctgaggatgaccagaaatggtgagatgtatgtttggctctgcttttaactttataaatccagtgacctctctctctgggacttggtttccccaactaaaatttgaagtagttgaatggggtctcaaagtttgacaggaaccttaagtaatcatctaagtcagtacccaccaccttcttctcctacatatcccttccagatggtcatccagactcagagctctctctacagagaggaaattctccactgtgcacacccacctttggaaagctctgaccacttgaggcctgatctgcccatcgtgaagaagcctgtaacactcctctgcgtctatcctgtgtagcatactggcttcaccatcaatcctgattcctctctaagtgggcattgccatgtggaaggcaagccaggctcactcacagagtcaaggcctgctccctgtagggtccaaccagacctggaagaacaggcctctccatttgctcttcagatgccacttctaagaaaagcctaatcacagtttttcctggaattgccagctgacatcttgaatccttccattccacacagaatgcaaccaagtcacacgcttttgaattatgctttgtagagttttgtcattcagagtcagccaggaccataccgggtcttgattcagtcacatggcatggttttgtgccatctgtagctataatgagcatgtttgcctagacagcttttctcaactgggtccagaagagaattaagccctaaggtcctaaggcatctatctgtgctaggttaaatggttggcccccaaagatagacaggtcctgatttctagaacccgtgactgttactttatacagcaaaggaaactttgcagatgtgattaaagctaaggaccttaagacagagtatcctgggggtggtggtggggtgggggggggtcctaaatgtaatcacgagtaagattaagagcaaatcaattctagtcatatattaaacatccacaataaccaagatatttttatcccaagaatgcaagatttcagaaaatgaaaaatctgttgataaatccatcactataataaaaccgaaggtgaaaaaaattctgaaaaaaaaaaaaaaaaaaaaaaaaaaaa

SEQ ID NO: 56685 - DNA, 2278 bp, Homo Sapiens
ggctatccagcctccctcggccaaattgctgcggagcccgtcgtcagggggcgccaaggagccagggggaaaaccaagaggcgctgacaggagcctcccggcggtgctaccctccacctcccacctccctgcgccccgccccgaggttggggctttgaagaatgcagccggggaaagcattaacttttgagctacgtccagaatagcatcatcttcatgggtattccctactcctaggatttcagaaaacctttgataactaattgagaaaatgcagaagatcgtgcagacagatgaaattaccaatacacaagcttttagaaaaggaaagaggaaaagaacagagacaatggactcagaaaatgcaaatagtgacatggataaaggacagagagacccatattcgggaaatgcctttctgcctggtgaaagctccagtgaggatgaagagcctttggcagaattgtcaaaggaagaattgtgcgccaaaataaaaagcctgaaagaaaaactaacaaacacccggaaagaaaacagccgacttcgacagtctttggtcatgcttcaagtgttaccacaagcagtcacccagtttgaagaattggttggtatggccgaggctctgcttaagggtgggggaaccatgtctacatctgcatccaccctctggagagcaacaaacaactcctcgccagattcatttgcctcaacatgcagtaattctaattctaactccagttcaccagtttccttaaagcctgaggaagagcatcagactgatgagaaacagttccagattgaaaaatggcaaaatcctctacttcaagggacaaagctgtaaaaccagctatgaatcagaatgaagtccaagaaatcataggagtaacaaaacaattatttcccaatacggatgatgtttcaattaggagaatgatagggcaaaagctaaacaactgtaccaagaagccaaatttaagcaaaaatcttaactctcaggatattaaatagatccttttggtattacaggtatctgaaacaaagcaccttcaattctaaatctagcactggattttgttggagaatctgcagccttcctggcagtgagaaagacagacatgtgcagtgacaggctgtaagacatatgtaacattgctgagctctcctaagggaccaacaagcttgctgaagaagctgcatgtagattccaccctcagtactagtgatgcatcaaaccagagaatttctgccagtcaaataagcatgcaatatggtttctttggaaataagcatttcccaatccccaaatacccctctgtacagttaatctaacaggatagtcagagctcttatcatagcagccaaaacttcagcccataggttagtcattgtcctaaccaatcattgtacattgattattaccagtgacttcccattatagtttttggatctttagcataagcacatgcttgcaaaagtaaacagtgaaataattaatgttggcaaatatgagaacaacaaagtcagcccaaaatctgataatcatgtctaaccaagtaataatgttttagcaataaaattacaggattattctgttatctaaaaatgtataaaatgggaatatgaaaaaaatgacaacagcaagatgttttattttaatgttaagcaattccaccacacttctgaagaataaacctaagtttttgtgattgttaaaacaatgcatcaattttcagggaaatctttttgtttgtttatttaccagacatgttctaactttgtattgcccaaagtatattaaatacagatgtgtaatataaagcatcaatatcacctaacacatcgtatataagatataacatgatagatagttggtcgattacattgctatactgcttagttttaactggtttatttttattgtagcagaaatgaactgaaaaaaaatatgggtttgataatcacacacatgaaagtaccattttgtaactcaacaaaagataaaacattcttcatcaaaaggcttctcgcttggtgtcaggttgtcacatgtgaccactgtgcaatgcgaagccatacttcttcagtgcacaaagtcatgtttaaacttggaaaagaggatgctacagtagtttcaaagtttagtgttgtggacccaggaaattttccataagtcttgcttgataacaatgtgattgtacaaaataaatgttcttaaggaaacaacttatgtaacatttgctacctttatgtaaacataaataaatcccatttaaaagat

SEQ ID NO: 56686 - DNA, 8617 bp, Homo Sapiens
acgacgggggaggtgctgtacgtccaagatggcggcgccctgtaggctggagggactgtgaggtaaacagctgagggggaggagacggtggtgaccatgaaagacaccaggttgacagcactggaaactgaagtaccagttgtcgctagaacagtttggtagtggccccaatgaagaaccttcagaacctgtagcacacgtcctggagccagcacagcgccttcgagcgagagaatggcccaacaagcaaatgtcggggagcttcttgccatgctggactcccccatgctgggtgtgcgggacgacgtgacagctgtctttaaagagaacctcaattctgaccgtggccctatgcttgtaaacaccttggtggattattacctggaaaccagctctcagccggcattgcacatcctgaccaccttgcaagagccacatgacaagcacctcttggacaggattaacgaatatgtgggcaaagccgccactcgtttatccatcctctcgttactgggtcatgtcataagactgcagccatcttggaagcataagctctctcaagcacctcttttgccttctttactaaaatgtctcaagatggacactgacgtcgttgtcctcacaacaggcgtcttggtgttgataaccatgctaccaatgattccacagtctgggaaacagcatcttcttgatttctttgacatttttggccgtctgtcatcatggtgcctgaagaaaccaggccacgtggcggaagtctatctcgtccatctccatgccagtgtgtacgcactctttcatcgcctttatggaatgtacccttgcaacttcgtctcctttttgcgttctcattacagtatgaaagaaaacctggagacttttgaagaagtggtcaagccaatgatggagcatgtgcgaattcatccggaattagtgactggatccaaggaccatgaactggaccctcgaaggtggaagagattagaaactcatgatgttgtgatcgagtgtgccaaaatctctctggatcccacagaagcctcatatgaagatggctattctgtgtctcaccaaatctcagcccgctttcctcatcgttcagccgatgtcaccaccagcccttatgctgacacacagaatagctatgggtgtgctacttctaccccttactccacgtctcggctgatgttgttaaatatgccagggcagctacctcagactctgagttccccatcgacacggctgataactgaaccaccacaagctactctttggagcccatctatggtttgtggtatgaccactcctccaacttctcctggaaatgtcccacctgatctgtcacacccttacagtaaagtctttggtacaactgcaggtggaaaaggaactcctctgggaaccccagcaacctctcctcctccagccccactctgtcattcggatgactacgtgcacatttcactcccccaggccacagtcacaccccccaggaaggaagagagaatggattctgcaagaccatgtctacacagacaacaccatcttctgaatgacagaggatcagaagagccacctggcagcaaaggttctgtcactctaagtgatcttccagggtttttaggtgatctggcctctgaagaagatagtattgaaaaagataaagaagaagctgcaatatctagagaactttctgagatcaccacagcagaggcagagcctgtggttcctcgaggaggctttgactctcccttttaccgagacagtctcccaggttctcagcggaagacccactcggcagcctccagttctcagggcgccagcgtgaaccctgagcctttacactcctccctggacaagcttgggcctgacacaccaaagcaagcctttactcccatagacctgccctgcggcagtgctgatgaaagccctgcgggagacagggaatgccagacttctttggagaccagtatcttcactcccagtccttgtaaaattccacctccgacgagagtgggctttggaagcgggcagcctcccccgtatgatcatctttttgaggtggcattgccaaagacagcccatcattttgtcatcaggaagactgaggagctgttaaagaaagcaaaaggaaacacagaggaagatggtgtgccctctacctccccaatggaagtgctggacagactgatacagcagggagcagacgcgcacagcaaggagctgaacaagttgcctttacccagcaagtctgtcgactggacccactttggaggctctcctccttcagatgagatccgcaccctccgagaccagttgcttttactgcacaaccagttactctatgagcgttttaagaggcagcagcatgccctccggaacaggcggctcctccgcaaggtgatcaaagcagcagctctggaggaacataatgctgccatgaaagatcagttgaagttacaagagaaggacatccagatgtggaaggttagtctgcagaaagaacaagctagatacaatcagctccaggagcagcgtgacactatggtaaccaagctccacagccagatcagacagctgcagcatgaccgagaggaattctacaaccagagccaggaattacagacgaagctggaggactgcaggaacatgattgcggagctgcggatagaactgaagaaggccaacaacaaggtgtgtcacactgagctgctgctcagtcaggtttcccaaaagctctcaaacagtgagtcggtccagcagcagatggagttcttgaacaggcagctgttggttcttggggaggtcaacgagctctatttggaacaactgcagaacaagcactcagataccacaaaggaagtagaaatgatgaaagccgcctatcggaaagagctagaaaaaaacagaagccatgttctccagcagactcagaggcttgatacctcccaaaaacggattttggaactggaatctcacctggccaagaaagaccaccttcttttggaacagaagaaatatctagaggatgtcaaactccaggcaagaggacagctgcaggccgcagagagcaggtatgaggctcagaaaaggataacccaggtgtttgaattggagatcttagatttatatggcaggttggagaaagatggcctcctgaaaaaacttgaagaagaaaaagcagaagcagctgaagcagcagaagaaaggcttgactgttgtaatgacgggtgctcagattccatggtagggcacaatgaagaggcatctggccacaacggtgagaccaagacccccaggcccagcagcgcccggggcagtagtggaagcagaggtggtggaggcagcagcagcagcagcagcgagctttctaccccagagaaacccccacaccagagggcaggcccattcagcagtcggtgggagacgactatgggagaagcgtctgccagcatccccaccactgtgggctcacttcccagttcaaaaagcttcctgggtatgaaggctcgagagttatttcgtaataagagcgagagccagtgtgatgaggacggcatgaccagtagcctttctgagagcctaaagacagaactgggcaaagacttgggtgtggaagccaagattcccctgaacctagatggccctcacccgtctcccccgaccccggacagtgttggacagctacatatcatggactacaatgagactcatcatgaacacagctaaggaatgatggtcaatcagtgttaacttgcatattgttggcacagaacaggaggtgtgaatgcacgtttcaaagctttcctgtttccagggtctgagtgcaagttcatgtgtggaaatgggacggaggtcctttggacagctgactgaatgcagaacggtttttggatctggcattgaaatgcctcttgaccttcccctccacccgccctaaccccctctcatttacctcgcagtgtgttctaatccaagggccagttggtgttcctcagtagctttactttcttcctttcccccccaaatggttgcgtcctttgaacctgtgcaatatgaggccaaatttaatctttgagtctaacacaccactttctgctttcccgaagttcagataactgggttggctctcaattagaccaggtagtttgttgcattgcaggtaagtctggttttgtcccttccaggaggacatagcctgcaaagctggttgtctttacatgaaagcgtttacatgagactttccgactgcttttttgattctgaagttcagcatctaaagcagcaggtctagaagaacaacggtttattcatacttgcattcttttggcagttctgataagcttcctagaaagttctgtgtaaacagaagcctgtttcagaaatctggagctggcactgtggagaccacacaccctttgggaaagctcttgtctcttcttcccccactacctcttatttatttggtgtttgcttgaatgctggtactattgtgaccacaggctggtgtgtaggtggtaaaacctgttctccataggagggaaggagcagtcactgggagaggttacccgagaagcacttgagcatgaggaactgcacctttaggccatctcagcttgctgggccttttgttaaacccttctgtctactggcctccctttgtgtgcatacgcctcttgttcatgtcagcttatatgtgacactgcagcagaaaggctctgaaggtccaaagagtttctgcaaagtgtatgtgaccatcatttcccaggccattagggttgcctcactgtagcaggttctaggctaccagaagaggggcagctttttcataccaattccaactttcaggggctgactctccagggagctgatgtcatcacactctccatgttagtaatggcagagcagtctaaacagagtccgggagaatgctggcaaaggctggctgtgtatacccactaggctgccccacgtgctcccgagagatgacactagtcagaaaattggcagtggcagagaatccaaactcaacaagtgctcctgaaagaaacgctagaagcctaagaactgtggtctggtgttccagctgaggcagggggatttggtaggaaggagccagtgaacttggctttcctgtttctatctttcattaaaaagaatagaaggattcagtcataaagaggtaaaaaactgtcacggtacgaaatcttagtgcccacggaggcctcgagcagagagaatgaaagtcttttttttttttttttttttttagcatggcaataaatattctagcatccctaactaaaggggactagacagttagagactctgtcaccctagctataccagcagaaaacctgttcaggcaggctttctgggtgtgactgattcccagcctgtggcagggcgtggtcccaactactcagcctagcacaggctggcagttggtactgaattgtcagatgtggagtattagtgacaccacacatttaattcagctttgtccaaaggaaagcttaaaacccaatacagtctagtttcctggttccgttttagaaaaggaaaacgtgaacaaacttagaaagggaaggaaatcccatcagtgaatcctgaaactggttttaagtgctttccttctcctcatgcccaagagatctgtgccatagaacaagataccaggcacttaaagccttttcctgaattggaaaggaaaagaggcccaagtgcaaaagaaaaaacattttagaaacggacagcttataaaaataaagggaagaaaggaggcagcatggagagaggcctgtgctagaagctccatggacgtgtctgcacagggtcctcagctcatccatgcggcctgggtgtccttttactcagctttataacaaatgtggctccaagctcaggtgcctttgagttctaggaggctgtgggttttattcaactacggttgggagaatgagacctggagtcatgttgaaggtgcccaacctaaaaatgtaggctttcatgttgcaaagaactccagagtcagtagttaggtttggtttggttttggacatgataaacctgccaagagtcaacaggtcacttgatcatgctgcagtgggtagttctaaggatggaaaggtgacagtattactctcgagaggcaattcagtcctgggcaaaggtattagtacaataagcgttaagggcagagtctaccttgaaaccaattaagcagcttggtattcataaatattgggattggatggcctccatccagaaatcactatgggtgagcatacctgtctcagctgtttggccaatgtgcataacctactcggatccccacctgacactaaccagagtcagcacaggccccgaggagcccgaagtctgctgctgtgcagcatggaattcctttaaaaaggtgcactacagttttagcggggagggggataggaagacgcagagcaaatgagctccggagtccctgcaggtgaataaacacacagatctgcatctgatagaactttgatggattttcaaaaagccgttgacaaggctctgctatacagtctataaaaattgttattatgggattggaagaaacacgtggtcatgaatagaaaaaaaacaaacccaaaggtaggaaggtcaaggtcatttcttagatggagaagttgtgaaagatgtccttggagatgagttttaggaccagcattactaaggcaggtgggcagacagtgacctctctaggtgtgtccacagagtttttcaggagagaaaactgcctgacctttgggactaagctgcggaatcttcttactaagcttgaagagtggagaggcgagaggtgagctactttgtgagccaaagcttatgtgacatggttggggaaacagtccaaactgttctgagaaggtgaactgttacgacccaggacaattagaaaaattcacccaccatgccgcacattactgggtaaaagcagggcagcagggaacaaaactccagactcttgggccgtccccatttgcaacagcacacatagtttctggtatatttgttgggaaagataaaactctagcagttgttgaggggaggatgtataaaatggtcatggggatgaaaggatctctgagaccacagaggctcagactcactgttaagaatagaaaactgggtatgcgtttcatgtagccagcagaactgaagtgtgctgtgacaagccaatgtgaatttctaccaaatagtagagcataccacttgaagaaggaaagaaccgaagagcaaacaaaagttctgcgtaatgagactcaccttttctcgctgaaagcactaagaggtgggaggaggcctgcacaggctggaggagggtttgggcagagcgaagacccggccaggaccttggtgagatggggtgccgcccacctcctgcggatactcttggagagttgttcccccagggggctctgccccacctggagaaggaagctgcctggtgtggagtgactcaaatcagtatacctatctgctgcaccttcactctccagggtacatgctttaaaaccgacccgcaacaagtattggaaaaatgtatccagtctgaagatgtttgtgtatctgtttacatccagagttctgtgacacatgccccccagattgctgcaaagatcccaaggcattgattgcacttgattaagcttttgtctgtaggtgaaagaacaagtttaggtcgaggactggcccctaggctgctgctgtgacccttgtcccatgtggcttgtttgcctgtccgggactcttcgatgtgcccaggggagcgtgttcctgtctcttccatgccgtcctgcagtccttatctgctcgcctgagggaagagtagctgtagctacaagggaagcctgcctggaagagccgagcacctgtgcccatggcttctggtcatgaaacgagttaatgatggcagaggagcttcctccccacttcgcagcgccacattatccatcctctgagataagtaggctggtttaaccattggaatggacctttcagtggaaaccctgagagtctgagaacccccagaccaacccttccctccctttccccacctcttacagtgtttggacaggagggtatggtgctgctctgtgtagcaagtactttggcttatgaaagaggcagccacgcattttgcactaggaagaatcagtaatcacttttcagaagacttctatggaccacaaatatattacggaggaacagattttgctaagacataatctagttttataactcaatcatgaatgaaccatgtgtggcaaacttgcagtttaaaggggtcccatcagtgaaagaaactgattttttttaacggactgcttttagttaaattgaagaaagtcagctcttgtcaaaaggtctaaactttcccgcctcaatcctaaaagcatgtcaacaatccacatcagatgccataaatatgaactgcaggataaaatggtacaatcttagtgaatgggaattggaatcaaaagagtttgctgtccttcttagaatgttctaaaatgtcaaggcagttgcttgtgtttaactgtgaacaaataaaaatttattgttttgcactaaa

SEQ ID NO: 56687 - DNA, 5008 bp, Homo Sapiens; identical to SEQ ID NO: 30215

SEQ ID NO: 56688 - DNA, 14771 bp, Homo Sapiens
ggacaccatcatttgggtttttaaaagcttcagcttctccagcatctttgcattgtgaatatcttcctgcttctagtcaaagctttctctctagtgattggaatgctgctgtaagcctgattagaggtgcctgaggatatcaccttttacaaggaagccgtgtgtgcttgagaggatctttttaaatgcattatggctcatgcagcctcacaattaaagaaaaacagggatttagaaatcaatgctgaagaagagcctgagaaaaaaaggaaacaccgcaaacggtcccgggatcggaagaaaaagtctgatgccaatgcaagttacttaagagcagctcgagctggacaccttgaaaaggccctcgactacataaaaaatggagttgacatcaacatttgcaatcagaatgggttgaacgctctccaccttgcttccaaagaaggccatgtagaggttgtttctgagctgctgcagagagaagccaatgtggatgcagctacaaagaaaggaaacacagcattgcacatcgcatctttggctgggcaagcagaggtggtaaaagtcttggttacaaatggagccaatgtcaatgcacaatctcagaatggtttcacgccattgtatatggcagcccaggaaaatcacctggaagttgtcaagtttcttcttgacaatggtgcaagccagagcctagccacagaggatggcttcacaccattggcagtggctttgcaacaaggtcacgaccaagtcgtttcgctcctgctagagaatgacaccaaaggaaaagtgcgtctcccagctcttcatatcgcggcccgaaaagacgacacgaaagccgccgccctgctgctgcagaatgacaacaatgcagatgtggaatcaaagagtggcttcactccgctccacatagctgctcactatggaaatatcaatgtagccacgttgctgttaaaccgagcggctgctgtggatttcaccgcaaggaatgacatcactcctttacatgttgcatcaaaaagaggaaatgcaaatatggtaaaactattgctcgatcgaggagctaaaatcgatgccaaaaccagggatggtctgacaccactgcactgtggagcaaggagtggccacgagcaggtggtagaaatgttgcttgatcgagctgcccccattctttcaaaaaccaagaatggattatctccattgcacatggccacacaaggggatcatttaaactgcgtccagcttctcctccagcataatgtacccgtggatgatgtcaccaatgactacctgactgccctacacgtggctgcccactgtggccattacaaagttgccaaggttctcttggataagaaagctaaccccaatgccaaagccctgaatggctttacccctcttcatattgcctgcaagaagaatcgaattaaagtaatggaactccttctgaaacacggtgcatccatccaagctgtaaccgagtcgggccttaccccaatccatgttgctgccttcatggggcatgtaaatattgtatcacaactaatgcatcatggagcctcaccaaacaccaccaatgtgagaggagaaacagcactgcacatggcagctcgctccggccaagctgaagttgtgcggtatctggtacaagacggagctcaggtagaagctaaagctaaggatgaccaaacaccactccacatttcagcccgactggggaaagcagacatagtacaacagctgttgcagcaaggggcatctccaaatgcagccacaacttctgggtacaccccacttcacctttccgcccgagaggggcatgaggatgtggccgcgttccttttggatcatggagcgtctttatctataacaacaaagaaaggatttactcctcttcatgtggcagcaaaatatggaaagcttgaagtcgccaatctcctgctacagaaaagtgcatctccagatgctgctgggaagagcgggctaacaccactgcatgtagctgcacattacgataatcagaaagtggcccttctgcttttggaccaaggagcctcacctcacgcagccgcaaagaatggttatacgccactgcacatcgctgccaaaaagaaccagatggacatagcgacaactctgctggaatatggtgctgatgccaacgcagttacccggcaaggaattgcttccgtccatctcgcagctcaggaagggcacgtggacatggtgtcgctgctcctcggtagaaatgcgaatgtgaacctgagcaataagagcggcctgaccccactccatttggctgctcaagaagatcgagtgaatgtggcagaagtcctcgtaaaccaaggggctcatgtggacgcccagacaaagatgggatacacaccactgcatgtgggctgccactatggaaatatcaagattgttaatttcctgctccagcattctgcaaaagttaatgccaaaacaaagaatgggtatacgccattacatcaagcagcacagcaggggcatacgcatataataaatgtcttacttcagaacaacgcctcccccaatgaactcactgtgaatgggaatactgcccttggcattgcccggcgcctcggctacatctcagtagtggacaccctgaagatagtgaccgaagagaccatgaccacaactactgtcacagagaagcacaaaatgaatgttccagaaacgatgaatgaagttcttgatatgtctgatgatgaagttcgtaaagccaatgcccctgaaatgctcagtgatggcgaatatatctcagatgttgaagaaggtgaagatgcaatgaccggggacacagacaaatatcttgggccacaggaccttaaggaattgggtgatgattccctgcctgcagagggttacatgggctttagtctcggagcgcgttctgccagcctccgctccttcagttcggataggtcttacaccttgaacagaagctcctatgcacgggacagcatgatgattgaagaactccttgtgccatccaaagagcagcatctaacattcacaagggaatttgattcagattctcttagacattacagctgggctgcagacaccttagacaatgtcaatcttgtttcaagccccattcattctgggtttctggttagctttatggtggacgcgagagggggctccatgagaggaagccgtcatcacgggatgagaatcatcattcctccacgcaagtgtacggcccccactcgaatcacctgccgtttggtaaagagacataaactggccaacccaccccccatggtggaaggagagggattagccagtaggctggtagaaatgggtcctgcaggggcacaatttttaggccctgtcatagtggaaatccctcactttgggtccatgagaggaaaagagagagaactcattgttcttcgaagtgaaaatggtgaaacttggaaggagcatcagtttgacagcaaaaatgaagatttaaccgagttacttaatggcatggatgaagaacttgatagcccagaagagttagggaaaaagcgtatctgcaggattatcacgaaagatttcccccagtattttgcagtggtttcccggattaagcaggaaagcaaccagattggtcctgaaggtggaattctgagcagcaccacagtgccccttgttcaagcatctttcccagagggtgccctaactaaaagaattcgagtgggcctccaggcccagcctgttccagatgaaattgtgaaaaagatccttggaaacaaagcaacttttagcccaattgtcactgtggaaccaagaagacggaaattccataaaccaatcacaatgaccattccggtgcccccgccctcaggagaaggtgtatccaatggatacaaaggggacactacacccaatctgcgtcttctctgtagcattacagggggcacttcgcctgctcagtgggaagacatcacaggaacaactcctttgacgtttataaaagattgtgtctcctttacaaccaatgtttcagccagattttggcttgcagactgccatcaagttttagaaactgtggggttagccacgcaactgtacagagaattgatatgtgttccatatatggccaagtttgttgtttttgccaaaatgaatgatcccgtagaatcttccttgcgatgtttctgcatgacagatgacaaagtggacaaaactttagagcaacaagagaattttgaggaagtcgcaagaagcaaagatattgaggttctggaaggaaaacctatttatgttgattgttatggaaatttggccccacttaccaaaggaggacagcaacttgtttttaacttttattctttcaaagaaaatagactgccattttccatcaagattagagacaccagccaagagccctgtggtcgtctgtcttttctgaaagaaccaaagacaacaaaaggactgcctcaaacagcggtttgcaacttaaatatcactctgccagcacataaaaaggagacagagtcagatcaagatgatgagattgagaaaacagatagacgacagagcttcgcatccttagctttacgtaagcgctacagctacttgactgagcctggaatgattgaacggagtacaggagcaacaagatccctccccaccacttactcatacaagccattcttttctacaagaccataccagtcctggacaacagctccgattacagtgcctgggccagccaagtcaggcttcacttccttatcaagttcttcctctaatacgccatcagcttctccgttaaaatcaatatggtctgtttcgacaccttctccaatcaaatccacattaggcgcgtcaactacatcttcagttaaatccattagtgacgtggcatctccaattagatcctttcggacaatgtcttcgccgataaaaactgtggtgtcacaatctccatacaatatccaagtttcctctggtaccctggctagagctccagcagtcacggaagctacgcccttaaaagggctggcatccaattctacgttttcctctcgaacctctccagtgactacagcagggtctcttttggagaggtcatcaattactatgacaccccctgcctcccccaaatcaaacattaatatgtattcctcaagtttgccatttaagtcaattattacatcagcagcaccgctaatatcttcacctttaaagtcagtggtgtctccagttaaatcagcagttgatgtcatttcatcagccaaaattacaatggcatcttctctctcatcacctgtgaagcagatgcctggacatgcagaggtagcattagtcaatggatctatttcccctctaaaatatccatcatcctcaactttaattaatggatgcaaagccactgccacgttacaggaaaaaatttcttctgctacaaactctgtgagctctgtggtcagtgcagccactgacacagttgagaaagtgttttctaccacgactgcaatgccattttccccactcaggtcatatgtttctgcagcaccatcagcttttcagtctctaagaactccttccgcaagtgcactctatacatcccttgggtcgtcaatatctgcaactacctcatctgtaacttcatcaattataacagtgccagtatactctgtagtcaatgttttgccagaaccagcattaaagaaacttccagactctaattcatttacaaaatcagcagcagccttgctgtcacccattaaaacattgactacggagacacatcctcagcctcacttcagtcgaacttcatctccagttaagtcatctttgttccttgcaccctctgcccttaagttgtctacaccatcttctttatcttccagtcaggagatactaaaagatgtagctgaaatgaaagaggacctaatgcggatgaccgcaatactacagacagatgtgcctgaggagaagccattccaacctgaactcccaaaggaagggagaatagatgatgaagaacctttcaaaattgtagagaaagtaaaggaagacttagtgaaagttagtgaaatccttaaaaaggatgtatgtgtagataataaaggatcacccaaatcaccaaagagtgacaaaggacactctcctgaagatgactggatagaatttagttcggaagaaatccgggaagccagacaacaagctgctgcgagccagtctccatctctgccagagagagtgcaagtaaaagcaaaagccgcctccgaaaaggattataacttgaccaaagttattgattacctaacaaatgatattgggagtagttcactgacaaacttaaaatacaagtttgaggatgcaaagaaggatggtgaggagagacagaaaagagttttaaaaccagcaattgctttgcaggaacacaaactcaaaatgcctccagcctccatgaggacttccacctctgagaaagaattgtgtaaaatggctgattccttttttggaacagatactattttagagtctcctgatgacttttctcaacacgaccaagataaaagtcccttgtctgacagtggctttgaaacaagaagtgaaaagacaccttcagccccacaaagcgctgaaagcactggtcctaaaccactttttcatgaagttcccatccctcctgtcattacagaaacaagaactgaagtggttcatgttatcaggagctatgatccctcagctggggatgttccccagacccaaccagaggagcctgtgtcacctaaaccttcacctacttttatggaattggaaccaaagcccaccacctctagtattaaagaaaaggttaaagcatttcaaatgaaagccagtagtgaagaagatgaccacaatcgggttttaagcaaaggcatgcgtgttaaagaagagactcacataaccacaaccaccagaatggtttatcattctccaccaggcggtgaaggtgcatctgaaagaattgaagaaaccatgtcagtccatgacatcatgaaggcctttcagtccgggcgggatccttccaaagaactggcaggtctgtttgaacataagtcggcagtgtctccagatgttcacaagtctgctgctgaaacctcagcccagcatgcagagaaggacaaccaaatgaaacccaaactggagcgtataatagaagtccacatcgaaaaaggtaaccaagctgagcccactgaagtcattattagagaaaccaaaaagcatccagaaaaagaaatgtatgtatatcagaaagacttatcccggggagatattaacctaaaagattttctgccagaaaaacacgatgcttttccttgttcagaggaacagggtcagcaagaagaagaagaacttactgctgaagagtcattgccttcttatctggagtcttccagagtaaacactcctgtgtcccaagaagaagatagccgccctagttctgctcaactcatatctgatgactcttataaaacattgaagcttttgagtcaacactcaatagaataccatgacgatgagttgtcagaactaagaggggagtcttacaggtttgctgagaaaatgcttctgtcagaaaagctagatgtgtctcattctgatactgaggaatcggttacagaccatgcaggaccccctagctcagagttacaggggtctgataagcggtccagagaaaaaatagccactgcccccaaaaaagaaattctctccaaaatctataaagatgtttctgaaaatggtgtaggtaaagtgtctaaagatgagcattttgataaagtgacagtgttgcactattctggcaatgttagtagtccaaaacatgccatgtggatgcgctttactgaggacagattagacagaggtagagagaagttgatatatgaagatagggtggacaggactgtgaaggaggctgaagaaaaactgactgaagtgtcacagttttttcgtgacaaaactgaaaagctaaatgatgaactgcagtccccagagaaaaaggcacgccctaaaaatggcaaagaatattcttctcaaagccctaccagtagcagccctgagaaagtgctactgacagaactgctggcatccaatgatgagtgggttaaggcaagacagcatggccctgatggacaaggcttccccaaggccgaggagaaggcacccagtctgcccagcagcccagagaagatggttctctcccaacagactgaggacagcaagtccacagtggaagccaaaggaagtatttcacagagcaaagcaccagatgggccccagtctggattccagctcaaacaatctaaactcagttccattagattaaaatttgaacaaggcacacacgcaaaaagtaaggacatgtctcaagaagacagaaagtcagatggccagtccagaatcccagttaaaaaaatacaggagagcaagctacccgtctaccaagtttttgctagagaaaaacagcagaaggccatagacctcccagatgaaagtgtatctgtgcaaaaagattttatggtattaaaaaccaaagatgagcatgcccaaagcaacgaaattgttgtaaatgattctggctctgataatgtgaaaaaacagagaactgaaatgtcaagtaaagcaatgcctgactctttttctgagcagcaggctaaagacttggcatgtcatataacctcagatttagcaactaggggaccatgggacaaaaaggtctttagaacatgggagagttcgggagccactaacaataagtctcagaaagaaaaactttcgcatgtacttgttcatgatgtaagagagaatcacattggtcaccctgagagtaaaagtgttgatcaaaagaatgaatttatgtctgtgactgagagagaacgcaaattgttaacaaacggctctctctcagaaattaaagaaatgactgtaaaatctccctccaaaaaagtcttatatagggaatatgttgtgaaagaaggggaccatccaggcggattgcttgatcagccttccaggaggagcgagagctcagcagtgtcacacattcccgtcagagttgctgatgagaggagaatgctgtcttctaatattcccgatggtttttgtgaacagtcggcatttccaaaacatgaactatcacaaaaattgtcccagtcaagcatgagtaaagagacagttgagacacagcactttaattctatagaagatgaaaaagttacctattcagaaatcagcaaagtttccaaacaccagagttatgtaggtttatgcccacctctcgaggaaaccgaaacctcccccaccaaatctcctgattctttagagtttagcccaggaaaggaatctccctctagtgatgtattcgaccacagtcccattgatggattggaaaaactcgcaccactagcccagacagagggagggaaagagataaaaactttacccgtttatgtcagttttgtacaagtggggaagcaatatgaaaaggagatacaacaaggaggtgtaaaaaaaatcataagtcaggaatgtaagacagtacaagaaaccagggggaccttttatacaactagacagcaaaagcaacctccttctccccaaggtagtccagaagatgatactctagagcaagtatcctttctagacagctctgggaaaagccctttaaccccagaaacacccagttcagaggaagtgagttatgaatttacatctaagacacctgactcgctcatagcttatataccaggcaaacccagcccaattcccgaggtttctgaggagtcagaggaggaggaacaggccaagtcaacctcccttaagcagactacagtggaggaaacagcagttgagcgtgaaatgcctaatgacgtgagcaaagactctaaccaaagacccaaaaataacagagttgcctatattgaatttccccctcctccaccactggatgcggaccagattgagtcagataagaagcatcattatctcccagaaaaagaggttgacatgattgaagtcaatctgcaagatgagcatgacaagtaccagctggctgaacctgtcattagagtgcagccaccttcaccagttcctcccggggcagacgtcagtgattcaagcgatgacgaatctatttatcagccagtcccagttaaaaaatataccttcaaattaaaggaagtggacgatgaacaaaaagaaaaacccaaagcttctgctgaaaaggcttccaaccagaaagaactggaaagtaatggatctggaaaagataatgaatttggccttggccttgattcacctcagaatgaaattgcccagaatgggaacaacgaccagtccatcacagagtgttccattgccaccacagcagagttttctcatgacacggatgccacagagatcgactctctggatggctatgacctgcaagatgaagatgatggcttgacagagagtgattctaaactcccaattcaagccatggaaattaagaaagatatctggaacacagagggcattctgaagccagctgaccgctcttttagccaaagtaaacttgaagttatcgaggaggagggaaaggtgggaccagatgaggacaagccaccttctaaaagttcttcatctgaaaagactcctgataagactgatcagaagtcaggggcccagttcttcacactggaaggcagacatcctgacagatcagtgtttcctgatacttacttcagttacaaagtagatgaagaatttgccactccttttaaaacagtagctaccaaaggtctagattttgacccttggtctaataaccgaggggatgatgaagtttttgacagtaaatcacgggaagatgaaactaagccatttgggctggcggtagaagaccgctctccagcaacaacccctgatacaacgccagccagaacgccaactgatgaaagtaccccaactagtgagcctaaccccttcccatttcatgaaggaaaaatgtttgagatgactcgcagtggtgcaattgacatgagcaagagggattttgttgaagagaggctccaatttttccagattggtgagcatacttctgaagggaagtcaggggaccagggggaaggggataaaagtatggtcactgccacaccacagccacagtcaggggacaccactgtagaaaccaatctagagagaaatgtagagacacctacagtggaacctaaccccagcatcccgaccagcggagagtgtcaggaaggcacatccagtagtggctccctggagaaatcagcagcagccactaacacctctaaagttgaccccaagttgcgcacgcctataaaaatgggaatttctgcatccaccatgaccatgaagaaagaaggccctggagaaataacagataagatagaagcggtgatgaccagttgtcagggattagaaaatgaaactataacaatgatttcaaatacagccaatagccagatgggcgttaggccccatgaaaaacatgattttcaaaaagataactttaataacaacaacaatttggattcttccactatacagacagataacattatgagtaatatagttctgacagaacattctgcacccacttgtaccacagagaaagataacccagtgaaagtctcatcaggaaaaaagacaggggtactacaaggacactgtgtaagagataagcagaaagttcttggagaacagcaaaaaacaaaggaattgatagggattaggcaaaaatccaaacttcccataaaggccacttcaccaaaagataccttcccaccgaaccatatgtcaaacactaaagcaagtaaaatgaagcaggttagtcaatccgagaaaaccaaagcccttactacttcttcatgtgtagatgtaaagtccagaattccagtgaaaaacacacacagggataacataattgcagttagaaaagcatgtgccacacaaaagcaagggcagccagagaaaggcaaggccaaacagcttccatccaagttgccagtaaaggtaagatccacctgtgtcactaccaccaccaccactgccaccaccaccaccactaccaccactaccaccaccaccagctgcacagttaaagttaggaaaagtcagctcaaggaagtatgtaaacattccattgaatattttaagggaattagtggtgagaccttaaagcttgtggaccgcctctctgaagaagaaaaaaagatgcagtccgagttgtccgatgaggaagaaagtacctcaagaaacacgtcgttgtccgagacttcccggggtggccagccttcggttacaacgaagtctgctagagataagaaaacagaggcagcacctttaaaatcaaagagtgaaaaggccggcagtgagaaaaggagcagtagaaggactggtccacagagtccatgtgaacggacagatatcaggatggcaatagtagccgatcacctgggacttagttggacagaactggcaagggaactgaatttttcagtggatgaaatcaatcaaatacgtgtggaaaatccaaattctttaatttctcagagcttcatgttattaaaaaaatgggttaccagagacggaaaaaatgccacaactgatgccttaacttcggtcttgacaaaaattaatcgaatagatatagtgacactgctagaaggaccaatatttgattatggaaatatttcaggcaccagaagttttgcagatgagaacaatgttttccatgaccctgttgatggttggcagaatgagacatcaagtggaaacctagagtcctgcgctcaagctcgaagagtaactggtgggttactagatcgactggatgacagccctgaccagtgtagagattccattacctcatatctcaaaggagaagctggcaaatttgaagcaaatggaagccatacagaaatcactccagaagcaaagacaaaatcttactttccagaatcccaaaatgatgtaggaaaacagagtaccaaggaaactctgaaaccaaaaatacatggatctggtcatgttgaagaaccagcatcaccactagcagcatatcagaaatctctagaagaaaccagcaagcttataatagaagagactaaaccctgtgtgcctgtcagtatgaaaaagatgagtaggacttctccagcagatggcaagccaaggcttagcctccatgaagaagaggggtccagtgggtctgagcaaaagcagggagaaggttttaaggtgaaaacgaagaaagaaatccggcatgtggaaaagaagagccactcgtaacagcgaacggtcagtcaaggatcataagtttttactgccagtattgagaaattcgtggaagaaatgtcagcaggaagtaaaaattcaccgagaagtgtgtgtgtgttcgctgcttccacacattaatggcatgattttttttatgcaaaaagaaaagaaaagaaaaccacccacattttaatttagcatgagccaatttacagagcatggaaatcactttcatttccggattggcgcgtgtgcaattagcaatgcagtgtatatacaagaagccatgctgttaacagtttatctcaagtaatttggtgtcatttacaaaaggaagaaattcctgccatcagaagggacagaaggagatggaatgatcaaatcacagagaaacactaaaattactaaatctacaacagctcgccttatttttcttggacccaaactgtcagggtataaacactatttgtttcttttttaaaacatcgatagttttgctgtaaataataacactgtataaattctaacagaaaaatagaataaaatgttgataaggcactgcctcttagaacacaaacagaatattgcaaatgcatttaacaaataggggtctcaagtgacttcaccctagaagaggagggagggattctgggtgggggtgactcttcactgattcttgtatattagcaattataatgtttgtatatgcaaaactgctagcttgattttaaaaaaaaacaaatctttaaaatctgctgcaaatttaaataattcccaaaatgaggaattctgtagttctgtgaaaaatttttttcttcagaatactaatattttgatgcatgtgtatcaccttattttgattaaatcttttccaattttgcaaacactacagtatactgcaacacaaaagattttatctgtaaacacaaagcccttcatctaatatttgttgctattgccaatttttcaatgaaatgacctaaaaacaacaaaaaaaaataacctatacggtagttgctttagggggtggggggatgctatctgttagtgcttaaaagggggtaaatgcttgccgctttagaggtggatggtgctcataaaaggccccagtcgggggtatttaaaaaggactgaacagaaatccttagctagtagaatggcagcacgctgtaaaattattactgtattgtgtactggctataagatgtagacacctttcagtaagccaatcatttgtaaccattctagcagtgtcatattaggttaataaggctgctgtgttttaaagggcatttttatttgggttttggtgaaattctttaatttgttgattatattcacataaaatcagcattcattgacacatagctctaatgacatatgtatgaaaaaccatacactggatgacctagtcgattatttaagcataaaataaattgtgttaaactcttcaccta

SEQ ID NO: 56689 - DNA, 3564 bp, Homo Sapiens
tctttctcgctgctcagtcacatctttctcttccttccaccccgagggaccatgtcgaggctcagctggggataccgcgagcacaacggtcctattcactggaaggaatttttccctattgctgatggtgatcagcaatctccaattgagattaaaaccaaagaagtgaaatatgactcttccctccgaccacttagtatcaagtatgacccaagctcagctaaaatcatcagcaacagcggccattccttcaatgttgactttgatgacacagagaacaaatcagttctgcgtggtggtcctctcactggaagctacaggttacggcaggttcaccttcactgggggtccgctgatgaccacggctccgagcacatagtagatggagtgagctatgctgcagagctccatgttgttcactggaattcagacaaataccccagctttgttgaggcagctcatgaaccagatggactggctgtcttgggagtgtttttacagattggtgaacctaattcccaactgcaaaagattactgacactttggattccattaaagaaaagggtaaacaaactcgattcacaaattttgacctattgtctctgcttccaccatcctgggactactggacatatcctggttctcttacagttccacctcttcttgagagtgtcacatggattgttttaaagcaacctataaacatcagctctcaacagctggccaaatttcgcagtctcctgtgcacagcggagggtgaagcagcagcttttctggtgagcaatcaccgcccaccacagcctctaaagggccgcaaagtgagagcctctttccattaaaaattgtcaccaatgaactcccccaaacatggctgtggagagacaacaaaacaaaacaaagcacaaaagtctctgccaacaactcttttgtggaattctaatttataggaaacattttagtatgagcttcagtgtcacaaagaaaaccagatctctctctcttttttttttattttttttagtgatagagtctcactctgtcacccaggctggagggcagtggtacagtcttggctaattgcagcctccaactcctggactcaagtgatcctcccacctcagcctccagagtaagtaggaccacaggcatgcacaagcatgcctggctaatttttaaattttttttttttaagaaatagggtcttgctatgttgcccaggctggtctcaagctcctgccctaaagtaggcctcctgcctttgcctctcaaagtgctgggatttcaggcatgggtcatcaagcccagctgacccagagctctttactaacttatctgtctcttatttgcactcatggatattcacagtaagcattgtttgacatatattaaaacccatgaaatatgtctacttcaacctgtgtgaaaatatagttaacattgcaaactttagaatgtattaaaaattttaccttgccatagagactgaattagtcacagctctcagtgatgttagatggaaacttatatctcaaatgataggattgtgatgctttttttgtaacaagtgattctgcttaatattttgttattccagttcataaaaagtagattacgttttcctataaggataatttttgcagtgattatattgctaactctcattgcatgatacctttaataaaatgaacaatataagagttaagggcaatgggataaagctacttaatgtgtctcctccactgatcaaaaatattccatatagtcttggtgaggaattccccaggatataaatggctatttacactgtaatgaattataccatatatgatattcactcagtaatgttaataatgaactggctaataattgacaagatgcagtgcctgccagtttatgacattaacttggtttgaaactaacatatgacatagtaccagtgcagtcagagctgcccttaggcatgatgaacatgtggcccgtttttgcctggtgttttggcagcaaagcaggaagcaattttgtgtgggtcattgttctgtcaatttgtggaaaaaattacttcagtctcatataaatatagaatgggtccataaacccttcaactcatttccatggcaaaactcacttttctttttatacatgtccttcagtctcttaattttgtcaggtggagcttgatcttaattttaacctattatcttttatttttgtttgtttttggtgaaggataagagtggtgtttcttttgccctttctggtacaaacagagggacactaagcattaacttaataatcacatttaagacttgaacacatgctacccttttgtcatcttctgacataagtttacctgagtttccttgatttggaagatttgtttcttttatctctcttcctctggatgtagtttttttttgttttttttttgtttttggacggagtcttagtctgtcactgaggctggagtacagtggcacgatcttggctcactgcaacctccatctcccgggttcaaatgattctcctgcctcagcctcttgagtggctgggattacaggcacatgccaccacacccggctaatttttgtatttttagtagagatgggttttgcaatgttggccaggctggtctcaaactcctgacctcaagtgatctgcctgcctcggcctctcaaattgctggaattacagttgtgagccaccacacctggcttgaatgtagattttaataattgaatttattctgccgtgttgatagaataactgaatatcagtaaattgtgtaacagtggtggatactgttgcataagatgagctcctgaagagtgaagctaattctttggtcaatgttcttttcccctcagtgtctagtttaaggcttttagaagattgatctgtagcaattatttaatgaattgaatatttaaaaaattttttatttgctgtctttggtaattatctctctgcttgaaattaaatgcactataagttaatataacaagtaaaatacattgtcttttgaaaatagtttctttttaaaggaatactaattaattgtaacttgtaaaaccaaaagttctaatggtttttaaaaaccagtgttgagtggaaaagtgtttctttagtttggaaagacctgtgaagtatcctagtcagggaaagaacctgttttctggaagaatgtaagttgctatatgtggaggggcatgtaggacaggggttctaattactgtctgtgagagttactactttgtaacttatggtttctgcttcagtattgtgttggttctgtattataaattgcaccttaatagaccaaaaatatctatacagcactgatttccttgaatattgtgtgttaattgatatatcttctagaggcaaaaggtttaaatgtgttaaaatggttatattgcctcctttttaaacaaattaaagagttgtaaatactagtgtagatctcttttgtttaccacagcaaatactgattttatgattgttaagcatttcatattttaatttaaattggattcaaccacaataaagaaaatgagaaaagcttt

SEQ ID NO: 56690 - DNA, 4611 bp, Homo Sapiens
tggaagaagatggcggaaggcggagcggcggatctggacacccagcggtctgacatcgcgacgctgctcaaaacctcgctccggaaaggggacacctggtacctagtcgatagtcgctggttcaaacagtggaaaaaatatgttggctttgacagttgggacaaataccagatgggagatcaaaatgtgtatcctggacccattgataactctggacttctcaaagatggtgatgcccagtcacttaaggaacatcttattgatgaattggattacatactgttgccaactgaaggttggaataaacttgtcagctggtacacattgatggaaggtcaagagccaatagcacgaaaggtggttgaacagggtatgtttgtaaagcactgcaaagtagaagtatatctcacagaattgaagctatgtgaaaatggaaacatgaataatgttgtaactcgaagatttagcaaagctgacacaatagatacaattgaaaaggaaataagaaaaatcttcagtattccagatgaaaaggagaccagattgtggaacaaatacatgagtaacacatttgaaccactgaataaaccagacagcaccattcaggatgctggtttataccaaggacaggtattagtgatagaacagaaaaatgaagatggaacatggccaaggggtccttctactcctaatgtgaaaaactcaaattactgtcttccatcatataccgcttataagaactatgattattcggaacctggaagaaacaatgaacagccaggcctctgtggcctaagtaacttgggaaatacgtgtttcatgaactcagctattcagtgtttgagcaacacacctccacttactgagtatttcctcaatgataagtatcaagaagaactgaattttgacaatcccttaggaatgagaggtgaaatagctaaatcttatgccgaactgatcaagcaaatgtggtctggaaagtttagctacgtcaccccaagagcctttaagacacaggtaggacgttttgcacctcagttctctggatatcagcagcaagactgtcaagaactgttagctttcctattagatggattacatgaggatttgaatagaattaggaaaaaaccatatatacaattaaaagatgcagatggaaggccagataaggtggttgccgaagaagcctgggaaaaccatttaaaacgaaatgattctatcatagtagatatatttcatggccttttcaaatcaactttagtttgtcctgagtgtgctaagatttcagtaacatttgatcctttttgttacttgacacttccattgcccatgaaaaaagaacgcaccttggaagtttacttagttagaatggatccgcttaccaaacctatgcagtacaaagtggttgtccccaaaattggaaacatattagatctttgtacagcattgtctgctttgtcaggaatacctgcagataagatgatagttactgatatatacaatcatagatttcacagaatattcgctatggatgaaaaccttagtagtattatggaacgggatgatatttatgtgtttgaaattaacatcaataggacagaagatacagagcacgtgattattcctgtttgcctaagagaaaaattcagacactcgagttatacccaccatactggttcttcactttttggtcagccctttcttatggctgtaccacgaaacaatactgaagacaaactttataatctcctgctcttgagaatgtgccgatatgtcaaaatatctactgaaactgaagaaactgaaggatccctacactgctgtaaggaccaaaatattaatgggaatggcccaaatggcatacatgaagaaggctcaccaagtgaaatggaaacagatgagccagatgatgaatccagccaggatcaagaacttccctcagagaatgaaaacagtcagtctgaagattcagttggaggagataatgattctgaaaatggattatgtactgaggatacttgcaaaggtcaactcacgggacacaaaaaacgattgtttacattccagttcaacaacttaggcaatactgatatcaactacatcaaagatgataccaggcatataagatttgatgataggcagcttaggctagatgaaagatcttttcttgctttggattgggatcctgatttgaaaaaaagatattttgatgaaaatgctgctgaggactttgaaaaacatgaaagtgtggagtataaacctcctaaaaaaccctttgtgaaattaaaagattgcattgaactttttacaacaaaagaaaagctaggtgctgaagatccctggtattgtccgaattgtaaagaacatcagcaagccacaaagaaattggatttatggtccctgcctccagtacttgtagtacatctcaagcgattttcttacagtcgatacatgagagacaagttggataccttagttgattttcctatcaatgacttggatatgtcggaattcttaattaatccaaatgcaggtccttgccgctataatctgattgctgtttccaaccactatggagggatgggaggaggacactatactgcttttgcaaaaaataaagatgatggaaaatggtactattttgatgacagtagtgtctccactgcatctgaagaccaaattgtgtccaaagcagcatatgtactcttctaccagagacaagacactttcagtggaactggcttttttcctcttgaccgagaaactaaaggtgcttcagctgccactggcatcccattagaaagtgatgaagatagcaatgataatgacaatgatatagaaaatgaaaactgtatgcacactaactaatgaaagtcctagaagccataaaagagacactttcctgctggtggtatctatggaaatgatgaagttacccaccacattaaaacaaaagtctgagatggggagtttcagataaccgaatgtaaatcctttatcagattttaacttgtgcagtacttgaagtgaaacacaatgaaaactttaacagaaattgtctcttaatacatttacagtcttgtatttacaagctaaatatatataggaaatcacaaataaatcccttttaagtttgctgctgttttgattaattatgtttcctttaattttttggatgtgagttgatgacaaatgttaaatttgtggatgttggtcatttattttgctctaataatactgcaagaaaactatggctgaacttagtttttggataatctagttcatgtgcattaggctgccgtatatactactatgatatttagctgcagtatcaatgtggcataaatactgcggcagcattcttcgaaaaccgcattttcaaatttatccccgtaatcaatgtgggcctattaaaaaaccaaatcatgatacaagaaacaaccttggaaaagttatttccctttgtaatacctttaaaaatccagagtattatattcattttactgccactgtggaaacaggttctagatttcatactccatctaaagtcatttttcagttacatgtaagtattatttactgctattgggatctattcttcagatattcaaaaacattttttgctttaaaatgcatatctttaattgggtgttggtccaaaattaaaatttttgctgtctgtttttctctaccccattttgtggtaatttggcaacttgagctctcccaattattgtaatataaggacagacataatagtattctgtacccatagtaataattgcatcaagcttagatgagaaatttttttcatatactggcctttaaatcattaatggacaattggctataaaggtaggtctgttaactttctttgtgtgttcctgatggaattcaccatagccttacagcttttctcagaaggtaacttgttataagagaaatggcatttgcatgttccagagtcagaacctgtacagtatataaagcataaacaccttgaatttgattttagttcaccacattcaaggatccaggatgccaaaaatatgtgtgaacatttgaaacatttttatttgctgctttttccctttgatatagttgaaagaatgtattgtaaattggcatacaatactgcctttaatagaaaacctaaatgctggggcacatttcacatatcgactacctgagaaattgctttgtgtcccactgttattaaagcaaaaagtataatgttcttcacttgaactaatcaaatacaatagattataaattgtgtattgtaaataaaagttcactctgtgagtgcacattttggtaaattatttatttatgttagcatttaaaagtttaaaaaaaatgcatttgaccaggataaatgaggtatgttgatcatggctttgctttatatcttgatattaaagctggtttatcatcctggtattttaaaagctgctttggggttttttttttcttttttttttttttaatgtaaactaacctcctgcatgacagaggttaaaattttgtctgcacttgagttcacttgagtttacatttgaaatgtgcatgtttatttatatagatttcaataaagctattcaaggcctt

SEQ ID NO: 56691 - DNA, 2243 bp, Homo Sapiens
ggacgtcgaggcattacaatcgcgaaaccaagccatagcatgaaacagcgagcttgcagcctcaccgacgagtctcaactaaaagggactcccggagctaggggtggggactcggcctcacacagtgagtgccggctattggacttttgtccagtgacagctgagacaacaaggaccacgggaggaggtgtaggagagaagcgccgcgaacagcgatcgcccagcaccaagtccgcttccaggctttcggtttctttgcctccatcttgggtgcgccttcccggcgtctaggggagcgaaggctgaggtggcagcggcaggagagtccggccgcgacaggacgaactcccccactggaaaggattctgaaagaaatgaagtcagccctcagaaatgaagttgactgcctgctggctttcctgttgactggcccggagctgtactgcaagacccttgtgagcttccctagtctaagagtaggatgtctgctgaagtcatccatcaggttgaagaagcacttgatacagatgagaaggagatgctgctctttttgtgccgggatgttgctatagatgtggttccacctaatgtcagggaccttctggatattttacgggaaagaggtaagctgtctgtcggggacttggctgaactgctctacagagtgaggcgatttgacctgctcaaacgtatcttgaagatggacagaaaagctgtggagacccacctgctcaggaaccctcaccttgtttcggactatagagtgctgatggcagagattggtgaggatttggataaatctgatgtgtcctcattaattttcctcatgaaggattacatgggccgaggcaagataagcaaggagaagagtttcttggaccttgtggttgagttggagaaactaaatttggttgccccagatcaactggatttattagaaaaatgcctaaagaacatccacagaatagacctgaagacaaaaatccagaagtacaagcagtctgttcaaggagcagggacaagttacaggaatgttctccaagcagcaatccaaaagagtctcaaggatccttcaaataacttcaggctccataatgggagaagtaaagaacaaagacttaaggaacagcttggcgctcaacaagaaccagtgaagaaatccattcaggaatcagaagcttttttgcctcagagcatacctgaagagagatacaagatgaagagcaagcccctaggaatctgcctgataatcgattgcattggcaatgagacagagcttcttcgagacaccttcacttccctgggctatgaagtccagaaattcttgcatctcagtatgcatggtatatcccagattcttggccaatttgcctgtatgcccgagcaccgagactacgacagctttgtgtgtgtcctggtgagccgaggaggctcccagagtgtgtatggtgtggatcagactcactcagggctccccctgcatcacatcaggaggatgttcatgggagattcatgcccttatctagcagggaagccaaagatgttttttattcagaactatgtggtgtcagagggccagctggagaacagcagcctcttggaggtggatgggccagcgatgaagaatgtggaattcaaggctcagaagcgagggctgtgcacagttcaccgagaagctgacttcttctggagcctgtgtactgcggacatgtccctgctggagcagtctcacagctcaccgtccctgtacctgcagtgcctctcccagaaactgagacaagaaagaaaacgcccactcctggatcttcacattgaactcaatggctacatgtatgattggaacagcagagtttctgccaaggagaaatattatgtctggctgcagcacactctgagaaagaaacttatcctctcctacacataagaaaccaaaaggctgggcgtagtggctcacacctgtaatcccagcactttgggaggccaaggagggcagatcacttcaggtcaggagttcgagaccagcctggccaacatggtaaacgctgtccctagtaaaaatgcaaaaattagctgggtgtgggtgtgggtacctgtgttcccagttacttgggaggctgaggtgggaggatcttttgaacccaggagttcagggtcatagcatgctgtgattgtgcctacgaatagccactgcataccaacctgggcaatatagcaagatcccatctctttaaaaaaaaaaaaaa

SEQ ID NO: 56692 - DNA, 2371 bp, Homo Sapiens
cgcaagaacgcctggccggagctgccctctgcagccgagccggcgccccctgcccttcgccgccgcgctgggcgggcgcccccgccgccctcactccgctgctcccggctcctcgcgcgcaggtcgcggagctccgccaccgctgggtgcggcgaggccggcgcgatgcggcagctgtgccggggccgcgtgctgggcatctcggtggccatcgcgcacggggtcttctcgggctccctcaacatcttgctcaagttcctcatcagccgctaccagttctccttcctgaccctggtgcagtgcctgaccagctccaccgcggcgctgagcctggagctgctgcggcgcctcgggctcatcgccgtgccccccttcggtctgagcctggcgcgctccttcgcgggggtcgcggtgctctccacgctgcagtccagcctcacgctctggtccctgcgcggcctcagcctgcccatgtacgtggtcttcaagcgctgcctgcccctggtcaccatgctcatcggcgtcctggttctcaagaacggcgcgccctcgccaggggtgctggcggcggtgctcatcaccacctgcggcgccgccctggcaggagccggcgacctgacgggcgaccccatcgggtacgtcacgggagtgctggcggtgctggtgcacgctgcctacctggtgctcatccagaaggccagcgcagacaccgagcacgggccgctcaccgcgcagtacgtcatcgccgtctctgccaccccgctgctggtcatctgctccttcgccagcaccgactccatccacgcctggaccttcccgggctggaaggacccggccatggtctgcatcttcgtggcctgcatcctgatcggctgcgccatgaacttcaccacgctgcactgcacctacatcaattcggccgtgaccaccagcttcgtgggtgtggtgaagagcatcgccaccatcacggtgggcatggtggccttcagcgacgtggagcccacctctctgttcattgccggcgtggtggtgaacaccctgggctctatcatttactgtgtggccaagttcatggagaccagaaagcaaagcaactacgaggacctggaggcccagcctcggggagaggaggcgcagctaagtggagaccagctgccgttcgtgatggaggagctgcccggggagggaggaaatggccggtcagaaggtggggaggcagcaggtggccccgctcaggagagcaggcaagaggtcaggggcagcccccgaggagtcccgctggtggctgggagctctgaagaagggagcaggaggtcgttaaaagatgcttacctcgaggtatggaggttggttaggggaaccaggtatatgaagaaggattatttgatagaaaacgaggagttacccagtccttgagaaggaggtgcatgtacgtacctatgtgcatacacttattttatatgttagaaatgacgtgttttaatgagaggcctccccgttttattctttgaggagtggggaagggaagaaaagaaagaagctgaaaggtactgacacagagcaacaaaattagcacctgtgtgaattatttagtgtgacttcacctgaggcatcacagagacaaaagaatgtgaagctacttaacaaagtaaggcaacgtttctgcttcagactcctggcacatttactttttgtcattataaccataactaaatatctgcatgtaccaagagtccctaagccaccccctccaaagatggagtgtagaaatgatgacagcacttagtaagttcaaagatgacattcagggatgcattttttgatgatagaactacagtttttatcgccagctgggcaaagagtatattgctgaaatgatatataaatatattgaattgatgtttactgtttatagtcatctgaaatatcatatttactctgattctactcacttgttttttaaaaataagtgtcctactattgtattatatattgatagaaactgttaaagctattttgaaaatatgagttcttagctttaatcatgaagtctgaagtttgctttcagtaattattttaaaagttgttttggttcattgctttataatatttattattgaatgccaaacctgttcttttttttactgtgtccaatattctttcaagcaaatgcaatggctggaatataattcagaattaactgaaacccagccagaagagggaccacctgtaaagcaagtcctttcaagtttcactgcacatcccaaaccatgttacaaaaagagcaactgctatattcacattatgatatttttctatcttaaatttgtcaaaataaagtatgagtctaactattaaaaaaaaaaaaaaa

SEQ ID NO: 56693 - DNA, 1069 bp, Homo Sapiens
ccccgcgcagcccggcccgacccgcggcgatggcccagcccggggacccgcggcgcctctgcaggctggtgcaggagggccggctgcgcgccctgaaggaggagctgcaggcggccgggggctgcccggggccggccggggataccctcctgcactgcgccgcgcgccacgggcatcgggacgtgctggcctatctggccgaggcctggggcatggacatcgaggccaccaaccgagactacaagcggcctctgcacgaggcggcctccatgggccaccgagactgcgtgcgctacctgctgggccggggggcagcggtcgactgcctgaagaaggccgactggactcctctgatgatggcctgcacaaggaagaacctgggggtgatccaggagctggtggaacatggcgccaatccactcctgaagaacaaagatggctggaacagtttccacattgccagtcgagaaggcgaccctctgatcctccagtacctgctcactgtttgcccaggtgcctggaagacagagagcaaaattagaaggactcctctgcatactgcagcaatgcatggccatttggaggcagtcaaggtgcttcttaagaggtgccaatatgaaccagactacagagacaactgtggcgtcaccgccttgatggacgcaatccagtgtgggcacatcgacgtcgctaggctgctcctcgatgaacatggggcttgcctttcagcagaagacagcctgggtgcccaggctctgcacagggcagctgtcacaggacatacaagtacaattcagactctcttatccttgggagctgacatcaattctaaagatgaaaaaaatcgatcagccctgcatctggcctgtgcaggtcagcacttggcctgtgccaagtttctcctgcagtcgggactgaaggattctgaagacatcacgggcaccctggctcagcagctcccaaggagagcagatgtccttcagggctctggccatagcgcaatgacataaggatgtttccaagaggaggcaataaagtgcatggtaattcaaaaaaaaaaaaaaaaaaa

SEQ ID NO: 56694 - DNA, 7036 bp, Homo Sapiens
gctggtggcgcccgccagccggcccgggagaggggacttgagcgcttcgcggccggtgcgcagcgcggctccggccccgcagtctgtctgcaagtggccatccccgcccccgactcctgcggccggtgcgggagctgtcagctgcacgttgcgggggtaccggagaagccggggttgccttctcccggttctgtgcgctaaccccggagcccggccccggggaactagggagcgtctccggctgcacagcgctcaggttttagggtttcctttgggccacccaaaatgttttttaaatactttggataagagctaaaccacctgccactggggacttccatactctcggctcccttgtcatctgatggcattttgattgtctcgaggccaagtgacttgctgtccatgatgagtgatgagaagaaccttggtgtgtcccaaaaattggtatcaccttcaaggagcacaagtagctgctcttccaagcaaggaagtcgacaggacagctgggaagtggtggaaggactgaggggggagatgaattacacccaggagccaccagttcagaaaggatttttgctgaaaaagaggaagtggcccttaaaaggctggcataagagattcttctatctggacaaaggaatcttgaaatatgccaagagccaaaccgatatagagagagagaagctgcatggctgcattgatgtcgggctctcagtgatgtctgtaaagaagtcatcaaaatgcatagaccttgacaccgaggagcacatctaccatctgaaggtcaagtcagaagaagtctttgatgagtgggtatcgaaacttcgccaccacagaatgtatcgtcagaatgaaattgccatgtttccacatgaagttaaccactttttctcagggtccaccatcacagactcttcatctggggtgtttgactccatttcaagtaggaagcgtagcagtatatcaaagcagaatttatttcaaactggaagcaatgtatcattttcttgtggtggtgagacacgagttccattatggttacagtcttcagaggacatggaaaaatgctccaaagacctggcgcactgtcatgcctacctggtagaaatgagccagctcctgcaaagcatggacgtcctgcatcggacatactcggcaccagctatcaacgccatccaggtcccgaaacctttttctggcccagtaagactacactcctccaatcctaatttgtcaacactagattttggagaagagaaaaattattctgatggctctgaaacctcatcagagttttctaaaatgcaagaagatctgtgtcatattgcccataaagtttacttcactttaaggtcagcttttaatatcatgtcagcggagagagagaaactgaagcagctgatggagcaggatgcctcctcctccccgtctgctcaggtcattggtctgaagaacgccctgtcatccgccctagcacaaaacacagatcttaaagaacgcttacgcagaatccatgccgagtctctgctcctcgactcccccgctgtcgccaagtcgggtgacaatctggcagaggaaaactccagagatgaaaaccgagctctagttcatcagctttctaatgaaagtagactctccatcactgactccctttctgagttttttgatgctcaggaagttctgttatctccaagctcttcagaaaacgagatttctgatgatgactcatatgtcagtgacataagtgataatctttccttagataatctcagtaatgatttagataatgagagacagaccttggggcctgtccttgatagtggtcgggaagcgaagtcccggagaagaacgtgcctgccggcgccctgcccgagcagcagtaacatcagcctgtggaacatcctgaggaacaacatcgggaaggacctgtccaaggtggccatgccggtggagctgaacgagcccctgaacacgctgcagaggctctgcgaggagctggagtacagcgagctcctggacaaggccgcgcagattcccagccccctggaaaggatggtgaggagtcagccttcccttgccactgtccagcctcggtccccaagccacgaggccattcacggggcccatcagagagacagcccctgttccctccggtttcattttgattgttccgtaaacaggttcattactcagagctgtctggcttcctccgcctggctgtttccagtcaccttgtgaggatttggagacggggttggggtgcttctccgtggcacttggtgcctggggtagttctgttctgtgggtttgtgcttcctctttctccagaagccttctggctgattgttccgatgtgcccggctggaaaacatgtctttagggctgtctgcatgtttatttttacttccctgggtggacagaatttaatttctcgagctgtttttctcatccagggtatatgtggcagcctttgccatatcagcgtatgcatctagctactaccgagctggaagcaagccatttaatccggttcttggagaaacatatgaatgtattcgggaggacaagggcttccagtttttttcagaacaggtcagccaccatccgcctatctctgcgtgtcatgctgagtctagaaattttgttttctggcaagatgtgagatggaaaaacaaattctggggcaaatccatggaaattgttccaattggcacaacccatgtgactctgccagtttttggggatcattttgagtggaacaaagtgacctcttgcatccataacatcttaagcgggcagaggtggattgagcactatggagagattgtcatcaagaacctgcatgatgattcctgctactgcaaagtgaattttataaaggcaaaatactggagcactaatgcccatgagattgaaggcacagtgtttgacaggagtggaaaagcggttcatcggctgtttgggaaatggcatgaaagcatctactgtggcggcggctcctcttctgcctgtgtatggagagcaaatcctatgccgaaaggctacgagcaatactatagcttcacacagtttgcgctggaattaaatgaaatggatccatcatcaaagtctttattgccacctactgacactcgatttaggccagaccagaggtttctagaggaagggaacttagaagaagctgaaatacaaaagcagaggattgaacaactgcagagagaaaggcggcgggtcttagaagaaaatcatgtggagcaccagcctcggtttttcaggaaatccgacgatgactcttgggtgagcaacggcacctatttggaacttagaaaagatcttggtttttccaaactggaccatcctgtcttatggtgaaaaagtaaagaagaaagataacattagtgtatttctcctgtgcttgccttctgaagtggcacaaacctgtgtttatatatttaaaagatactctaggatgatcacttgtgcttagcttagcattgtaactctttaagtctatattttcctcagtgcgtttctttacaatttcaaatgttaccctgattgtttatatgaatgtagaacaccttgacatttctttttatatataaactatttaataaaaatgaaagattgaatgttcatgtgtgggttaaaaaaagaagctttaacactaattttccaaaggttagggaagattccaattaaatttatgccttataaaattatgttgtagaaaaaaaatcaacctctcccaggtgcattaagaaataagaattcccagggttactcacccatgcgtaagctacccaagtttaatttggtagctgaaatatctttttgcctcagacagctcttgaattgctcatacagaacaattctgctggtgctggagtctgaagaatattttcatttgcattttagtggttagggagaggatataagattaatggaatgtatatttttatataagacgtatacggcaccttcttgaaaaggaagcatttgaacttgttcctccctatagttctattgccttatatgcaaaattgtaccctgttgctcagagaaattattcataagagaaaagaattccaattaattaaatatcacaatagcatcccagagagacagtaggaaatttctccttagtgagagctgagtccttgagaagttaagagactgtttcctgcttcccaccccaccccgttttttgtccctccgtttgatcacctccctgttgagtatggaatgtcccagtttaatataaaacatacagtttattccacacagcagtttgactttgtaaaagtttagcaaaataactgattgttttggataactcaacatgtttttcttaaatgctgttttagtattttctacctcttaataagcaccatattttagatcttgtataaaaagttgccatctgccttatagacaaatgtagagaattgatgttcttgctttgtgttgtgttctggtaaagctttaagtgagtgtcttacccctttcctatactttcttgttatccatatcattcttttgtgagttttgcagcagtcttgaataatacagattataactactgaaaggggaaccttcgtctttttaaatgtgtcatttcacattacaataatatgtgtagtagttgaattgtgttatcaaagcatgtccaacttctgtccagatgacattaaaaccaaagcctaattgttaagcctcttattctaaagtccatagcaatgctatggaatatcaagtataatgatgtagtaaaaagatttctccagaaaacactttgagatacttaaagaaattcagagcatatcgaatgttatgaatgaagagtaaaataattacaggaaaagaatgcatgatttttcattgtcacaccaaataaccagttggacaatattgcattttcaaaatggagagttatttaaagtggatgtgtagccttctggaatctgcacgtgactggcattttaaaacaactcattaaatattggattcattttatcgagatgccaagatgaacacaatgtgaatatcatttccatttctaagcagttgaatgacacagtcagattctttggtgtatgctttgttctttccatctcaagcatttatccaaattctgctcacagacatgaggaagcaggctgtagatttaagggcactcaaggggaaaacaaatgtagtttccacagtgtgaggataaatgtagaatcgtggtaatattggctgttaaattggcctgctccagagactggctcaaaaaagaaagaagcaacgaaaacaaaatgcacagcctgaatggacgtagcactgtcatgtggcatttggaaaatctttaattatcctaatgttatttcacttgcccttatgctttattttagagtcccagggacaactggatgaaacattacgtctgtagtcatcttatttgagatgggggtgggaacgaattaaaatatgatagagaactatatgcagattttaaaatctagtcagtactagcatctataaagggcttttctgaaatttaaacagcttggtgatgcatcctgatattataagcttaaaactatcttgagggggaaatgacttcttttctccttctgtcccttttctcaaaagcatctttcccccaaatgtatgtctctaggacattttatagttttaagaggaagaaaacagaaacgtggcatcatttgggaagaaccaaggtagaatttaattttctggactttaaatctcctggttaaataatgctaatcactgtaccatttgagttacatgttttaacctcttttttttttctaattattccatccaaaatttctggtgaattacacagaaatttttggaaatgggactttgtgcaggtaaccaccctgcacttcaggtaatgttcctgtcacagctgtcgactaccccacgctgcaggaaatccattcagaaatgagctaacagtctccagtgtagcaggagagccagtcacttccctccccaggccccaaagcaccccaaggctggtattccttgagtcataggtattaataataaaagcctcaatgcagcttctccatgtagttcctctcctacaagccaggtggattctggtcctaactaaagagatgggagttcacctgagggcaagaagtacccaggatgcccaaacagccgcacaggtgtcctgtgcttcctgtgagacttcctgggggaaatatacaaactaatatattttttaatgtttacgtcatttacactgctgcttttctcatattctgcttttaattacttgtagtaaatcatttgtttgggcttcaagcactgtcttccatctgcatcttccagatttatcatgagtgatcttgttctactgttaaagatgtcaagcctaaaaagtaataaagtttttatttggctgttgaaccttgatgtagcccctactacatacactacaagttatgccttctggctactacagaatctccgcagaccttttagttatgagtagaagcaataagaaggtgtccttatggtcttaggaataatagttccaatgtattggcataatttgtttgaatgtctttattttgatattaacaccggcataaatctatttttgctaccagatgatagctattttcatttgctctattttcctctgcattgtactaatctgttactcagtgttagtcttcatttttctgtgttggaaacctgcgtcatgtaaatatctgcaaatcatgacagtctaaagtgcaaaccattttcagagactttggggaatgcagtgatcagaagtggctaatttattttatttctgattattttatccagagggtacttttttaatggatatttgtaaatcttccacttaaccactgaaaattattttgttttaatcccacccttccatccatacctctgcctccccaaaaagctcctattaatttgcttatccccctcatgtagctagttgaatgtgaataaataacatggaaaaaaaaaaaaaaaaaaaaaaaaa

SEQ ID NO: 56695 - DNA, 4664 bp, Homo Sapiens
ccagaaggctccatattctcaacatgtgcaggtcaatttgacataaagctaccaacaaggagcaacaggcccactgcaggctgtgtttataacttgaaaattatgagcaggtattgggagccacagactgtatttgggaaccagctgcatgtcaggacaagcatagattgtggtctgtggaggctgggagagcacaatgcttgaatttcatttctttgggagataagaagaaaaaataccttcctacctgacaagattgacaacttgctaaatctgattatcttcagaagtgtgctggacagttgcgaagtaaacatttacttttcaaagatgatgatcaaggaaacatctctacgaagggacccggatttaaggggagagctagctttcctggcaaggggctgtgattttgttctcccttcacggtttaagaagcggctgaagtcatttcagcagacacagattcaaaataaaccagaaaagaaacctggaacaccactcccacctccagccacctctccaagtagtccccgacctctctccccggttccccatgtgaataatgttgtgaatgcgccattgtccataaacattccacggttctactttcctgaaggactcccagatacctgtagtaatcatgaacaaactctaagcagaattgaaactgctttcatggatattgaagaacagaaagcagacatttatgaaatggggaaaattgcaaaggtctgtggctgtcctctctattggaaagcccccatgttcagggctgcagggggagagaagacaggatttgtgacagcacagtcattcattgccatgtggagaaagttgctgaataaccatcatgatgatgcctctaaattcatctgtcttctagcaaagcccaactgcagctctctagaacaggaggatttcatccctctacttcaggatgtggtggatacccaccctggtctcacgttcctgaaagatgctccagaattccactcccgctacatcaccacggttattcagagaatattctacacagtcaacagatcttggagtggaaaaattacttcgacagagataagaaaaagcaactttttgcaaaccctagcacttttggaagaagaggaagatataaaccaaattacagattacttctcctatgaacatttctatgttatttattgtaaattctgggaactagatactgatcacgacctctacatcagccaggccgatctgtctcgatacaatgaccaggcttcatcaagcaggattattgaaaggatattctctggtgcagtaacaaggggaaaaacaatacagaaagagggaagaatgagctatgcagattttgtttggtttttgatctctgaagaagacaaaaggaatcctaccagcattgagtattggttccgctgcatggatgtggatggagacggtgtactctccatgtatgagctggagtacttctatgaggagcagtgtgaacggatggaagccatgggaattgagcccttgccattccatgatttactgtgccagatgcttgacctagtgaagccagctgttgatggcaaaataactctaagagatctgaagaggtgcagaatggctcacatcttctatgacactttctttaatctggagaaatacttagaccatgaacagagagatccctttgcggtccagaaggatgttgagaacgatgggcctgagccctcagactgggaccggtttgccgctgaggagtatgagacgcttgttgcagaggaatctgcccaagcacaattccaggaaggctttgaagattatgaaacagatgaacctgcctctccctctgaatttggaaacaaaagcaataaaatattaagtgcaagccttccagagaaatgtggaaagcttcaatcagtggatgaagaatagctgccggtgtctacaatgaaacgaagatgtgtattttaaatgtttctttcttgtgaagagatgttctcgtttgcatactgctttttaaagactttgatttctccaagtgtgtatcatctgcactaggaactttgtttttaagcaataggtctggatacacatttaacttaggaggctcctccaatttgcctcaaacctcttacggagcttctcctcagaagtggtaccatcgccttccaaagtcagcactctacactcttgaatgtaccaaggatctcttggcgacagtaccaagcacggttctctacacaggtgactgaagttgcctctgtgttggctggcatccctgagtcccctccgggctcctatggagcctagaagaaaccttcacttgcagaaaacttgagtcagaaaattctggaacttgaaaaagtagtaagggcctccagaattgacttagccctagtaataaaagcactgccaaaacatctcagagacttcttttatgtatactggagttcaaagatctttaacttacctggcttaatgtaatttcacagttacctgccaaactactagtcactttacatcctcaggtattgtaaccactgggccttccaactttgctggcaagctctggtaacctccctgactgtggatcttatataaaatctcaagataaaaaaacacttcttaaatgaagtatagaatttgactcatacttggaaaaagcccttttaacttttatcttttattcattgaactattgaatgatgtatttaatatccaaattagttgataactgttttcacttcctatcagaaggcctgcttgaagacataaaggaataatgatacattaaaattcttactagatagatatattccttcctcccaggagtattagactagctaatagtaaaggcctcaacgttattctttacttcatgttgaaaacaattactacagatatttcatccacctcagtatttatcaaggaaatggaaaatgatacagctataaaagaaagctgttatttactgtagttgtagatgtattcactacagaatcctacatttttcagcaggccacagtccagccaaatcctataatatccttgaaaagaaactattaaaaaggatagacatttctgatgtaagtaaaacccccaagcaacttaatatccatctgtcagtcatcaacttttcccctagattttttttttaactagttctgaaagtgtcaagaatagcttccctttccaccctacctaggttccctccttgctggcataaaggccaagcagtgaaatgaaccttgggttagagttatggtaggcaaaaagaaaaggagaatttaggaaataaatatgctataaacaaggtacagtacagtgagagttaacaatcctaggaatcctgcctgtcacaagctcccagttccctgtcattttatcttcatgattagaactgatcttccatttaactattacagaaagcagtaactattgcaactatctaatagttcacacaaaagaattaaaagcttaaaaataatttttaggaaacacaatattcaaaatctaaacacactgataaattattaagattaagattatttatgtgataaatgaaatctcctaccaatccatccagcctttaccagggaagaaaagcaattatttcatttcagatagaaatacaaaaaaaaaaaaaatacttttcttagaagccagatatggtttaaatgttttattatccataatgatctaaactaataagattcaccaaaaagtaaaaattcaattttacaatatacatttttttttttaactatttggctttacctttttaccttggttctccttactgaagtcctcttgctttcactttgatctggtttttgaagtctcttaattattggctgggcatggtgactcatgcctgtaatcccggcactttgggaggccaagggaggtgatcacttgagcccaggagtaaagaccagcctgggcaacatagtgagactccgtctctacaaaaaataaatttagctgggcatggtggtgcacatctgtagtcctaccaacttgggaggctgaggcaggagaatcgcttgagccccaggcttcgaggctgcagtgagctatgattacgacactgcactccagcctaggcgacagagcaagaccccattctcttacaaagtctctattataaaagtacatccatcaataccattccatttaaaatgggctattgtaatttacccacattatcacattttcaggaattataagaatgtgttttattgtactccttccttggagctgaatgcaaggaatgtgaattctgaggaattaaggtagaatatatttgactttctggtaaagatcatggttaagtataatcattactgccaaactggaattttcaagttattataatatcccaggccccttgataaaagctgagggttatcatgaccttaatgctaattcaatgagaaatgagtttaatagcataacattaccaaggtaatcaaactaataaaattccatatatcttccctgcatcttgtcactgtgtaccattcaaagtgtttataaaactctagattcatcaaatgagatttgctcagctttttgaaatgttaagatgtgtttggagaaggctgcatgactttgtttttcccttttagcaaaactaaataaagttgtcaaatattgaaaaaaaaaaaaaaaaa

SEQ ID NO: 56696 - DNA, 4068 bp, Homo Sapiens; identical to SEQ ID NO: 30860

SEQ ID NO: 56697 - DNA, 2809 bp, Homo Sapiens
ccggctcgcggagagcgtagcgcggccttggtggcggaatggcgttgagtgacggcccggccccgccatctggttaaagggactcgttcaacacggaagtgtcccggggctgcattgtgctacagctagaatgaagcacatcaacctatcatttgcagcgtgtggatttctgggcatttaccacttgggggcagcatctgcactttgcagacatggcaaaaaacttgtgaaggatgtcaaagccttcgctggggcgtctgcgggatcgttggttgcttctgttctgctaacagcaccagaaaaaatagaggaatgtaaccaatttacctacaagtttgccgaagaaatcagaaggcagtctttcggggcagtaacgcccggttatgacttcatggcccgactaagaagtgggatggagtcgattcttcctcccagcgctcacgagctggcccagaaccgactgcacgtatccatcaccaacgccaaaaccagagaaaatcacttagtctccactttttcctccagggaggacctcattaaggtcctcctagccagcagttttgtgcccatttatgcaggactgaagctagtggaatacaaagggcagaagtgggtggacggaggcctcaccaacgctcttcccatcctgcccgtcggccggacagtaaccatctcccccttcagtggacgactggacatctccccgcaggacaaagggcagctagatctgtatgttaatatcgccaagcaggatatcatgttgtccctggcaaacctggtgagactcaaccaagccctttttcccccaagcaagaggaaaatggaatctttgtatcagtgtggttttgatgacactgttaagtttttacttaaagaaaattggtttgaataaaatgcataaaagtttataatgcaaaacacgttttagatagtttttgatggaagtttctaatcaaatcctttttagaaaatctatcatgactcaattgtattactccttgtaatatttgtgtttatttttaatatttgaattattacttagcacatggatataagaggcactttattagaatttgacaacgtcattaagaaggatacacttaggtgataaggaatcatttttggtgaactgttgtgtcctttaaaaaatggaggaggataggttctttgggtaaattgaggaacatggaaaatggagggccaccacttaggttccatggagaatatgtggcatgatcttgacgtgaagcatgggtgtttccgtgacttagctgtgtccctgtagctctggaactgaaggaactaggtaggagaggaaggatttgagaaataggcaactcatggttaaagacctttgatcaggactggaggaacaaaggtttgtgtattagtccattttcacactgctgagaaagacatacccaagactgggcaatttacaaaagaaaggtttaatgggctcacagttccacatgactgaggaggcctcacaattgtggtggaaggtgaaaggcatgtctcacatggcagcagacaagagaagaaaacttgtgcagggaaactcccctttataaaaccatcggatctcttgagacgcgttcactatcatgagaatagcatgggaaagacctgcctccatgattcagttacctcccactgggtccctcccacaacgtgtggcaattgtgggagctacatacacttcaagatgagatttgggtggggacacagccaaaccataacagtttgctttccacaggtgtgtgcagttgctcccagtgcagttaggggcagatatccagaagcctaggagattttgaagaggcttatcccctctcatcttcctcccctaaaccccaccccagtttaggagattatcaagctggttgtcattcattctctctctctctctctctctctctctctctctctctctctctctctcgccatacctctctgagtatttagctattgttctatatactggatacatctattatgggaacttaaatagataaaatactactaaacacaaagaaccaagtagcctagtaaataagaattaaatccagaataatcattcacttctcatttttaaatcacgttgtactgatcccaggttttttactttctgagtagttgtcgatcactttgaggacttgtgtatgggcttgtaccaatttactgacactgtcttaaatcctaaatctgtttttatgaggttttgccaagcaagaactcttgattactaagaggcagttagagacaaaccaatttaattccatgtcttcaattgtcacgcatttcttcttttactctttgaaactattctttgagtcaattttatggttctcagaagccaaaatacacaacttttagcacataaacaccaacgatggcctctttttgaggagttatgcatagacccactctagagtaatgatggtccctgtggtatatactttctcctactctagcaaacatgtagtttaatcttaatgtgttgtttccataagtgacatgaagtggatagattctcaattgttatgtccacttattcactaggtaaattttcagttttaatacttttctccttaccccttcctttgatcatttcatgtgaatattctatttgtatgatacactgtatttcaataaattccttgttgatgtacccttaaattgaagaaatttaagctgcaaaaccaaatctcattgtataagacttttttgaagtatcttgtatcgactacatatgtatttgaccctgtgggaggatggtacttttctttttaacttttattttaag

SEQ ID NO: 56698 - DNA, 4963 bp, Homo Sapiens
ctcatgcatatgcaggtgcgcgggtgacgaatgggcgagcgagctgtcagtctcgttccgaacttgttggctgcggtgccgggagcgcgggcgcgcagagccgaggccgggacccgctgccttcaccgccgccgccgtcgccgccgggtgggagccgggccgggcagccggagcgcggccgccagcgagccggagctgccgccgcccctgcacgcccgccgcccaggcccgcgcgccgcggcgctgcgctcgaccccgcccgcgccgccgccgccgccgcctctgccgctgccgctgcctctgcgggcgctcggagggcgggcgggcgctgggaggccggcgcggcggctgggagccgggcgcgggcggcggcggcggggccgggcgggcgggtcgcgggggcaatgcgggcgcagggccgggggcgccttccccggcggctgctgctgctgctggcgctctgggtgcaggcggcgcggcccatgggctatttcgagctgcagctgagcgcgctgcggaacgtgaacggggagctgctgagcggcgcctgctgtgacggcgacggccggacaacgcgcgcggggggctgcggccacgacgagtgcgacacgtacgtgcgcgtgtgccttaaggagtaccaggccaaggtgacgcccacggggccctgcagctacggccacggcgccacgcccgtgctgggcggcaactccttctacctgccgccggcgggcgctgcgggggaccgagcgcgggcgcgggcccgggccggcggcgaccaggacccgggcctcgtcgtcatccccttccagttcgcctggccgcgctcctttaccctcatcgtggaggcctgggactgggacaacgataccaccccgaatgaggagctgctgatcgagcgagtgtcgcatgccggcatgatcaacccggaggaccgctggaagagcctgcacttcagcggccacgtggcgcacctggagctgcagatccgcgtgcgctgcgacgagaactactacagcgccacttgcaacaagttctgccggccccgcaacgactttttcggccactacacctgcgaccagtacggcaacaaggcctgcatggacggctggatgggcaaggagtgcaaggaagctgtgtgtaaacaagggtgtaatttgctccacgggggatgcaccgtgcctggggagtgcaggtgcagctacggctggcaagggaggttctgcgatgagtgtgtcccctaccccggctgcgtgcatggcagttgtgtggagccctggcagtgcaactgtgagaccaactggggcggcctgctctgtgacaaagacctgaactactgtggcagccaccacccctgcaccaacggaggcacgtgcatcaacgccgagcctgaccagtaccgctgcacctgccctgacggctactcgggcaggaactgtgagaaggctgagcacgcctgcacctccaacccgtgtgccaacgggggctcttgccatgaggtgccgtccggcttcgaatgccactgcccatcgggctggagcgggcccacctgtgcccttgacatcgatgagtgtgcttcgaacccgtgtgcggccggtggcacctgtgtggaccaggtggacggctttgagtgcatctgccccgagcagtgggtgggggccacctgccagctggacgtcaacgactgtcgcgggcagtgtcagcatgggggcacctgcaaggacctggtgaacgggtaccagtgtgtgtgcccacggggcttcggaggccggcattgcgagctggaacgagacgagtgtgccagcagcccctgccacagcggcggcctctgcgaggacctggccgacggcttccactgccactgcccccagggcttctccgggcctctctgtgaggtggatgtcgacctttgtgagccaagcccctgccggaacggcgctcgctgctataacctggagggtgactattactgcgcctgccctgatgactttggtggcaagaactgctccgtgccccgcgagccgtgccctggcggggcctgcagagtgatcgatggctgcgggtcagacgcggggcctgggatgcctggcacagcagcctccggcgtgtgtggcccccatggacgctgcgtcagccagccagggggcaacttttcctgcatctgtgacagtggctttactggcacctactgccatgagaacattgacgactgcctgggccagccctgccgcaatgggggcacatgcatcgatgaggtggacgccttccgctgcttctgccccagcggctgggagggcgagctctgcgacaccaatcccaacgactgccttcccgatccctgccacagccgcggccgctgctacgacctggtcaatgacttctactgtgcgtgcgacgacggctggaagggcaagacctgccactcacgcgagttccagtgcgatgcctacacctgcagcaacggtggcacctgctacgacagcggcgacaccttccgctgcgcctgcccccccggctggaagggcagcacctgcgccgtcgccaagaacagcagctgcctgcccaacccctgtgtgaatggtggcacctgcgtgggcagcggggcctccttctcctgcatctgccgggacggctgggagggtcgtacttgcactcacaataccaacgactgcaaccctctgccttgctacaatggtggcatctgtgttgacggcgtcaactggttccgctgcgagtgtgcacctggcttcgcggggcctgactgccgcatcaacatcgacgagtgccagtcctcgccctgtgcctacggggccacgtgtgtggatgagatcaacgggtatcgctgtagctgcccacccggccgagccggcccccggtgccaggaagtgatcgggttcgggagatcctgctggtcccggggcactccgttcccacacggaagctcctgggtggaagactgcaacagctgccgctgcctggatggccgccgtgactgcagcaaggtgtggtgcggatggaagccttgtctgctggccggccagcccgaggccctgagcgcccagtgcccactggggcaaaggtgcctggagaaggccccaggccagtgtctgcgaccaccctgtgaggcctggggggagtgcggcgcagaagagccaccgagcaccccctgcctgccacgctccggccacctggacaataactgtgcccgcctcaccttgcatttcaaccgtgaccacgtgccccagggcaccacggtgggcgccatttgctccgggatccgctccctgccagccacaagggctgtggcacgggaccgcctgctggtgttgctttgcgaccgggcgtcctcgggggccagtgccgtggaggtggccgtgtccttcagccctgccagggacctgcctgacagcagcctgatccagggcgcggcccacgccatcgtggccgccatcacccagcgggggaacagctcactgctcctggctgtcaccgaggtcaaggtggagacggttgttacgggcggctcttccacaggtctgctggtgcctgtgctgtgtggtgccttcagcgtgctgtggctggcgtgcgtggtcctgtgcgtgtggtggacacgcaagcgcaggaaagagcgggagaggagccggctgccgcgggaggagagcgccaacaaccagtgggccccgctcaaccccatccgcaaccccatcgagcggccggggggccacaaggacgtgctctaccagtgcaagaacttcacgccgccgccgcgcagggcggacgaggcgctgcccgggccggccggccacgcggccgtcagggaggatgaggaggacgaggatctgggccgcggtgaggaggactccctggaggcggagaagttcctctcacacaaattcaccaaagatcctggccgctcgccggggaggccggcccactgggcctcaggccccaaagtggacaaccgcgcggtcaggagcatcaatgaggcccgctacgccggcaaggagtaggggcggctgccagctgggccgggacccagggccctcggtgggagccatgccgtctgccggacccggaggccgaggccatgtgcatagtttctttattttgtgtaaaaaaaccaccaaaaacaaaaaccaaatgtttattttctacgtttctttaaccttgtataaattattcagtaactgtcaggctgaaaacaatggagtattctcggatagttgctatttttgtaaagtttccgtgcgtggcactcgctgtatgaaaggagagagcaaagggtgtctgcgtcgtcaccaaatcgtagcgtttgttaccagaggttgtgcactgtttacagaatcttccttttattcctcactcgggtttctctgtggctccaggccaaagtgccggtgagacccatggctgtgttggtgtggcccatggctgttggtgggacccgtggctgatggtgtggcctgtggctgtcggtgggactcgtggctgtcaatgggacctgtggctgtcggtgggacctacggtggtcggtgggaccctggttattgatgtggccctggctgccggcacggcccgtggctgttgacgcacctgtggttgttagtggggcctgaggtcatcggcgtggcccaaggccggcaggtcaacctcgcgcttgctggccagtccaccctgcctgccgtctgtgcttcctcctgcccagaacgcccgctccagcgatctctccactgtgctttcagaagtgcccttcctgctgcgcagttctcccatcctgggacggcggcagtattgaagctcgtgacaagtgccttcacacagacccctcgcaactgtccacgcgtgccgtggcaccaggcgctgcccacctgccggccccggccgcccctcctcgtgaaagtgcatttttgtaaatgtgtacatattaaaggaagcactctgtatatttgattgaataatgccacca

SEQ ID NO: 56699 - DNA, 6369 bp, Homo Sapiens
ccggcctgtcttttgccccgggctcaatggctggattgtggaaactgcacccgccttcaggttgttgagcaactgatgggacgatctcagggaccggcgtttacgaaagaaatgtttaatttggtaaattggaggaaaaaaacatggatttttagcaattgaagagcaaattaaggtttcagatttgggatattggtgtttctgttttggagaaattattctttttctttttaatttgaagaaaaatcatcagtcttggaatacagaagagaaactagaaatatacgtattttgtttcacatttgaacagtcattcttgaggaatactccatacctgagtagacagccatgtggccatcgcagctactaattttcatgatgctcttagctccaataattcatgctttcagccgtgccccaattccaatggctgtggtccgcagagagctatcctgtgagagctatcctatagagcttcgctgtccaggaacagacgtcatcatgatagaaagtgccaactatggcaggactgatgacaaaatttgtgactctgaccctgctcagatggagaatatccgatgttatctgccagatgcctataagattatgtctcaaagatgcaataacagaacccagtgtgcagtggtggcaggtcctgatgtttttccagacccgtgtccaggaacctataaataccttgaagtgcagtatgaatgtgtcccttacaaagtggaacaaaaagtttttctttgtcctggactactaaaaggagtataccagagtgaacatttgtttgagtccgaccaccaatctggggcgtggtgcaaagaccctctgcaggcatctgacaagatttattatatgccctggactccctacagaactgataccctgactgagtattcatccaaggatgacttcattgctggaagaccaactacaacctacaagctccctcatagggtggatggcacaggatttgtagtgtatgatggagctttgttcttcaacaaagagcgcaccaggaacatagtaaagtttgatttgcggactaggataaagagtggagaggctatcatagcaaatgccaattaccatgatacctccccttaccgatggggaggcaaatctgacatagacctggcagtagatgagaatgggctatgggtaatctatgcaacagaacaaaacaatggtaaaattgtcattagtcaattgaacccttacaccctacggatcgaaggaacatgggatactgcatatgataaaaggtcagcttccaatgcctttatgatttgtggaattctgtatgtggtcaaatctgtatatgaggatgatgacaatgaggctactggaaataagattgactacatttacaacactgaccaaagcaaggatagtttggtggatgtaccctttcctaattcataccagtacattgcagctgtggattacaaccccagggacaacctactttatgtatggaataactatcacgtcgtgaaatattctttggattttggacctctggatagtagatcagggcaggcacatcatggacaagtttcatacatttctccgccaattcaccttgactctgagctagaaagaccctctgttaaagatatctctaccacaggacctcttggcatgggaagcactaccaccagtaccacccttcggaccacaactttgagcccaggaaggagtaccaccccgtcagtgtcaggaagaagaaaccggagtactagtaccccatctccagctgtcgaggtacttgatgacatgaccacacaccttccatcagcatcgtcccaaatcccagctctcgaagagagctgtgaggctgtggaagcccgagaaatcatgtggtttaagactcgtcaaggacagatagcaaagcagccatgccctgcaggaactataggtgtatcaacttatctatgccttgctcctgatggaatttgggatccccaaggtccagatctcagcaactgttcttctccttgggtcaatcatataacacagaagttgaaatctggtgaaacagctgccaacattgctagagagctggctgaacagacaagaaatcacttgaatgctggggacatcacctactctgtccgggccatggaccagctggtaggcctcctagatgtacagcttcggaacttgaccccaggtggaaaagatagtgctgcccggagtttgaacaagcttcagaaaagagagcgctcttgcagagcctatgtccaggcaatggtcgagacagttaacaacctccttcagccacaagctttgaatgcatggagagacctgactacgagtgatcagctgcgtgcggccaccatgttgcttcatactgtggaggaaagtgcttttgtgctggctgataaccttttgaagactgacattgtcagggagaatacagacaatattaaattggaagttgcaagactgagcacagaaggaaacttagaagacctaaaatttccagaaaacatgggccatggaagcactatccagctgtctgcaaataccttaaagcaaaatggccgaaatggagagatcagagtggcctttgtcctgtataacaacttgggtccttatttatccacggagaatgccagtatgaagttgggaacggaagctttgtccacaaatcattctgttattgtcaattcccctgttattacggcagcaataaacaaagagttcagtaacaaggtttatttggctgatcctgtggtatttactgttaaacatatcaagcagtcagaggaaaatttcaaccctaactgttcattttggagctactccaagcgtacaatgacaggttattggtcaacacaaggctgtcggctcctgacaacaaataagacacatactacatgctcttgtaaccacctaacaaattttgcagtactgatggcacatgtggaagttaagcacagtgatgcggtccatgacctccttctggatgtgatcacgtgggttggaattttgctgtcccttgtttgtctcctgatttgcatcttcacattttgctttttccgcgggctccagagtgaccgtaacaccatccacaagaacctctgcatcagtctctttgtagcagagctgctcttcctgattgggatcaaccgaactgaccaaccaattgcctgtgctgttttcgctgccctgttacatttcttcttcttggctgccttcacctggatgttcctggagggggtgcagctttatatcatgctggtggaggtttttgagagtgaacattcacgtaggaaatacttttatctggtcggctatgggatgcctgcactcattgtggctgtgtcagctgcagtagactacaggagttatggaacagataaagtatgttggctccgacttgacacctacttcatttggagttttataggaccagcaactttgataattatgcttaatgtaatcttccttgggattgctttatataaaatgtttcatcatactgctatactgaaacctgaatcaggctgtcttgataacatcaactatgaggataacagacccttcatcaagtcatgggttataggtgcaatagctcttctctgcctattaggattgacctgggcctttggactcatgtatattaatgaaagcacagtcatcatggcctatctcttcaccattttcaattctctacagggaatgtttatatttattttccattgtgtcctacagaagaaggtacgaaaagagtatgggaaatgcctgcgaacacattgctgtagtggcaaaagtacagagagttccattggttcagggaaaacatctggttctcgaactcctggacgctactccacaggctcacagagccgaatccgtagaatgtggaatgacacggttcgaaagcagtcagagtcttcctttattactggagacataaacagttcagcgtcactcaacagagagccctacagagagacaagtatgggagtaaagctaaacattgcatatcaaataggggcttctgaacaatgccagggatacaagtgtcatggatactctaccactgaatggtaaccatggcaatagttacagcattgccagcggcgaatacctgagcaactgtgtgcaaatcatagaccgtggctataaccataacgagaccgccctagagaaaaagattctgaaggaactcactcccaactatatcccttcttacctgaacaaccatgagcgctccagtgaacagaacaggaatctgatgaacaagctggtgaataaccttggcagtggaagggaagatgatgccattgtcctggatgatgccacctcgtttaaccacgaggagagtttgggcctggaactcattcatgaggaatctgatgctcctttgctgcccccaagagtatactccaccgagaaccaccagccacaccattataccagaaggcggatcccccaagaccacagtgagagctttttccctttgctaaccaacgagcacacagaagatctccagtcaccccatagagactctctctataccagcatgccgacactggctggtgtggccgccacagagagtgttaccaccagcacccagaccgaacccccaccggccaaatgtggtgatgccgaagatgtttactacaaaagcatgccaaacctaggctccagaaaccacgtccatcagctgcatacttactaccagctaggtcgcggcagcagtgatggatttatagttcctccaaacaaagatgggacccctcccgagggaagttcaaaaggaccggctcatttggtcactagtctatagaagatgacacagaaattggaaccaacaaaactgctaacaccttgttgactgttctgagttgatataagcagtggtaataatgtgtgtactcctaaatctttatgctgtcctctaaagacaaacacaaactctcagacttttttttttttaatgggatttttaggtcagcccaggggagaaagataactgctaaaattcccctgtaccccatcctttcttgtcctttccccttcagatggagacttcattatgttaatgaacaagatatgaagaaaatggcactcattgtggccttgttgaattatgttgtgtatgttttaacatctctgatgctgtgttactaaaattacaaggacctgctttttaaaaggccagaacaattgtctgaaattagtaacaatgctgcatctagattggagtgctgcacaaacaaacataagagcaaagcaaaactgtatcacatagggtttttggtcactcacaacctgaattcaccacagctggaatagctgtggaaaacaaaataaaacaacaaaattaataatgaaatggaggggaattctagaattatatgctaaatgcatattttatgatttgctgtattaactgatgataaaactaatggcagaaaaagaagttgagcaatttctatgtaatgtacagatactagcattgcacatatagtctgctttctgttcctccagaatttgagtcctgttaatgtagtagaaaaaaaaaaaagaaattttctttttcttttgtgctggtcttgcaagtttgtctaccagtaagagagcaaagtttccttcctttcttctctttcttcattttctttttttcttttttgccttttattcctttaaaatttcgcctggcaaaaaataaataaatggaactatcactttataagaatcattttctagtaatgcaaacaaattattttttacaaaaaaacaaaataaataaaattagacttccttccctcactatatatctttatgcagtcagaatatttccaacagtgttttttgcaaattagagcaggacaaacttttatgtttacagggcacgtctgttgtaatgcaaagcatatttggcaagcagttcatcaccaggacactagctatgattctagaagtcaaaaggtgtctatagaactagtggggcttctgcatgtgaaaaacggttttccataggcattaaagtgctgaatgctcagtctgatcaacaagtgggcacctgcactaccactttttagaggaaattcactccctcgtaagcattggaaggtcaaattattttgaagtgattttttttaaaaaaaagtcttctgtttattaacaggaaaatttatttatttgacaggattttgagtaatgtaggaatacaaaaggtaaattagcagcacatataatttttttttaatttatgatccattttgtatggtctcaaagttggatgacctcattactaatatttgttgtaaaagtgaaacttgtttgccaaccaataaacaactgattgagatttagaagatattgtaaaaaaaaaaaaaaaaa

SEQ ID NO: 56700 - DNA, 5937 bp, Homo Sapiens
ctgctcctgcgcggcagctgctttagaaggtctcgagcctcctgtaccttcccagggatgaaccgggccttccctctggaaggcgagggttcgggccacagtgagcgagggccagggcggtgggcgcgcgcagagggaaaccggatcagttgagagagaatcaagagtagcggatgaggcgcttgtggggcgcggcccggaagccctcgggcgcgggctgggagaaggagtgggcggaggcgccgcaggaggctcccggggcctggtcgggccggctgggccccgggcgcagtggaagaaagggacgggcggtgcccggttgggcgtcctggccagctcaccttgccctggcggctcgccccgcccggcacttgggaggagcagggcagggcccgcggcctttgcattctgggaccgcccccttccattcccgggccagcggcgagcggcagcgacggctggagccgcagctacagcatgagagccggtgccgctcctccacgcctgcggacgcgtggcgagcggaggcagcgctgcctgttcgcgccatgggggcaccgtggggctcgccgacggcggcggcgggcgggcggcgcgggtggcgccgaggccgggggctgccatggaccgtctgtgtgctggcggccgccggcttgacgtgtacggcgctgatcacctacgcttgctgggggcagctgccgccgctgccctgggcgtcgccaaccccgtcgcgaccggtgggcgtgctgctgtggtgggagcccttcggggggcgcgatagcgccccgaggccgccccctgactgccggctgcgcttcaacatcagcggctgccgcctgctcaccgaccgcgcgtcctacggagaggctcaggccgtgcttttccaccaccgcgacctcgtgaaggggccccccgactggcccccgccctggggcatccaggcgcacactgccgaggaggtggatctgcgcgtgttggactacgaggaggcagcggcggcggcagaagccctggcgacctccagccccaggcccccgggccagcgctgggtttggatgaacttcgagtcgccctcgcactccccggggctgcgaagcctggcaagtaacctcttcaactggacgctctcctaccgggcggactcggacgtctttgtgccttatggctacctctaccccagaagccaccccggcgacccgccctcaggcctggccccgccactgtccaggaaacaggggctggtggcatgggtggtgagccactgggacgagcgccaggcccgggtccgctactaccaccaactgagccaacatgtgaccgtggacgtgttcggccggggcgggccggggcagccggtgcccgaaattgggctcctgcacacagtggcccgctacaagttctacctggctttcgagaactcgcagcacctggattatatcaccgagaagctctggcgcaacgcgttgctcgctggggcggtgccggtggtgctgggcccagaccgtgccaactacgagcgctttgtgccccgcggcgccttcatccacgtggacgacttcccaagtgcctcctccctggcctcgtacctgcttttcctcgaccgcaaccccgcggtctatcgccgctacttccactggcgccggagctacgctgtccacatcacctccttctgggacgagccttggtgccgggtgtgccaggctgtacagagggctggggaccggcccaagagcatacggaacttggccagctggttcgagcggtgaagccgcgctcccctggaagcgacccaggggaggccaagttgtcagctttttgatcctctactgtgcatctccttgactgccgcatcatgggagtaagttcttcaaacacccatttttgctctatgggaaaaaaacgatttaccaattaatattactcagcacagagatgggggcccggtttccatattttttgcacagctagcaattgggctccctttgctgctgatgggcatcattgtttaggggtgaaggagggggttcttcctcaccttgtaaccagtgcagaaatgaaatagcttagcggcaagaagccgttgaggcggtttcctgaatttccccatctgccacaggccatatttgtggcccgtgcagcttccaaatctcatacacaactgttcccgattcacgtttttctggaccaaggtgaagcaaatttgtggttgtagaaggagccttgttggtggagagtggaaggactgtggctgcaggtgggactttgttgtttggattcctcacagccttggctcctgagaaaggtgaggagggcagtccaagaggggccgctgacttctttcacaagtactatctgttcccctgtcctgtgaatggaagcaaagtgctggattgtccttggaggaaacttaagatgaatacatgcgtgtacctcactttacataagaaatgtattcctgaaaagctgcatttaaatcaagtcccaaattcattgacttaggggagttcagtatttaatgaaaccctatggagaatttatccctttacaatgtgaatagtcatctcctaatttgtttcttctgtctttatgtttttctataacctggattttttaaatcatattaaaattacagatgtgaaaataaagcagaagcaacctttttccctcttcccagaaaaccagtctgtgtttacagacagaagagaaggaagccatagtgtcacttccacacaattatttatttcatgtctttactggacctgaaatttaaactgcaatgccagtcctgcaggagtgctggcattaccctctgcagaacagtgaaaggtattgcactacattatggaatcatgcaaaaggaaaaaaagtttcatgatatctgttgttggcagtttttgtttatctctgacagtttttagttaaatgtttagatcctcagaactacattagtgcctactattaacttactctgtctcttgttaaaggctaaatctgcgcttctccctggtgccagcaggttcccctcacagtcaatgcagtggtatagcatatcctcacatttctagtgcccttgagactgtgctatggaaccaatcttgaacatacatgcattgacttgacaagttactgagtaagcagcatattcagcaggtgccactacatgcctactctgccagacactgagcttggggccctagggaagatagagaattatacaaggcaaagtccttctctttagggctcttacaatctatcacttccaaaaagtaaatggtgactgataaaacaattggcagaacctgtttgattactgtgacagtcttaatgataccataaatcaatattagaaagctagttgacttaaagcctgaaataatgggagttttctcctccacttattagaataaggaccctcagtgactaattattgtgggtagggtcaagattaactagttttatacagagttctgctgtaaatagtcattttgcatttgattagtgcagttctctgaatcataaagcaagttttacctctctgtacatgtttttgcagacatacttgaaaagctcacttaaatctaggtgcttcaattcactttcttgagaggacaaatgaaaagctgtggagaaaatgtcctcattaaagtattaaagtgtgggcagaattacaattacaaagtgccagccaccgaataaagataaaagttcagttcttaaaatgagtttttatgagataacagtcagtgatcttggtgttaccgggattccacatggggcagtgggaaagagttcaggttttgaaggtaacctagtttagatttgaattccagctatgtgacattgggtaaattagtagtagtcctgagcctcagcgtcctcatctataaaatgactggcgaaaatacttcacaagctcattttgagcactttaggaagtaagtgaaagtacctaaaatagcaggcacccaattgatgattttatatcttccttctttgcttgcagtgatttcaggatgtcctcatatctatttataggtctaaaattatatcttaaggtatgttgtagaataaattaaaaggataatctaaatcaccatttagattaagcttgacttgcaaactaggaagaagcacctaggctttctttgaaaatatttttttggttcgttttggtaaagctctataaattggtatctattattttaccaatttttttttagtattaagtccatttagaactaaccatattatttatggaataattagcatgaggaaggtataattgcattttttttttttttagacggagcttgcactgtagccccagctggactgcagtggcgtgatcttggctcactgcaacctccgcctcccaggttcaagcgattctcctgcctcagcctcccgagcagctgagactacaggcgcctgccaccacgcctggccaattttttgtatttttagtagagactgcgtttcaccatgttgggcaggctggtcttgaactcctgaccttgtgatccacctgcctcggcctctcagagagctgggattacaggtgtgagccgccgtgcccagccattgcatttttattcacatacacattgttaatgtggaacaatttaacactaatctcatcagagagcgagatgaatgtggcaattgctcattttattttgcatatattaaattgagtaggttcagctctaacataccttaagaaaaatgcatatcggtgcactgtatgtatttcaaaatgcctttcctatgattgtcatgtcctcctttaaggcttttccctcaaatttattacaaatttagtatttttagtacttgatgactctaattacatgaatgcacctggaatgacatttgtaacagaagacggtctgacttgctttcagtattcacaagttctttccagtttccaagtcttttcctagcagtaatttaggggagacagaggagtttcatgtaaagagcatgcagtttggagtcagaacctgggtatgactctgtggccttgatgaagcaagttacttaaactcttgagttttagctttctcctttacaatgcatgaatgcctatccccctacaaaacaaagattaaatgtgatgatgtatgccaaggtgctttgtatattgtaaagtgctatataattataagatgttctaaattttcaaggatctaaaccagggattggcaaacgtttttccagggagtaaatattttacgctttgcatatataatttatggaggtgttgagaggatagattagacacttgaagtactcaggatagtgcctggcatgtaggaagcacctggaaaatattcgctgtgattaccatcagtccattttaccgaggaaggagccaaggtccaggcccactgaaggacttgcataacattacaatagcagtggcagaaccagccatgcttctgcaaatcacaacctctttgagcctctgtcacctgaactgcaaaatgagtgggttagacaaaatcatctgttgggacctcctagttccacgtgctatcattctactaactggcaccctaaggttgaaagtgcttatctgctttccaatgtggcttccttacagtctggaactgacaatatgcaggagcagtaaactggcagaaaaccaggaatcagagaaagaaaatataatttaactttaaagatgtaaattatatatatagtatattatatatatttttaaagctttatatgcctcaaatatcagggaaaggagccaagtccttggtatttagtttggtgaatacttgcattgaatacatgtcaagatgtcaagtcatttttgaatgtgtctcagggatttctatgctacacattcttttaacaaatcaagtatttatgtacacatgttcagattttttgacaaaatgattaaaataatgagatggaaaatga

SEQ ID NO: 56701 - DNA, 5157 bp, Homo Sapiens
gatccgcggggcgactcccggtctggcttgggcaggctgcccgggccgtggcaggaagccggaagcagccgcggccccagttcgggagacatggcgggcgttaaagctctcgtggcattatccttcagtggggctattggactgacttttcttatgctgggatgtgccttagaggattatgggtgtacttctctgaagtaagatgatttgtcaaaaattctgtgtggttttgttacattgggaatttatttatgtgataactgcgtttaacttgtcatatccaattactccttggagatttaagttgtcttgcatgccaccaaattcaacctatgactacttccttttgcctgctggactctcaaagaatacttcaaattcgaatggacattatgagacagctgttgaacctaagtttaattcaagtggtactcacttttctaacttatccaaaacaactttccactgttgctttcggagtgagcaagatagaaactgctccttatgtgcagacaacattgaaggaaagacatttgtttcaacagtaaattctttagtttttcaacaaatagatgcaaactggaacatacagtgctggctaaaaggagacttaaaattattcatctgttatgtggagtcattatttaagaatctattcaggaattataactataaggtccatcttttatatgttctgcctgaagtgttagaagattcacctctggttccccaaaaaggcagttttcagatggttcactgcaattgcagtgttcatgaatgttgtgaatgtcttgtgcctgtgccaacagccaaactcaacgacactctccttatgtgtttgaaaatcacatctggtggagtaattttccagtcacctctaatgtcagttcagcccataaatatggtgaagcctgatccaccattaggtttgcatatggaaatcacagatgatggtaatttaaagatttcttggtccagcccaccattggtaccatttccacttcaatatcaagtgaaatattcagagaattctacaacagttatcagagaagctgacaagattgtctcagctacatccctgctagtagacagtatacttcctgggtcttcgtatgaggttcaggtgaggggcaagagactggatggcccaggaatctggagtgactggagtactcctcgtgtctttaccacacaagatgtcatatactttccacctaaaattctgacaagtgttgggtctaatgtttcttttcactgcatctataagaaggaaaacaagattgttccctcaaaagagattgtttggtggatgaatttagctgagaaaattcctcaaagccagtatgatgttgtgagtgatcatgttagcaaagttacttttttcaatctgaatgaaaccaaacctcgaggaaagtttacctatgatgcagtgtactgctgcaatgaacatgaatgccatcatcgctatgctgaattatatgtgattgatgtcaatatcaatatctcatgtgaaactgatgggtacttaactaaaatgacttgcagatggtcaaccagtacaatccagtcacttgcggaaagcactttgcaattgaggtatcataggagcagcctttactgttctgatattccatctattcatcccatatctgagcccaaagattgctatttgcagagtgatggtttttatgaatgcattttccagccaatcttcctattatctggctacacaatgtggattaggatcaatcactctctaggttcacttgactctccaccaacatgtgtccttcctgattctgtggtgaagccactgcctccatccagtgtgaaagcagaaattactataaacattggattattgaaaatatcttgggaaaagccagtctttccagagaataaccttcaattccagattcgctatggtttaagtggaaaagaagtacaatggaagatgtatgaggtttatgatgcaaaatcaaaatctgtcagtctcccagttccagacttgtgtgcagtctatgctgttcaggtgcgctgtaagaggctagatggactgggatattggagtaattggagcaatccagcctacacagttgtcatggatataaaagttcctatgagaggacctgaattttggagaataattaatggagatactatgaaaaaggagaaaaatgtcactttactttggaagcccctgatgaaaaatgactcattgtgcagtgttcagagatatgtgataaaccatcatacttcctgcaatggaacatggtcagaagatgtgggaaatcacacgaaattcactttcctgtggacagagcaagcacatactgttacggttctggccatcaattcaattggtgcttctgttgcaaattttaatttaaccttttcatggcctatgagcaaagtaaatatcgtgcagtcactcagtgcttatcctttaaacagcagttgtgtgattgtttcctggatactatcacccagtgattacaagctaatgtattttattattgagtggaaaaatcttaatgaagatggtgaaataaaatggcttagaatctcttcatctgttaagaagtattatatccatgatcattttatccccattgagaagtaccagttcagtctttacccaatatttatggaaggagtgggaaaaccaaagataattaatagtttcactcaagatgatattgaaaaacaccagagtgatgcaggtttatatgtaattgtgccagtaattatttcctcttccatcttattgcttggaacattattaatatcacaccaaagaatgaaaaagctattttgggaagatgttccgaaccccaagaattgttcctgggcacaaggacttaattttcagaagagaacggacattctttgaagtctaatcatgatcactacagatgaacccaatgtgccaacttcccaacagtctatagagtattagaagatttttacattttgaagaaggggagcaaatctaaaaaaaattcagttgaacttctgagagttaacatatggtggattatgttgatttagaacttaaaatagatgtgtaaatttgggttcaaaatgtagatttgagtccagtttggatgtgtgattaattttcaaatcatctaaagtttaaaagtagtattcatgatttctggcttttgatttgtcatattcctggtcataaaacattaagaaaattatggctgttgctgtcattacatatctattaaatgtcatcaaatatgtagtagacaatgctgtaattaggtgaactctaaaactgcaacatctgacaaatagctttaaaaatacaatgattataagtatggaatcagtgaaaatatttagtttgtatttttatgtccaaacttttccattttagattcctttatagacacgtcagcctaaaaatcagcctattcgggtgttcttttgaatatctcctggcatttttgtatctaactttgttcaatctgggaatttcagttttcaatatccttgaaaatggcttaagtgataacttccgtttcagttaaaaggaagcccgaagttgtgtttgtgctgcccacaggacagtgggagttacagttcatatcaggatgaccctacatacccaggtcagattgacgggaccagaagggaacatcgacttctaatccagctttcttgtttaattatgacctaaatctaatttacttccactgaaccatccaagacctctggcaggcagggaaatgggcagtgatgcaaaaaagggagactctttggagcttttatgaatagttcatggtgaggacagaacttttctactttcagacagactgcttgctagttttatgaattcagcacacgaattatgctgcgttgctcacattcaaaccaaaccaacgactatgtttaatgaactcagtattcaaatttattatatatgcgtatatatgtatatatggatcccttatatttagatttaactcgtagttttatttgaaagtagaaaagaactctacaaaaacgggaagaatgtgtctttcttcccttcttgacttctaataggtgtcattgaaatgtaaaatctaagtatgaaattatgaaaggacattctttaattactgcccactcaacacatatttaatatgtgcccagattattctaaaatcttaaaaaaagatgcatatagtgaaattttttaaatggatatacttttaataaagttttataactcactgacaaaacatatttcaatagtatatgagtatgagatttcttatcaattatgagtgaaatattctatctgaatgcattggaaggcatttacagtatttgctttcaacagttactgagtatgacattttagcatgaaatatatcaaacacatcatttgaaggacatatgtaatcttgactatggttatggtttttttgtatgtattccttgttttcatattgatagcatctaattcttttgacaatcttaatatgtaggttcatttaaattttaagacagttcagtgcatatatagtagaagccttaagaaaaaagaaaatgagcaagcaaatatttgaagaaatgtataaaaccatagatttctttcagaaaaaaaaaacaggcataggaacagttttctcttcatatattatgattatgaataataggaaagttgtattaattcagtatttgtcattatgcagtattttaatacctacataagtctattccattattatattttgcgcttggcatatttattcctttatgcttttaatcactaacatattttacttaagagtataaaactatgctaaataaattgtattgtatatggaatatgcttgccattatgaagaacagctgggtataccattatttcaagtaataaatctgaattctattagtttaaaaattgtaaaattcaagttaaatgacgtgtatgatatataagctgaacacattttctatagcccttaatttagttgtgttaatttttcaaggtgatgtatcaacagctttttttattttgcatttgttttttcaatgtgtttacattgtatgaattgagctttttgcccacagattcttgatttgtagttgtttggcaggatttttctttgtgatataatcacttctataaaaaatatgatgtacaaaaaa

SEQ ID NO: 56702 - DNA, 1985 bp, Homo Sapiens; identical to SEQ ID NO: 26323

SEQ ID NO: 56703 - DNA, 6027 bp, Homo Sapiens
ggctgaggcggcgccggcggagccctgagcggctgtgacaggctacgcaacaggttcgcgggcggcggcctgacgaccaagccagctgcagtggcggcgacggcggcagagcagggtctccccgcgcctgcccgcgcccaggctgccggtgctgagggacgcggagtcgcgctgtgacgagcgggaggcgcggcgagggcgccagatggctgagagctagcaaggaaaactcaggaccatgatggctcagtttcccacagctatgaatggagggccaaacatgtgggctattacctctgaagaacgtactaagcatgacaggcagtttgataacctcaaaccttcaggaggttacataacaggtgatcaagcacgtaattttttcctacaatcaggtctgccggcccctgttttagctgaaatatgggctttatcagacctaaacaaggatgggaagatggatcagcaagagttctccatagctatgaaactcatcaaactgaagcttcaaggccaacagttgcctgtggttctccctcctattatgaagcaaccccctatgttttctccattaatttctgctcgttttggaatgggaagcatgcccaatctgtccattcctcagccattgcctccagctgcacctataacatcattgtcttctgcgacttcagggaccaaccttcctcccttaatgatgcccactcccctagtgccttctgttagcacatcatcattaccaaatggaaccgccagtctcattcagcctttacccattccttattcttcttcaacattgcctcatgggtcatcttatagtctgatgatgggaggatttggaggtgctagtatacagaaagcgcagtctctgattgatttaggatctagtagctcaacttcctcgactgcttcactctcagggaactcacccaagactgggacctcagagtgggcagttcctcagcctacaagattaaaatatcggcaaaaatttaatactcttgacaaaagtatgagtggatatctctcaggttttcaagctagaaatgcccttcttcagtcaaatctttctcaaactcagctggctactatttggactctggctgacgttgatggtgatggacagctaaaagcagaagagtttattcttgcaatgcaccttactgacatggccaaagctggacagccattaccactgactttacctcctgagcttgttcctccatctttcagaggaggaaagcaaattgattccattaatggaactctgccttcatatcagaaaatgcaagaagaggagcctcagaagaaattaccagttacttttgaggacaaacggaaagccaactatgagcgagggaacatggagctggaaaagcgacgccaagccttgatggagcagcaacaaagggaggcagaacgtaaagcccagaaagaaaaggaagagtgggaacgaaaacagagagaattacaagaacaagaatggaagaaacaacttgaattagaaaaacgcttagagaagcaacgggaattggagagacaacgagaggaagaaaggagaaaagacatagaaagacgagaggcagcaaaacaggaacttgaacgacaacgtcgcttagaatgggagagaattcggcgacaggagcttctcaatcaaaagaatagagaacaagaagaaattgtcaggttaaactctaaaaagaagaatcttcatcttgagttggaagcactgaatggcaaacatcagcagatctcaggcagacttcaggatgtccgactcaaaaagcaaactcaaaagactgagctggaagttctggataagcagtgtgacttggaaattatggaaatcaagcaacttcaacaggaacttcaggaatatcagaataagcttatctatctggtacctgagaagcaattattaaatgaaagaattaaaaacatgcagttcagtaacacacctgattcaggggtcagtttacttcataaaaaatcattagaaaaggaagaattatgccaaagacttaaagaacagttagatgctcttgaaaaagaaactgcatctaagctgtcagaaatggattcttttaacaatcaactaaaggaactgagagaaacctacaacacacagcagttagcccttgaacagctttataagatcaaacgtgacaagttgaaggaaattgaaaggaaaagattagaactaatgcagaaaaagaaactagaagatgaggctgcaaggaaagcaaagcaaggaaaagaaaacttatggaaagaaaatcttagaaaggaggaagaagaaaaacaaaagcgactccaggaagaaaaaacacaagaaaaaattcaagaagaggaacggaaagctgaggagaaacaacgtaaggataaggatactttgaaagctgaggagaaaaaacgtgagacagctagtgttttggtgaattatagagcattatacccctttgaagcaaggaaccatgatgagatgagttttaattctggagatataattcaggttgatgaaaaaaccgtaggagaacctggttggctttatggtagttttcaaggaaattttggctggtttccatgcaattatgtagaaaaaatgccatcaagtgaaaatgaaaaagctgtatctccaaagaaggccttacttcctcctacagtttctttatctgctacctcaacttcctctgaaccactttcttcaaatcaaccagcatcagtgactgattatcaaaatgtatctttttcaaacctaactgtaaatacatcatggcagaaaaaatcagccttcactcgaactgtgtcccctggatctgtatcacctattcatggacagggacaagtggtagaaaacttaaaagcacaggccctttgttcctggactgcaaagaaagataaccacttgaacttctcaaaacatgacattattactgtcttggagcagcaagaaaattggtggtttggggaggtgcatggaggaagaggatggtttcccaaatcttatgtcaagatcattcctgggagtgaagtaaaacgggaagaaccagaagctttgtatgcagctgtaaataagaaacctacctcggcagcctattcagttggagaagaatatattgcactttatccatattcaagtgtggaacctggagatttgactttcacagaaggtgaagaaatattggtgacccagaaagatggagagtggtggacaggaagtattggagatagaagtggaatttttccatcaaactatgtcaaaccaaaggatcaagagagttttgggagtgctagcaagtctggagcatcaaataaaaaacctgagattgctcaggtaacttcagcatatgttgcttctggttctgaacaacttagccttgcaccaggacagttaatattaattctaaagaaaaatacaagtgggtggtggcaaggagagttacaggccagaggaaaaaagcgacagaaaggatggtttcctgccagtcatgttaaacttttgggtccaagtagtgaaagagccacacctgcctttcatcctgtatgtcaggtgattgctatgtatgactatgcagcaaataatgaagatgagctcagtttctccaagggacaactcattaatgttatgaacaaagatgatcctgattggtggcaaggagagatcaacggggtgactggtctctttccttcaaactacgttaagatgacgacagactcagatccaagtcaacagtggtgtgctgatctgcaaaccctggacacaatgcagccaattgagaggaaaagacagggctatattcatgagctgattcagaccgaagagcggtacatggctgaccttcagctcgtcgtcgaggtttttcagaaacgcatggcagagtcaggctttctcactgaaggggagatggccctgatttttgttaactggaaggagctcatcatgtccaacacaaagctgctgaaggctttgcgggtgcggaagaagaccgggggcgagaagatgccggtgcagatgattggggacatcctggccgctgagctgtcccacatgcaggcttacatcaggttctgcagctgccagcttaatggagcagctctgttacagcagaagacagatgaagacacagatttcaaagaatttttaaagaagctggcatctgacccgcggtgtaaaggaatgcccctctccagcttcctgctgaaacccatgcagaggatcacccgctacccactgctcatcagaagtattctggagaacaccccggagagccatgcagaccattcctccctaaagctggccctcgagcgggcagaggagctgtgctctcaagtgaatgagggagttcgggagaaggaaaactcggaccgactggagtggatccaggcgcacgtgcagtgtgaaggcctcgcggagcaacttattttcaactctctcaccaactgcctggggccccggaagctcttacacagtgggaaattatacaagaccaagagcaacaaggaactgcacggattcctcttcaatgacttcctgcttcttacctacatggtcaagcagtttgctgtttcctctggctctgagaaacttttcagctcgaagtccaatgctcaattcaaaatgtataaaacgcccattttcctgaatgaagtcttggtgaaactgcccacagacccttccagcgatgagcctgtcttccacatttcccacattgatcgggtctacaccctccgaacagacaacattaatgagaggaccgcctgggtgcagaagatcaaggcggcgtctgagcagtacatcgacaccgagaagaagaagcgtgagaaagcttaccaagcccgctcccaaaagacttcaggcattgggcgcctgatggtgcatgtcattgaagctacagaattaaaagcctgcaaaccaaatggaaagagcaacccatactgtgaaatcagcatgggctcccagagctacaccaccaggaccatccaggacacactcaatcccaagtggaattttaactgccagttctttattaaggatctctaccaagacgtgctgtgtctcaccctgtttgacagagaccagttttcaccagatgatttcctgggtcgtactgaaattccagtggcaaaaattcgaacagaacaggaaagcaaaggccctatgacccgccgactgctgctgcatgaggtccccaccggggaggtctgggtccgttttgacctgcagctttttgagcaaaaaactctcctgtaggggttctaaaggacagcaccagcgggacagcccacaaggctggggctggagaatgagagactgcgctctcttggggctgagggagcaccatgcagcttcacccctcacaaagccatgcacgctgggggctctgttttcctgcacactaaatagctagcaatctatgcaaacacctttcccataaagaaaccaaaccccatagtacagtgccttgtcctagtgttcacatgttcagctctgtttgtttagatgccaaggtttccattttcagggctataaaaagtattacttggaaatgaggcatcagaccaccagatgttaccgctcggttgaatgtgtccaccgtggagtggtttggtgacgctgtaaccattccacgccagtgacctctgctgggtcacagccactcaggaggggaagggtcaggatgagaggctgcagcctcgacacttggcgcggcctgatactgaaatagcgtctactcgtgcactgaataaaaacagaaacttgatcattttattcctgattagattttatcactctctgctaagacaatatagtctggagtataagtgggaaagcttgatttaaatactgtgaactctaataatgtggaaaatatttttcaactttaattttctgaagtataaattatttatgtaaattcattgtttttgcatatttcttaggacatgcatctttaagctttatcattgcccatatgtacagaaagagaataaagacatatgtttatggatgaaaaaaaaaaaaaaaaa

SEQ ID NO: 56704 - DNA, 5284 bp, Homo Sapiens; identical to SEQ ID NO: 30409

SEQ ID NO: 56705 - DNA, 700 bp, Homo Sapiens
cctgctccttgccatccaccacaaaccctcaccgaaccagtggccaccaccatgacaagggaccagaatggaacctgggagatggagagtaatgaaaactttgagggctacatgaaggccctggatattgattttgccacccgcaagattgcagtacgtctcactcagacgaaggttattgatcaagatggtgataacttcaagacaaaaaccactagcacattccgcaactatgatgtggatttcactgttggagtagagtttgacgagtacacaaagagcctggataaccggcatgttaaggcactggtcacctgggaaggtgatgtccttgtgtgtgtgcaaaagggggagaaggagaaccgcggctggaagcagtggattgagggggacaagctgtacctggagctgacctgtggtgaccaggtgtgccgtcaagtgttcaaaaagaaatgatggcgacgtgggaggcctgccaagcacaagctccccactgcccacactgagtggtctactggctttgagaaacagctgtggggaccttcccactcttgacagagccccattaaggcatctgggtgggttttaaacagaatgcctatgtagcagtgatagacatattcccctcctttgaaacctagcattaaatggaaaaacaaaaattactcccatattttgaaaccctttaaaaaaaaaaaaa

SEQ ID NO: 56706 - DNA, 2777 bp, Homo Sapiens
cgccgctcctcgcggcctccgcgtcttccttccgggtcgcgctaggccgggcttgcggcggttgtgccgcatctagagagtcggggagccgcccccgcacccaggccttctcgcgctgcctggtcgctggtgaagcccgcggcgcgcgcctctcccggaccctgcagggtaaaagaatgtcacatgtcagcatttgtacctgaagtcagcatgcaaagttcagggtacctggatgaatgccaacttttgcatttcccatgtgtatcctgtgaccattctatctgggaacatccttcaaagagttcatgcatcttactgaggacacctgaccttttgaagcttcataattcacatctagatgtcaccggtctttcccatgttaacagttctgaccatgttttattatatatgccttcggcgccgagccaggacagctacaagaggagaaatgatgaacacccatagagctatagaatcaaacagccagacttcccctctcaatgcagaggtagtccagtatgccaaagaagtagtggatttcagttcccattatggaagtgagaatagtatgtcctatactatgtggaatttggctggtgtaccaaatgtattcccaagttctggtgactttactcagacagctgtgtttcgaacttatgggacatggtgggatcagtgtcctagtgcttccttgccattcaagaggacgccacctaattttcagagccaggactatgtggaacttacttttgaacaacaggtgtatcctacagctgtacatgttctagaaacctatcatcccggagcagtcattagaattctcgcttgttctgcaaatccttattccccaaatccaccagctgaagtaagatgggagattctttggtcagagagacctacgaaggtgaatgcttcccaagctcgccagtttaaaccttgtattaagcagataaatttccccacaaatcttatacgactggaagtaaatagttctcttctggaatattacactgaattagatgcagttgtgctacatggtgtgaaggacaagccagtgctttctctcaagacttcacttattgacatgaatgatatagaagatgatgcctatgcagaaaaggatggttgtggaatggacagtcttaacaaaaagtttagcagtgctgtcctcggggaagggccaaataatgggtattttgataaactaccttatgagcttattcagctgattctgaatcatcttacactaccagacctgtgtagattagcacagacttgcaaactactgagccagcattgctgtgatcctctgcaatacatccacctcaatctgcaaccatactgggcaaaactagatgacacttctctggaatttctacagtctcgctgcactcttgtccagtggcttaatttatcttggactggcaatagaggcttcatctctgttgcaggatttagcaggtttctgaaggtttgtggatccgaattagtacgccttgaattgtcttgcagccactttcttaatgaaacttgcttagaagttatttctgagatgtgtccaaatctacaggccttaaatctctcctcctgtgataagctaccacctcaagctttcaaccacattgccaagttatgcagccttaaacgacttgttctctatcgaacaaaagtagagcaaacagcactgctcagcattttgaacttctgttcagagcttcagcacctcagtttaggcagttgtgtcatgattgaagactatgatgtgatagctagcatgataggagccaagtgtaaaaaactccggaccctggatctgtggagatgtaagaatattactgagaatggaatagcagaactggcttctgggtgtccactactggaggagcttgaccttggctggtgcccaactctgcagagcagcaccgggtgcttcaccagactggcacaccagctcccaaacttgcaaaaactctttcttacagctaatagatctgtgtgtgacacagacattgatgaattggcatgtaattgtaccaggttacagcagctggacatattaggaacaagaatggtaagtccggcatccttaagaaaactcctggaatcttgtaaagatctttctttacttgatgtgtccttctgttcgcagattgataacagagctgtgctagaactgaatgcaagctttccaaaagtgttcataaaaaagagctttactcagtgacttaatatatgttctgtattaaaattaatgtgctttgttggggtttaattttgggattggttttgggttttgtttttagttgttttaatggtaagaattaagacatttgtagattttaaagaaaaatatgaaattgtccattaaatcaagtaaaaatgtgcacaaatgttttcataaaatactgcaagcacttctcttcaagaatatgagtggatattatttttaccttatgttaatcagtgatatgctttagtcaataatatgattgataaaagaataacatggaatcatgctaacttattttcaaaggaacactgagcaataaagtatcgtggcatttatgcaaaaaaaaaagttaattttttacaccttcatgtaaggatgtcttattaagcctgtgacctggcaagtgttttgtttggtatgtacaaaatggtcagagctagttggagaatgagacatgcttttccagctgtttggttatttctctggattaactgttcaactggaaaatttttagtttttctagccaggtgtggtggcacacacttgt

SEQ ID NO: 56707 - DNA, 3889 bp, Homo Sapiens; identical to SEQ ID NO: 25344

SEQ ID NO: 56708 - DNA, 2496 bp, Homo Sapiens; identical to SEQ ID NO: 30256

SEQ ID NO: 56709 - DNA, 3469 bp, Homo Sapiens
gcccctggctagagaagccgcagcccgcagtgtccgacccagtcgtcccgcgccggagccggccccgtagcgtgccatggcctgctacatctaccagctgccctcctgggtgctggacgacctgtgccgcaacatggacgcgctcagcgagtgggactggatggagttcgcctcctacgtgatcacagacctgacccagctgcggaagatcaagtccatggagcgggtgcagggtgtgagcatcacgcgggagctgctgtggtggtggggcatgcggcaggccaccgtccagcaacttgtggacctcctgtgccgcctggagctctaccgggctgcccagatcatcctgaactggaaaccggctcctgaaatcaggtgtcccattccagccttccctgactctgtgaagccagaaaagcctttggcagcttctgtaagaaaggctgaggatgaacaggaagaggggcagcctgtgaggatggccacctttccaggcccagggtcctctccagccagagcccaccagccggcctttctccagcctcctgaagaagatgcccctcattccttgagaagcgacctccccacttcgtctgattcaaaggacttcagcacctccattcctaagcaggaaaaacttttgagcttggctggagacagccttttctggagtgaggcagacgtggtccaggcaaccgatgacttcaatcaaaaccgcaaaatcagccaggggacctttgctgacgtctacagagggcacaggcacgggaagccattcgtcttcaagaagctcagagagacagcctgttcaagtccaggatcaatcgaaagattcttccaggcagagttgcagatttgtcttagatgctgccaccccaatgtcttacctgtgctgggcttctgtgctgcaagacagtttcacagcttcatctacccctacatggcaaatggttccctacaggacagactgcagggtcagggtggctcggaccccctcccctggccccagcgtgtcagcatctgctcagggctgctctgtgccgtcgagtacctgcatggtctggagatcatccacagcaacgtcaagagctctaatgtcttgctggaccaaaatctcacccccaaacttgctcacccaatggctcatctgtgtcctgtcaacaaaaggtcaaaatacaccatgatgaagactcacctgctccggacgtcagccgcgtatctgccagaggatttcatccgggtggggcagctgacaaagcgagtggacatcttcagctgtggaatagtgttggccgaggtcctcacgggcatccctgcaatggataacaaccgaagcccggtttacctgaaggacttactcctcagtgatattccaagcagcaccgcctcgctctgctccaggaagacgggcgtggagaacgtgatggcaaaggagatctgccagaagtacctggagaagggcgcagggaggcttccggaggactgcgccgaggccctggccacggctgcctgcctgtgcctgcggaggcgtaacaccagcctgcaggaggtgtgtggctctgtggctgctgtggaagagcggctccgaggtcgggagacgttgctcccttggagtgggctttctgagggtacaggctcttcttccaacaccccagaggaaacagacgacgttgacaattccagccttgatgcctcctcctccatgagtgtggcaccctgggcaggggctgccaccccacttctccccacagagaatggggaaggaaggctgcgggtcatcgtgggaagggaggctgactcctcctctgaggcctgtgttggcctggagcctccccaggatgttacagaaacttcgtggcaaattgagatcaatgaggccaaaaggaaactgatggagaatattctgctctacaaagaggaaaaagtggacagcattgagctctttggcccctgatgaccggaacacagctgaggacccttgtcctcagttggaaagatgagcatcagatcaagaaaaaggtctgaggcagaatccaagatctgccaggaaacacacaacaaaacatctgctgtcctgggtgggagggaaacttcatttcactggaatgagttgggagagaaaggccctcagcttttagagacacaaaaatccatgaagtctcttcctttctgggctttgttagtcagagcaggggatcagaggagactgaagcagaaaccctgcacacgggcccaggatgtggctgattttgtggttccggggagtatgtgatgataatcacccccagcagattccattacctcagcagctcttgttcccccgccactggcagttctgcaatgccatagcattttccagagctaagatctctgggttgtatttgctgacagcctgcaagcttgcatgctctgaaagattttttttagtttttaatttttttgtagagatggggtctcgctttgttggcgcaatcctcccacctcagactcccaaagtgctggaattacagttgggagccactgtgcctggcctggaagactttcaacttgtgtctcagtgcagttcttgactcacctctctgggcctcaggttctacaaatgccagacacctagcgaagagctctgcaggctttccactgcctgtattggaaatcttgcaattcacataattattcagtcactgcctggtacctttatcttcccatcccactaatgttagtgttttttaatggagcttttattctgagaatatgtgtttgtctgtttgtttgttttttgagacagagtctcactttgtcacccaggctggagtgcagtggcacgatctcagctcactgcaagctctgcctctcaggttcaagtgattctcctgcctcagcctcctgagtagatgggactgtaggcacctgccactatgcctggctaatttttgtgtttttagtagagacagggtttcaccatattggccaggctggtctcgaactactgacctcgtgatctgcccgccttggcctatcaaagtgttgggattacaggcttgagccaccgcacccggccgagaatatgtgttgttatttatgactggattatgaagaatcaggagaatgcatttcatgtctgattctgctgctaattaagtcaatcatttaatttttgggacctcagtttctttgtaagtaaaataacacctgcttgttcttcatccctgggctgttgggaggaacagatgagacagtggctatagaagcacttggaaaatgcacttgtcctgttttgtaaaataaaaaggtattaaatgtgtatttctgccatgtacctaatgattattcagtgcgtatatatctgaaaagtcatgttgcaaatctttctgtgaaacagatgctattttaaattcactgggagaaatatcctatttaaagtaatctatagtaatttctttttatataataaaaatatatttgtaaagtc

SEQ ID NO: 56710 - DNA, 1951 bp, Homo Sapiens
ctcttttctgtctggcccgcggccccgctgcctgccctgctccaggctccacctgcgccgccgatcgcccgggtatcgcgggggcccaggccagctgagtccgttttccgcgccggggtggcgcccctccaaccgtcctaacgccgggccggcagcaaggagtgttcctgggacctcagagaccaggctcagagcctgacatccctgcgaggggacagcctcatccgcccaggccagtgggggtctctacaagtgcccaggctcaggtgcagcccccagcaatgcatcgccggagactggccctgggtctggggttctgcctgttggcgggcacaagcctcagtgtcctgtgggtgtatcttgagaactggctgccagtctcctatgtcccctattatctcccctgcccagagatcttcaacatgaagctgcactacaagagggagaagccactccagcccgtggtatggtcacagtaccctcagcccaagctgctggagcacaggcccacacagctgctgacactcacaccctggttggcgcccatcgtctccgagggaaccttcaacccagagcttctgcagcacatctaccagccactgaacctgaccattggggtcacggtgtttgccgtggggaagtacactcatttcatccagtccttcctggagtcagccgaggagttcttcatgcgtgggtaccgggtgcactactacatcttcactgacaaccctgcagccgttcccggggtcccgctgggtccccaccggcttctcagctccatccccatccagggtcactcccactgggaggagacatccatgcgccggatggagaccatcagccagcacattgctaagagggctcaccgggaggtggactacctcttctgccttgatgtggacatggtgtttcggaacccgtggggccctgagaccttgggagacctggtggctgccattcacccaagctactacgccgttccccgccagcagttcccctatgagcgcaggcgtgtttccactgcctttgtggcagacagcgaaggggacttctattatggtggggcagtcttcggggggcaggtggccagggtatatgagtttactaggggctgccacatggccatcctggcggacaaggccaatggcatcatggctgcctggcgggaggaaagccacctgaaccgtcacttcatctcaaacaagccgtccaaggtgctgtcccccgagtacctctgggacgacaggaagccccagccacccagcctgaagctgatccgcttttctacactggacaaggatatcagctgcctgaggagctgaccacggagctgggggttgccatggatggggacccaaagacctgcagccaccagtgcttcactagcgtgcagaccagccctgtcccgcctccctgtcagtcaggcgaattcaaccggaaaagggacgtggaaaggccactgtgaactgcagagggctgtgcacacagtagcacacaggatctcacagtaacgcggcatgggaacagtgagacagggggaggggaggcgcagttacaaaggcagggcccggcaggcttgccacgttctgcagccgtgcctttgcggggcaggctctgaagcctcagcccgactcagagtgcctgaaccctgccgcgccagtcccccgtttattgcatattgcccttaacgtagcatttctaataccctggtgtgaaggcgccctagaccccttttctctggtcacaggggtcctgggtcctttgatgtctcccaaccacatgtagccaattcctcactcaggcccccagagtgagcctttgaaatggaacaggtctaggctccctcggtttcctgcaccccaaagtgagccgcactctcaggggactagccacctccttcttaagagggtttggggcagtttataataaagggggcgtgtgctcaaaa

SEQ ID NO: 56711 - DNA, 11784 bp, Homo Sapiens
atgctggtgatctggattctgacgctggctctccggctctgcgcgtccgttactacagtgacaccaggctcaacagtaaacaccagtattggaggtaatacaacttctgcatccacacccagttcaagcgacccttttaccacctttagtgactatggggtgtcagtcacatttatcacgggctcaactgcaacaaaacacttccttgacagctccacaaactcaggccacagtgaggaatcaacagtatcccacagcggcccaggtgcaactggaacaacactcttcccttcccactctgcaacctcagtttttgttggagaacctaaaacctcacccatcacttcagcctcaatggaaacaacagcgttacctggcagtaccacaacagcaggcctgagtgagaaatctaccaccttctacagtagccccagatcaccagacagaacactctcacctgcccgcacgacaagctcaggcgtcagtgaaaaatcaaccacctcccacagccgaccaggcccaacgcacacaatagcgttccctgacagtaccaccatgccaggcgtcagtcaggaatctacagcttcccacagcatccccggctccacagacacaacactgtcccctggcactaccacaccatcatcccttggtccagaatctactaccttccacagcagcccaggctacactaaaacaacacgcttacctgacaacaccacaacctcaggcctccttgaagcatctacgcccgtccacagcagcactggatcgccacacacaacactgtccccttccagctctacaacccatgagggagaacctaccaccttccagagctggccaagctcaaaggacacttcgcctgcaccttctggtaccacatcagcctttgttaaactatctacaacttatcacagcagcccgagctcaactccaacaacccacttttctgccagctccacaaccttgggccatagtgaggaatcgacaccagtccacagcagcccagttgcaactgcaacaacacccccacctgcccgctccgcgacctcaggccatgttgaagaatctacagcctaccacaggagcccgggctcaactcaaacaatgcacttccctgaaagctccacaacttcaggccatagtgaagaatcagcaactttccacggcagcacaacacacacaaaatcttcaactcctagcaccacagctgccctagcacatacaagctaccacagcagcctgggctcaactgaaacaacacacttccgtgatagctccacaatctcaggccgtagtgaggaatcaaaagcatcccacagcagcccagatgcaatggcaacaacagtcttacctgccggctctacaccctcagttcttgttggagactcgacgccctcacccatcagttcaggctcaatggaaaccacagcgttacccggcagtaccacaaaaccaggcctcagtgagaaatctaccactttctacagtagccccagatcaccagacacaacacacttacctgccagcatgacaagctcaggcgtcaaacctaccagctaccacagcagcccgggctcaactgcaacaacacacttccctgacagctccacaacctcaggccgtagtgaggaatcaacagcatcgcacagcagccaagacgcaacgggaacaatagtcctacctgcccgctccacaacctcagttcttcttggagaatctacgacctcacccatcagttcaggctcaatggaaacgacagcgttacccggcagtaccacaacgccaggcctcagtgagagatctaccactttccatagtagccccagatcaccagccacaacactctcacctgccagcacgacaagctcaggcgtcagtgaagaatccaccacctcccgcagccgaccaggctcaacgcacacaacagcattccctgacagcaccaccacgccaggcctcagtcggcattctacaacttcccacagcagcccaggctcaacggatacaacactgttacctgccagcaccaccacctcaggccccagtcaggaatcaacaacttcccacagcagctcaggttcaactgacacagcactgtcccctggcagtaccacagccttatcctttggtcaagaatctacaaccttccacagcaacccaggctccactcacacaacactcttccctgacagcaccacaagctcaggcatcgttgaagcatctacacgcgtccacagcagcactggctcaccacgcacaacactgtcccctgccagctccacaagccctggacttcagggagaatctactgccttccagacccacccagcctcaactcacacaacgccttcacctcctagcaccgcaacagcccctgttgaagaatctacaacctaccaccgcagcccaggctcgactccaacaacacacttccctgccagctccacaacttcgggccacagtgagaaatcaacaatattccacagcagcccagatgcaagtggaacaacaccctcatctgcccactccacaacctcaggtcgtggagaatctacaacctcacgcatcagtccaggctcaactgaaataacaacgttacctggcagtaccacaacaccaggcctcagtgaggcatctaccaccttctacagcagccccagatcaccaaccacaacactctcacctgccagcatgacaagcctgggcgtcggtgaagaatccaccacctcccgtagccaaccaggttctactcactcaacagtgtcacctgccagcaccaccacgccaggcctcagtgaggaatctaccaccgtctacagcagcagccgaggctcaactgaaaccacagtgttccctcacagcaccacaacctcagttcatggtgaagagcctacaaccttccacagccggccagcctcaactcacacaacactgttcactgaggacagcaccacctcgggcctcactgaagaatctacagccttccccggcagcccagcctccacccaaacagggttacctgccacactcacaaccgcagacctcggtgaggaatcaactacctttcccagcagctcaggctcaactggaacaaaactctcacctgcccgctccaccacctctggcctcgttggagaatccacaccctcacgcctcagtccaagctcaaccgaaacaacaactttacctggcagtcccacaacaccaagcctcagtgagaaatcaaccaccttctacactagccccagatcaccagatgcaacactctcacctgcaaccacaacaagctcaggcgtcagcgaagaatccagcacatcccacagtcaaccaggctcaacgcacacaacagcattccctgacagcaccaccacctcagacctcagtcaggaacctacaacttcccacagcagccaaggctcaacagaggcaacactgtcccctggcagtaccacagcctcatcccttggtcaacaatctacaaccttccacagcagcccaggcgacactgaaaccacactcttacctgacgacaccataacctcaggcctcgtggaggcatctacacccacccacagcagcactggctcgctacacacaacactgacccctgccagctccacaagcgctggccttcaggaagaatctaccactttccagagctggccaagctcaagtgacacaacaccttcacctcccggcaccacagcagcccctgttgaagtatccacaacctaccacagccgcccgagctcaactccaacaacacacttttctgccagttccacaaccttgggccgtagtgaggaatcaacaacagtccacagcagcccaggtgcaactggaacagcactcttccctacccgctctgcaacctcagttcttgttggagaacctacaacgtcacccatcagttcaggctcaacggaaacaacagcgttacctggcagtaccacaacagcaggcctgagtgagaaatctaccaccttctacagtagccccagatcaccggacacaacactctcacctgccagcacgacaagctcaggcgtcagtgaagaatccaccacctcccacagccgaccaggctcaacgcacacaacagcattccctggcagtaccaccatgccaggcgtcagtcaggaatctacagcttcccacagcagcccaggctccacagacacaacattgtcccctggcagtaccacagcatcatcccttggtccagaatctactactttccacagcagcccaggctccactgaaacaacactcttacctgacaacaccacagcctcaggcctccttgaagcatctacgcccgtccacagcagcactggatcgccacacacaacactgtcccctgccggctctacaacacgtcagggagaatctaccaccttccagagctggccaagctcaaaggacactatgcctgcacctcctactaccacatcagcctttgttgagctatctacaacctcccacggcagcccgagctcaactccaacaacccacttttctgccagctccacaaccttgggccgtagtgaggaatcgacaacagtccacagcagcccagttgcaactgcaacaacaccctcgcctgcccgctccacaacctcaggcctcgttgaagaatctacggcgtaccacagcagcccgggctcaactcaaacaatgcacttccctgaaagctccacagcttcaggtcgtagtgaagaatcaagaacttcccacagcagcacaacacacacaatatcttcacctcctagcaccacatctgcccttgttgaagaacctaccagctaccacagcagcccgggctcaactgcaacaacacacttccctgacagctccacaacctcaggccgtagtgaggaatcaacagcatcccacagcagccaagacgcaacgggaacaatagtcctacctgcccgctccacaacctcagttcttcttggagaatctacgacctcacccatcagttcaggctcaatggaaacgacagcgttacccggcagtaccacaacgccaggcctcagtgagaaatctaccactttccacagtagccccagatcaccagccacaacactctcacctgccagcacgacaagctcaggcgtcagtgaagaatccaccacctcccacagccgaccaggctcaacgcacacaacagcattccctgacagcaccaccacgccaggcctcagtcggcattctacaacttcccacagcagcccaggctcaacggatacaacactgttacctgccagcaccaccacctcaggccccagtcaggaatcaacaacttcccacagcagcccaggttcaactgacacagcactgtcccctggcagtaccacagccttatcctttggtcaagaatctacaaccttccacagcagcccaggctccactcacacaacgctcttccctgacagcaccacaagctcaggcatcgttgaagcatctacacgcgtccacagcagcactggctcaccacgcacaacactgtcccctgccagctccacaagccctggacttcagggagaatctaccgccttccagacccacccagcctcaactcacacgacgccttcacctcctagcaccgcaacagcccctgttgaagaatctacaacctaccaccgcagcccaggctcgactccaacaacacacttccctgccagctccacaacttcgggccacagtgagaaatcaacaatattccacagcagcccagatgcaagtggaacaacaccctcatctgcccactccacaacctcaggtcgtggagaatctacaacctcacgcatcagtccaggctcaactgaaataacaacgttacctggcagtaccacaacaccaggcctcagtgaggcatctaccaccttctacagcagccccagatcaccaaccacaacactctcacctgccagtatgacaagcctaggcgtcggtgaagaatccaccacctcccgtagccaaccaggttctactcactcaacagtgtcacctgccagcaccaccacgccaggcctcagtgaggaatctaccaccgtctacagcagcagcccaggctcaactgaaaccacagtgttccctcgcacccccacaacctcagttcgtggtgaagagcctacaaccttccacagccggccagcctcaactcacacaacactgttcactgaggacagcaccacctcgggcctcactgaagaatctacagccttccccggcagcccagcctccacccaaacagggttacctgccacactcacaaccgcagacctcggtgaggaatcaactacctttcccagcagctcaggctcaactggaacaacactctcacctgcccgctccaccacctctggcctcgttggagaatccacaccctcacgcctcagtccaagctcaaccgaaacaacaactttacccggcagtcccacaacaccaagcctcagtgagaaatcaaccaccttctacactagccccagatcaccagatgcaacactctcacctgcaaccacaacaagctcaggcgtcagtgaagaatccagcacatcccacagtcaaccaggctcaacgcacacaacagcattccctgacagcaccaccacgccaggcctcagtcggcattctacaacttcccacagcagcccaggctcaacggatacaacactgttacctgccagcaccaccacctcaggccccagtcaggaatcaacaacttcccacagcagcccaggttcaactgacacagcactgtcccctggcagtaccacagccttatcctttggtcaagaatctacaaccttccacagcagcccaggctccactcacacaacactcttccctgacagcaccacaagctcaggcatcgttgaagcatctacacgcgtccacagcagcactggctcaccacgcacaacactgtcccctgccagctccacaagccctggacttcagggagaatctaccaccttccagacccacccagcctcaactcacacgacgccttcacctcctagcaccgcaacagcccctgttgaagaatctacaacctaccaccgcagcccaggctcgactccaacaacacacttccctgccagctccacaacttcgggccacagtgagaaatcaacaatattccacagcagcccagatgcaagtggaacaacaccctcatctgcccactccacaacctcaggtcgtggagaatctacaacctcacgcatcagtccaggctcaactgaaataacaacgttacctggcagtaccacaacaccaggcctcagtgaggcatctaccaccttctacagcagccccagatcaccaaccacaacactctcacctgccagtatgacaagcctaggcgtcggtgaagaatccaccacctcccgtagccaaccaggttctactcactcaacagtgtcacctgccagcaccaccacgccaggcctcagtgaggaatctaccaccgtctacagcagcagcccaggctcaactgaaaccacagtgttccctcgcagcaccacaacctcagttcgtggtgaagagcctacaaccttccacagccggccagcctcaactcacacaacactgttcactgaggacagcaccacctcgggcctcactgaagaatctacagccttccccggcagcccagcctccacccaaacagggttacctgccacactcacaaccgcagacctcggtgaggaatcaactacctttcccagcagctcaggctcaactggaacaacactctcacctgcccgctccaccacctctggcctcgttggagaatccacaccctcacgcctcagtccaagctcaaccgaaacaacaactttacccggcagtcccacaacaccaagcctcagtgagaaatcaaccaccttctacactagccccagatcaccagatgcaacactctcacctgcaaccacaacaagctcaggcgtcagtgaagaatccagcacatcccacagtcaaccaggctcaacgcacacaacagcgttccctgacagcaccaccacctcaggcctcagtcaggaacctacagcttcccacagcagccaaggctcaacagaggcaacactgtcccctggcagtaccacagcctcatcccttggtcaacaatctacaaccttccacagcagcccaggcgacactgaaaccacactcttacctgacgacaccataacctcaggcctcgtggaggcatctacacccacccacagcagcactggctcgctacacacaacactgacccctgccagctccacaagcgctggccttcaggaagaatctaccactttccagagctggccaagctcaagtgacacaacaccttcacctcccggcaccacagcagcccctgttgaagtatccacaacctaccacagccgcccgagctcaactccaacaacacacttttctgccagttccacaaccttgggccgtagtgaggaatcaacaacagtccacagcagcccaggtgcaactggaacagcactcttccctacccgctctgcaacctcagttcttgttggagaacctacaacgtcacccatcagttcaggctcaacggaaacaacagcgttacctggcagtaccacaacagcaggcctgagtgagaaatctaccaccttctacagtagccccagatcaccggacacaacactctcacctgccagcacgacaagctcaggcgtcagtgaagaatccaccacctcccacagccgaccaggctcaacgcacacaacagcattccctggcagtaccaccatgccaggcgtcagtcaggaatctacagcttcccacagcagcccaggctccacagacacaacactgtcccctggcagtaccacagcatcatcccttggtccagaatctactaccttccacagcggcccaggctccactgaaacaacactcttacctgacaacaccacagcctcaggcctccttgaagcatctacgcccgtccacagcagcactggatcgccacacacaacactgtcccctgccggctctacaacccgtcagggagaatctaccaccttccagagctggcctaactcgaaggacactacccctgcacctcctactaccacatcagcctttgttgagctatctacaacctcccacggcagcccgagctcaactccaacaacccacttttctgccagctccacaaccttgggccgtagtgaggaatcgacaacagtccacagcagcccagttgcaactgcaacaacaccctcgcctgcccgctccacaacctcaggcctcgttgaagaatctacgacctaccacagcagcccgggctcaactcaaacaatgcacttccctgaaagcgacacaacttcaggccgtggtgaagaatcaacaacttcccacagcagcacaacacacacaatatcttcagctcctagcaccacatctgcccttgttgaagaacctaccagctaccacagcagcccgggctcaactgcaacaacacacttccctgacagctccacaacctcaggccgtagtgaggaatcaacagcatcccacagcagccaagacgcaacgggaacaatagtcctacctgcccgctccacaacctcagttcttcttggagaatctacgacctcacccatcagttcaggctcaatggaaacgacagcgttacccggcagtaccacaacgccaggcctcagtgagaaatctaccactttccacagtagccccagatcaccagccacaacactctcacctgccagcacgacaagctcaggcgtcagtgaagaatccaccacctcccacagccgaccaggctcaacgcacacaacagcattccctgacagcaccaccacgccaggcctcagtcggcattctacaacttcccacagcagcccaggctcaacggatacaacactgttacctgccagcaccaccacctcaggctccagtcaggaatcaacaacttcccacagcagctcaggttcaactgacacagcactgtcccctggcagtaccacagccttatcctttggtcaagaatctacaaccttccacagcagcccaggctccactcacacaacactcttccctgacagcaccacaagctcaggcatcgttgaagcatctacacgcgtccacagcagcactggctcaccacgcacaacactgtcccctgccagctccacaagccctggacttcagggagaatctaccgccttccagacccacccagcctcaactcacacgacgccttcacctcctagcaccgcaacagcccctgttgaagaatctacaacctaccaccgcagcccaggctcgactccaacaacacacttccctgccagctccacaacttcgggccacagtgagaaatcaacaatattccacagcagcccagatgcaagtggaacaacaccctcatctgcccactccacaacctcaggtcgtggagaatctacaacctcacgcatcagtccaggctcaactgaaataacaacgttacctggcagtaccacaacaccaggcctcagtgaggcatctaccaccttctacagcagccccagatcaccaaccacaacactctcacctgccagtatgacaagcctaggcgtcggtgaagaatccaccacctcccgtagccaaccaggttctactcactcaacagtgtcacctgccagcaccaccacgccaggcctcagtgaggaatctaccaccgtctacagcagcagcccaggctcaactgaaaccacagtgttccctcgcagcaccacaacctcagttcgtcgtgaagagcctacaaccttccacagccggccagcctcaactcacacaacactgttcactgaggacagcaccacctcgggcctcactgaagaatctacagccttccccggcagcccagcctccacccaaacagggttacctgccacactcacaaccgcagacctcggtgaggaatcaactacctttcccagcagctcaggctcaactggaacaaaactctcacctgcccgctccaccacctctggcctcgttggagaatccacaccctcacgcctcagtccaagctcaaccgaaacaacaactttacccggcagtcccacaacaccaagcctcagtgagaaatcaaccaccttctacactagccccagatcaccagatgcaacactctcacctgcaaccacaacaagctcaggcgtcagcgaagaatccagcacatcccacagtcaaccaggctcaacgcacacaacagcgttccctgacagcaccaccacctcaggcctcagtcaggaacctacaacttcccacagcagccaaggctcaacagaggcaacactgtcccctggcagtaccacagcctcatcccttggtcaacaatctacaaccttccacagcagcccaggcgacactgaaaccacactcttacctgacgacaccataacctcaggcctcgtggaggcatctacacccacccacagcagcactggctcgctacacacaacactgacccctgccagctccacaagcactggccttcaggaagaatctaccactttccagagctggccaagctcaagtgacacaacaccttcacctcccagcaccacagcagtccctgttgaacagcactggatcgccacacacaacactgtcccctgccggctctacaacccgtcagggagaatctaccaccttccagagctggccaaactcgaaggacactacccctgcacctcctactaccacatcagcctttgttga

SEQ ID NO: 56712 - DNA, 4382 bp, Homo Sapiens; identical to SEQ ID NO: 31065

SEQ ID NO: 56713 - DNA, 4104 bp, Homo Sapiens
ataactttgtagcgagtcgaaaactgaggctccggccgcagagaactcagcctcattcctgctttaaaatctctcggccacctttgatgaggggactgggcagttctagacagtcccgaagttctcaaggcacaggtctcttcctggtttgactgtccttaccccggggaggcagtgcagccagctgcaagccccacagtgaagaacatctgagctcaaatccagataagtgacataagtgacctgctttgtaaagccatagagatggcctgtccttggaaatttctgttcaagaccaaattccaccagtatgcaatgaatggggaaaaagacatcaacaacaatgtggagaaagccccctgtgccacctccagtccagtgacacaggatgaccttcagtatcacaacctcagcaagcagcagaatgagtccccgcagcccctcgtggagacgggaaagaagtctccagaatctctggtcaagctggatgcaaccccattgtcctccccacggcatgtgaggatcaaaaactggggcagcgggatgactttccaagacacacttcaccataaggccaaagggattttaacttgcaggtccaaatcttgcctggggtccattatgactcccaaaagtttgaccagaggacccagggacaagcctacccctccagatgagcttctacctcaagctatcgaatttgtcaaccaatattacggctccttcaaagaggcaaaaatagaggaacatctggccagggtggaagcggtaacaaaggagatagaaacaacaggaacctaccaactgacgggagatgagctcatcttcgccaccaagcaggcctggcgcaatgccccacgctgcattgggaggatccagtggtccaacctgcaggtcttcgatgcccgcagctgttccactgcccgggaaatgtttgaacacatctgcagacacgtgcgttactccaccaacaatggcaacatcaggtcggccatcaccgtgttcccccagcggagtgatggcaagcacgacttccgggtgtggaatgctcagctgtgcatcgacctgggctggaagcccaatggccgtgaccctgagctcttcgaaatcccacctgaccttgtgcttgaggtggccatggaacatcccaaatacgagtggtttcgggaactggagctaaagtggtacgccctgcctgcagtggccaacatgctgcttgaggtgggcggcctggagttcccagggtgccccttcaatggctggtacatgggcacagagatcggagtccgggacttctgtgacgtccagcgctacaacatcctggaggaagtgggcaggagaatgggcctggaaacgcacaagctggcctcgctctggaaagaccaggctgtcgttgagatcaacattgctgtgctccatagtttccagaagcagaatgtgaccatcatggaccaccactcggctgcagaatccttcatgaagtacatgcagaatgaataccggtcccgtgggggctgcccggcagactggatttggctggtccctcccatgtctgggagcatcacccccgtgtttcaccaggagatgctgaactacgtcctgtcccctttctactactatcaggtagaggcctggaaaacccatgtctggcaggacgagaagcggagacccaagagaagagagattccattgaaagtcttggtcaaagctgtgctctttgcctgtatgctgatgcgcaagacaatggcgtcccgagtcagagtcaccatcctctttgcgacagagacaggaaaatcagaggcgctggcctgggacctgggggccttattcagctgtgccttcaaccccaaggttgtctgcatggataagtacaggctgagctgcctggaggaggaacggctgctgttggtggtgaccagtacgtttggcaatggagactgccctggcaatggagagaaactgaagaaatcgctcttcatgctgaaagagctcaacaacaaattcaggtacgctgtgtttggcctcggctccagcatgtaccctcggttctgcgcctttgctcatgacattgatcagaagctgtcccacctgggggcctctcagctcaccccgatgggagaaggggatgagctcagtgggcaggaggacgccttccgcagctgggccgtgcaaaccttcaaggcagcctgtgagacgtttgatgtccgaggcaaacagcacattcagatccccaagctctacacctccaatgtgacctgggacccgcaccactacaggctcgtgcaggactcacagcctttggacctcagcaaagccctcagcagcatgcatgccaagaacgtgttcaccatgaggctcaaatctcggcagaatctacaaagtccgacatccagccgtgccaccatcctggtggaactctcctgtgaggatggccaaggcctgaactacctgccgggggagcaccttggggtttgcccaggcaaccagccggccctggtccaaggtatcctggagcgagtggtggatggccccacaccccaccagacagtgcgcctggaggccctggatgagagtggcagctactgggtcagtgacaagaggctgcccccctgctcactcagccaggccctcacctacttcctggacatcaccacacccccaacccagctgctgctccaaaagctggcccaggtggccacagaagagcctgagagacagaggctggaggccctgtgccagccctcagagtacagcaagtggaagttcaccaacagccccacattcctggaggtgctagaggagttcccgtccctgcgggtgtctgctggcttcctgctttcccagctccccattctgaagcccaggttctactccatcagctcctcccgggatcacacgcccacagagatccacctgactgtggccgtggtcacctaccacacccgagatggccagggtcccctgcaccacggcgtctgcagcacatggctcaacagcctgaagccccaagacccagtgccctgctttgtgcggaatgccagcggcttccacctccccgaggatccctcccatccttgcatcctcatcgggcctggcacaggcatcgcgcccttccgcagtttctggcagcaacggctccatgactcccagcacaagggagtgcggggaggccgcatgaccttggtgtttgggtgccgccgcccagatgaggaccacatctaccaggaggagatgctggagatggcccagaagggggtgctgcatgcggtgcacacagcctattcccgcctgcctggcaagcccaaggtctatgttcaggacatcctgcggcagcagctggccagcgaggtgctccgtgtgctccacaaggagccaggccacctctatgtttgcggggatgtgcgcatggcccgggacgtggcccacaccctgaagcagctggtggctgccaagctgaaattgaatgaggagcaggtcgaggactatttctttcagctcaagagccagaagcgctatcacgaagatatctttggtgctgtatttccttacgaggcgaagaaggacagggtggcggtgcagcccagcagcctggagatgtcagcgctctgagggcctacaggaggggttaaagctgccggcacagaacttaaggatggagccagctctgcattatctgaggtcacagggcctggggagatggaggaaagtgatatcccccagcctcaagtcttatttcctcaacgttgctccccatcaagccctttacttgacctcctaacaagtagcaccctggattgatcggagcctcctctctcaaactggggcctccctggtcccttggagacaaaatcttaaatgccaggcctggcaagtgggtgaaagatggaacttgctgctgagtgcaccacttcaagtgaccaccaggaggtgctatcgcaccactgtgtatttaactgccttgtgtacagttatttatgcctctgtatttaaaaaactaacacccagtctgttccccatggccacttgggtcttccctgtatgattccttgatggagatatttacatgaattgcattttactttaatcacaaaaaaaaaaaaaaaa

SEQ ID NO: 56714 - DNA, 4569 bp, Homo Sapiens
cggacgcgtgggcaggtcccgtcgccggtgagcacgggctccctctcgcgtggcctcgccgggtccgcctggcctgcccacctccggagccacctctgcccccgcatgggctggcgaagttgggaggagcgagctggagccagagcgcgcgccgggcgcgccccgtcgctgcctgactcggcgcccgcagttcgggcgcagcacgccggccgcaggagcacggatgccccccggagccgcgggctggcaggtctggggtcctgaggctgctggcagactatgggtacaacggccagcacagcccagcagacggtctcggcaggcaccccatttgagggcctacagggcagtggcacgatggacagtcggcactccgtcagcatccactccttccagagcactagcttgcataacagcaaggccaagtccatcatccccaacaaggtggcccctgttgtgatcacgtacaactgcaaggaggagttccagatccatgatgagctgctcaaggctcattacacgttgggccggctctcggacaacacccctgagcactacctggtgcaaggccgctacttcctggtgcgggatgtcactgagaagatggatgtgctgggcaccgtgggaagctgtggggcccccaacttccggcaggtgcagggtgggctcactgtgttcggcatgggacagcccagcctcttagggttcaggcgggtcctccagaaactccagaaggacggacatagggagtgtgtcatcttctgtgtgcgggaggaacctgtgcttttcctgcgtgcagatgaggactttgtgtcctacacacctcgagacaagcagaaccttcatgagaacctccagggccttggacccggggtccgggtggagagcctggagctggccatccggaaagagatccacgactttgcccagctgagcgagaacacataccatgtgtaccataacaccgaggacctgtggggggagccccatgctgtggccatccatggtgaggacgacttgcatgtgacggaggaggtgtacaagcggcccctcttcctgcagcccacctacaggtaccaccgcctgcccctgcccgagcaagggagtcccctggaggcccagttggacgcctttgtcagtgttctccgggagacccccagcctgctgcagctccgtgatgcccacgggcctcccccagccctcgtcttcagctgccagatgggcgtgggcaggaccaacctgggcatggtcctgggcaccctcatcctgcttcaccgcagtgggaccacctcccagccagaggctgcccccacgcaggccaagcccctgcctatggagcagttccaggtgatccagagctttctccgcatggtgccccagggaaggaggatggtggaagaggtggacagagccatcactgcctgtgccgagttgcatgacctgaaagaagtggtcttggaaaaccagaagaagttagaaggtatccgaccggagagcccagcccagggaagcggcagccgacacagcgtctggcagagggcgctgtggagcctggagcgatacttctacctgatcctgtttaactactaccttcatgagcagtacccgctggcctttgccctcagtttcagccgctggctgtgtgcccaccctgagctgtaccgcctgcccgtgacgctgagctcagcaggccctgtggctccgagggacctcatcgccaggggctccctacgggaggacgatctggtctccccggacgcgctcagcactgtcagagagatggatgtggccaacttccggcgggtgccccgcatgcccatctacggcacggcccagcccagcgccaaggccctggggagcatcctggcctacctgacggacgccaagaggaggctgcggaaggttgtctgggtgagccttcgggaggaggccgtgttggagtgtgacgggcacacctacagcctgcggtggcctgggccccctgtggctcctgaccagctggagaccctggaggcccagctgaaggcccatctaagcgagcctcccccaggcaaggagggccccctgacctacaggttccagacctgccttaccatgcaggaggtcttcagccagcaccgcagggcctgtcctggcctcacctaccaccgcatccccatgccggacttctgtgccccccgagaggaggactttgaccagctgctggaggccctgcgggccgccctctccaaggacccaggcactggcttcgtgttcagctgcctcagcggccagggccgtaccacaactgcgatggtggtggctgtcctggccttctggcacatccaaggcttccccgaggtgggtgaggaggagctcgtgagtgtgcctgatgccaagttcactaagggtgaatttcaggtagtaatgaaggtggtgcagctgctacccgatgggcaccgtgtgaagaaggaggtggacgcagcgctggacactgtcagcgagaccatgacgcccatgcactaccacctgcgggagatcatcatctgcacctaccgccaggcgaaggcagcgaaagaggcgcaggaaatgcggaggctgcagctgcggagcctgcagtacttggagcgctatgtctgcctgattctcttcaacgcgtacctccacctggagaaggccgactcctggcagaggcccttcagcacctggatgcaggaggtggcatcgaaggctggcatctacgagatccttaacgagctgggcttccccgagctggagagcggggaggaccagcccttctccaggctgcgctaccggtggcaggagcagagctgcagcctcgagccctctgcccccgaggacttgctgtagggggccttactccctgtccccccacccacagggccccacgcaggcctggggtgtctgaggtgctcttggctgggagcggccctgaggggtgctggccttgaaatgattcccccacttcctggagagactgagcggagttgggagcctttttagaaagaactttttataggacagggagacagcacagccatcccttgcaaaccaccaaggtgtgtggctgacctccagggaggagcactcactggagtgctcacaaggtgcacactgctgtgtgtaccttgcagacaggccggcgttcagcctccaaggggctcactcccccagttgccaaacactgtggatctctctgtcctcttctcccctctctcagattggcctggcagcccctggcacagagcagacccggccactggtagctccccacttccttactcctgctgctctgccattgccgctccccttcttgctgcccaagcactgccctcgggcgtctggcagcctgaggtgggtggaggggacagtgttctggatagatctattatgtgaaaggcagcttcacccagttttctggactctcatgcccccatctccgacctgggagacttcaggaatgacaacctacccagcctggtggggctggcaggatggtggaggtttctcaaggagctggagacttcagggagcccctctcatggggaggaaagagcttccagggggcgaacgcagcacagaggaagaggcctgctccacttgtctgggaacctgggcaggaggcacagaggaagccaaggcctggagctgcaggtcccccggcatctctctctgtcccggcagcccaggatggcctggtgcccccacctgctgcagcaggagccccaaggagtgctagctgagggtggttgctggggtggtcctcatggacagtgaggtgtgcaagggtgcactgagggtggtgggaggggatcacctgggttccaggccatccttgctgagcatctttgagcctgccttccggtgggagcagaaaaggccagaccctgctgagttagaggctgctgggatccactgtttccacacagcgggaaggctgctgggaacaggtggcagagaagtgccatgtttgcgttgagccttgcagctcttccagctggggactggtgcttgctgaaacccaggagctgaacagtgaggaggctgtccaccttgcttggctcactgggaccagcaaagcctgtctttggttaggctcgtgtacttctgcaggaaaaaaaaaaaaggatgtgtcattggtcatgatatttgaaaaggggaggaggccgaagttgttcccatttatccagtattggaaaatatttgacccccttggctgaattcttttgcagaactactgtgtgtctgttcactaccttttcaggtttattgtttttatttttgcatgaattaagacgttttaatttctttgcagacaaggtctagatgcggagtcagagatgggactgaatggggagggatcctttgtgttctcatggttggctctgactttcagctgtgttgggaccactggctgatcacatcacctctctgcctcagtttccccatctgtaaaatgggagaataatacttgcctacctacctcacaggggtgttgtgaggattcatttgtgatttttttttttttttttgtacagagcttttaagcattaaaaacagctaaatgtg

SEQ ID NO: 56715 - DNA, 1257 bp, Homo Sapiens; identical to SEQ ID NO: 26995

SEQ ID NO: 56716 - DNA, 2230 bp, Homo Sapiens
tcggccgctgctagaggggctgcttgcgccaggcgccggccgccccactgcgggtccctggcggccggtgtctgaggagtcggagagccgaggcggccagaccgtgcgccccgcgcttctcccgaggccgttccgggtctgaactgtaacagggaggggcctcgcaggagcagcagcgggcgagttaaagtatgctgggagcggtgaagatggaagggcacgagccgtccgactggagcagctactatgcagagcccgagggctactcctccgtgagcaacatgaacgccggcctggggatgaacggcatgaacacgtacatgagcatgtcggcggccgccatgggcagcggctcgggcaacatgagcgcgggctccatgaacatgtcgtcgtacgtgggcgctggcatgagcccgtccctggcggggatgtcccccggcgcgggcgccatggcgggcatgggcggctcggccggggcggccggcgtggcgggcatggggccgcacttgagtcccagcctgagcccgctcggggggcaggcggccggggccatgggcggcctggccccctacgccaacatgaactccatgagccccatgtacgggcaggcgggcctgagccgcgcccgcgaccccaagacctacaggcgcagctacacgcacgcaaagccgccctactcgtacatctcgctcatcaccatggccatccagcagagccccaacaagatgctgacgctgagcgagatctaccagtggatcatggacctcttccccttctaccggcagaaccagcagcgctggcagaactccatccgccactcgctctccttcaacgactgtttcctgaaggtgccccgctcgcccgacaagcccggcaagggctccttctggaccctgcaccctgactcgggcaacatgttcgagaacggctgctacctgcgccgccagaagcgcttcaagtgcgagaagcagctggcgctgaaggaggccgcaggcgccgccggcagcggcaagaaggcggccgccggagcccaggcctcacaggctcaactcggggaggccgccgggccggcctccgagactccggcgggcaccgagtcgcctcactcgagcgcctccccgtgccaggagcacaagcgagggggcctgggagagctgaaggggacgccggctgcggcgctgagccccccagagccggcgccctctcccgggcagcagcagcaggccgcggcccacctgctgggcccgccccaccacccgggcctgccgcctgaggcccacctgaagccggaacaccactacgccttcaaccacccgttctccatcaacaacctcatgtcctcggagcagcagcaccaccacagccaccaccaccaccaaccccacaaaatggacctcaaggcctacgaacaggtgatgcactaccccggctacggttcccccatgcctggcagcttggccatgggcccggtcacgaacaaaacgggcctggacgcctcgcccctggccgcagatacctcctactaccagggggtgtactcccggcccattatgaactcctcttaagaagacgacggcttcaggcccggctaactctggcaccccggatcgaggacaagtgagagagcaagtgggggtcgagactttggggagacggtgttgcagagacgcaagggagaagaaatccataacacccccaccccaacacccccaagacagcagtcttcttcacccgctgcagccgttccgtcccaaacagagggccacacagataccccacgttctatataaggaggaaaacgggaaagaatataaagttaaaaaaaagcctccggtttccactactgtgtagactcctgcttcttcaagcacctgcagattctgatttttttgttgttgttgttctcctccattgctgttgttgcagggaagtcttacttaaaaaaaaaaaaaaattttgtgagtgactcggtgtaaaaccatgtagttttaacagaaccagagggttgtactattgtttaaaaacaggaaaaaaaataatgtaagggtctgttgtaaatgaccaagaaaaagaaaaaaaaagcattcccaatcttgacacggtgaaatccaggtctcgggtccgattaatttatggtttctgcgtgctttatttatggcttataaatgtgtattctggctgcaagggccagagttccacaaatctatattaaagtgttatacccggtttt

SEQ ID NO: 56717 - DNA, 2530 bp, Homo Sapiens
aaatccttcttccaatgttcctcccctctctgtatgaaccctgtgttggggggcagaagatggaagcccttggcaagctcgatcgaaccaagctactaaattgctgagctcgttttaactgaagtgtgagaaggaggtttaaggcaagtagacaacatcctgttgttggggtgcttctctcttttttgcacatctggctgaactgggagtcaggtggttgacttgtgcctggctgcagtagcagcggcatctcccttgcacagttctcctcctcggcctgcccaagagtccaccaggccatggacgcagtggctgtgtatcatggcaaaatcagcagggaaaccggcgagaagctcctgcttgccactgggctggatggcagctatttgctgagggacagcgagagcgtgccaggcgtgtactgcctatgtgtgctgtatcacggttacatttatacataccgagtgtcccagacagaaacaggttcttggagtgctgagacagcacctggggtacataaaagatatttccggaaaataaaaaatctcatttcagcatttcagaagccagatcaaggcattgtaatacctctgcagtatccagttgagaagaagtcctcagctagaagtacacaaggtactacagggataagagaagatcctgatgtctgcctgaaagccccatgaagaaaaataaaacaccttgtactttattttctataatttaaatatatgctaagtcttatatattgtagataatacagttcggtgagctacaaatgcatttctaaagccattgtagtcctgtaatggaagcatctagcatgtcgtcaaagctgaaatggacttttgtacatagtgaggagctttgaaacgaggattgggaaaaagtaattccgtaggttattttcagttattatatttacaaatgggaaacaaaaggataatgaatactttataaaggattaatgtcaattcttgccaaatataaataaaaataatcctcagtttttgtgaaaagctccatttttagtgaaatattattttatagctactaattttaaaatgtcttgcttgattgtatggtgggaagttggctggtgtcccttgtctttgccaagttctccactagctatggtgtcataggctcttttgggatttttgaagctgtatactgtgtgctaaaacaagcactaaacaaagagtgaaggatttatgtttaattctgaaagcaaccttcttgcctagtgttctgatattggacagtaaaatccacagaccaacctggagttgaaaatcttataatttaaaatatgctctaaacatgtttatcgtatttgatgctacaggatttgaaattgtattacaaatccaatgaaatgagtttttcttttcatttacctctgccccagttgtttctactacatggaagacctcattttgaagggaaatttcagcagctgcagctcatgagtaactgatttgtaacaagcctccttttaaagtaaccctacaaaaccactggaaagtttatggttgtattattttttaaaaaaattccaagtgattgaaacctacacgagatacagaattttatgcggcattttcttctcacatttatatttttgtgattttgtgattgattatatgtcactttgctacagggctcacagaattcattcactcaacaaacataatagggcgctgagggcatagaagtaaaaacacctggtccctgctctcagttcactgtcttgttggacgagaaaagaaacaataacgataaaagacagtgaaagaaaataacgataaaagacagtgaaagaaaataacaataaaagacaaggaaaaaataacaatgaaagttgataagtacatgataagcgaggttccccgtgtgtaggtagatctggtctttagaggcagatagataggtcagtgcaaatactctggtccatgggccatatgaaaaggctaagcttcactgtaaaataataactgggaattctggattgtgtatgggtgttggtgaacttggttttaattagtgaactgctgagagacagagctattctccatgtactggcaagacctgatttctgagcatttaatatggatgccgtgggagtacaaaagtggagtgtggcctgagtaatgcattatgggtggtttaccatttcttgaggtaaaagcatcacatgaacttgtaaaggaatttaaaaatcctactttcataataagttgcataggtttaataatttttaattatatggcttgagtttaaattgtaataggcgtaactaattttaactctataatgtgttcattctggaataatcctaaacatatgaattatgtttgcatgttcacttccaagagcctttttttgaaaaaaagctttttttgaatcatcaagtctttcacatttaaataaagtgtttgaaagctttatttaaaaaaaaaaaaaaaaaaaaaaaaaaaaaaaaaaaaaaaaaaaaaaaaaaaaaaaaaaaaaaaaaaaaagaaaaaaa

SEQ ID NO: 56718 - DNA, 2301 bp, Homo Sapiens
acttcccagccggggccagtcgggagcgaaagtgcgctgagctgcagtgtctggtcgagagtacccgtgggagcgtcgcgccgcggaggcagccgtcccggcgtaggtggcgtggccgaccggacccccaactggcgcctctccccgcgcggggtcccgagctaggagatgggaggcacagctcgtgggcctgggcggaaggatgcggggccgcctggggccgggctcccgccccagcagcggagtggtggagccacagtgttaaagaacagagaagtgatccttaatcatttagaattttgcctccaccatccaccagaaaatgaagtggaaagagaagttgggggatggtgtctatgacaccttcatgatgatagatgaaaccaaatgtcccccctgttcaaatgtactctgcaatccttctgaaccacctccacccagaagactaaatatgaccactgagcagtttacaggagatcatactcagcactttttggatggaggtgagatgaaggtagaacagctgtttcaagaatttggcaacagaaaatccaatactattcagtcagatggcatcagtgactctgaaaaatgctctcctactgtttctcagggtaaaagttcagattgcttgaatacagtaaaatccaacagttcatccaaggcacccaaagtggtgcctctgactccagaacaagccctgaagcaatataaacaccacctcactgcctatgagaaactggaaataattaattatccagaaatttactttgtaggtccaaatgccaagaaaagacatggagttattggtggtcccaataatggagggtatgatgatgcagatggggcctatattcatgtacctcgagaccatctagcttatcgatatgaggtgctgaaaattattggcaaggggagttttgggcaggtggccagggtctatgatcacaaacttcgacagtacgtggccctaaaaatggtgcgcaatgagaagcgctttcatcgtcaagcagctgaggagatccggattttggagcatcttaagaaacaggataaaactggtagtatgaacgttatccacatgctggaaagtttcacattccggaaccatgtttgcatggcctttgaattgctgagcatagacctttatgagctgattaaaaaaaataagtttcagggttttagcgtccagttggtacgcaagtttgcccagtccatcttgcaatctttggatgccctccacaaaaataagattattcactgcgatctgaagccagaaaacattctcctgaaacaccacgggcgcagttcaaccaaggtcattgactttgggtccagctgtttcgagtaccagaagctctacacatatatccagtctcggttctacagagctccagaaatcatcttaggaagccgctacagcacaccaattgacatatggagttttggctgcatccttgcagaacttttaacaggacagcctctcttccctggagaggatgaaggagaccagttggcctgcatgatggagcttctagggatgccaccaccaaaacttctggagcaatccaaacgtgccaagtactttattaattccaagggcataccccgctactgctctgtgactacccaggcagatgggagggttgtgcttgtggggggtcgctcacgtaggggtaaaaagcggggtcccccaggcagcaaagactgggggacagcactgaaagggtgtgatgactacttgtttatagagttcttgaaaaggtgtcttcactgggacccctctgcccgcttgaccccagctcaagcattaagacacccttggattagcaagtctgtccccagacctctcaccaccatagacaaggtgtcagggaaacgggtagttaatcctgcaagtgctttccagggattgggttctaagctgcctccagttgttggaatagccaataagcttaaagctaacttaatgtcagaaaccaatggtagtatacccctatgcagtgtattgccaaaactgattagctagtggacagagatatgcccagagatgcatatgtgtatatttttatgatcttacaaacctgcaaatggaaaaaatgcaagcccattggtggatgtttttgttagagtagactttttttaaacaagacaaaacatttttatatgattataaaagaattcttcaagggctaattacctaaccagcttgtattggccatctggaatatgcattaaatgactttttataggtcaatgcaaaaaaaaaaaaaaaaaaaaaaaaaaaaaaaaaaaaaaaaa

SEQ ID NO: 56719 - DNA, 3736 bp, Homo Sapiens
atctgcacagctggggcccctgggaggagacgccatgatccccaccttcacggctctgctctgcctcgggctgagtctgggccccaggaccgacatgcaggcagggcccctccccaaacccaccctctgggctgagccaggctctgtgatcagctgggggaactctgtgaccatctggtgtcaggggaccctggaggctcgggagtaccgtctggataaagaggaaagcccagcaccctgggacagacagaacccactggagcccaagaacaaggccagattctccatcccatccatgacagaggactatgcagggagataccgctgttactatcgcagccctgtaggctggtcacagcccagtgaccccctggagctggtgatgacaggagcctacagtaaacccaccctttcagccctgccgagtcctcttgtgacctcaggaaagagcgtgaccctgctgtgtcagtcacggagcccaatggacactttccttctgatcaaggagcgggcagcccatcccctactgcatctgagatcagagcacggagctcagcagcaccaggctgaattccccatgagtcctgtgacctcagtgcacggggggacctacaggtgcttcagctcacacggcttctcccactacctgctgtcacaccccagtgaccccctggagctcatagtctcaggatccttggagggtcccaggccctcacccacaaggtccgtctcaacagctgcaggccctgaggaccagcccctcatgcctacagggtcagtcccccacagtggtctgagaaggcactgggaggtactgatcggggtcttggtggtctccatcctgcttctctccctcctcctcttcctcctcctccaacactggcgtcagggaaaacacaggacattggcccagagacaggctgatttccaacgtcctccaggggctgccgagccagagcccaaggacgggggcctacagaggaggtccagcccagctgctgacgtccagggagaaaacttctgtgctgccgtgaagaacacacagcctgaggacggggtggaaatggacactcggcagagcccacacgatgaagacccccaggcagtgacgtatgccaaggtgaaacactccagacctaggagagaaatggcctctcctccctccccactgtctggggaattcctggacacaaaggacagacaggcagaagaggacagacagatggacactgaggctgctgcatctgaagccccccaggatgtgacctacgcccggctgcacagctttaccctcagacagaaggcaactgagcctcctccatcccaggaaggggcctctccagctgagcccagtgtctatgccactctggccatccactaatccaggggggacccagaccccacaagccatggagactcaggaccccagaaggcatggaagctgcctccagtagacatcactgaaccccagccagcccagacccctgacacagaccactagaagattccgggaacgttgggagtcacctgattctgcaaagataaataatatccctgcattatcaaaataaagtagcagacctctcaattcacaatgagttaactgataaaacaaaacagaagtcagacaatgttttaaattgaatgatcatgtaaatattacacatcaaaccaatgacatgggaaaatgggagcttctaatgaggacaaacaaaaaatagagaaaaattaataaagtcaaaatgtttattcttgaaaacattaatgatacatgaatcttggccacaatgagaaaaataaaaatgaaaaaagagcaggcatccatttccatacaggaacaaaataggaggcagcactacagaccctacacacagctttacagaggtgaaagaaaactgtcagcaattctatgctgacataacagaaaatgtagatgagatagatgaaatacgaaaaattacagtttacttaatgaacataaggataaatagaaaaactgaatcatcatacataaacatatataaaatgcattgatcctgtaatcaaaaatgttcccacaaagtaaatgccacttcagcaaggtttgttggtggttttttcaaactcttatgcactcatgaaacacacagacacacacacacacaaacttgcataaattttccctgagaatattttgtatatatttacacaaatacatttgatcagactaggaacaagttgataccaaaacctgaaaaggaaactacagaatgggaaagtcatagaagatctctcacagaaatataaatcccttaacaaatattaacaagtaagattcatgtctctataaaatagacagtatatcatgaccacactggttttttgttatcctttgattttgtttatgaaaagcaaggatagcttaattttcaaaaactcaatcaatgtaattcagtattttaacaaaaggaatgaaaaattatcatctcaatagacaaagcttttgtctgagcaccttttcatatagctgctgaccatttgtatgtcttcttttgagaaatgcctgttcagctactttgcccatgtttcaagtagtttttggtttcttgctgttgctttgttttagttccttacatatttttgcatattaaccctttatcaggtatacagcttgcaactattttctcccatttctgagttgtctcttcattctgtttgcagaagctgtttagaagccacaccttttgtctatttttgcttttgttgcttgtgttttcagggccatatccaaaaaaaccttgcccggaccaacgtcttgaagcttttctcacacccatttttgtatatgggataagggttcaatttcattcttcttcatatgaatatccccaggatgtgtcatatgcccagctgcacagcttaccctcaaacagaaaataatgaagccttcttcctcccaggaaaggggacgttcagctgagccgagtgtgtatactgctctggccatccactagcccagggaggacccagacctccacactccatggagactcagttctcctaggaccatttattcaaaaggactgccctctcttgttcttggaaactttgttgaggatcaattcaccataaatatgtgtgtttccttctttgctttcatccctgttgcactgatcactatacctgtttctattccagttccatgatgtcttcctggctgtagctttgtaggatatttggggattccatagtgtgatatccccttcttccctttgctcaagattgttttggctatttggggtccttttgtagtcccattcaaattttaggattgtttttctatttctgtggaaaacgaccttggaattttgttaggaattgcattgagtctgcaggtatgaacttttttttaaagttccagggcacatgtacaggacctgcagctttgttacataggtaggcttgtgccatggtggtttgctgcacctatcaacccattacctagttattaagcccagcatgcattagctctttttcctgatgctctccctcccttcatcatccgccctcccactacaagccccagtgtgtgttgttcccctccctgtgtccatgtgttctcattgttatacgaacattttaacaatgttaattcttgcagaccatgaacataagctaccttcccatttatatgcgtcttgttcaatttcattcatcaatgttataaagattttagtgcagaaaaaaaaaaaaaaaa

SEQ ID NO: 56720 - DNA, 3256 bp, Homo Sapiens
gctgacgtcgccggggcccggcgtcgcgtcagggctggccggcggcggaggcggcggcggcggcggcgatggcagcggaccctgagcgagcttgagggctcggacccagctccctcccgcgaaaccttgggcggatccggcgctgcggccccagctcgctccgctcctgctccctccccggccgctgcctgggcggaggcagaggcagaggcccgggctggccgccctgctcgtgccccagctcggccccggacggcccggctgctgtgcagagaggaggccgagtcgtgaaaagagaatactgaagaataggatctcaagatgagtaaaaagcccccaaatcgccctggaatcacttttgagattggtgctcgtttggaggcactggactacttacaaaaatggtatccatcacgaattgaaaaaattgactatgaggagggcaagatgttggtccattttgagcgctggagtcatcgttatgatgagtggatttactgggatagcaatagattgcgaccccttgagagaccagcactaagaaaagaagggctaaaagatgaggaagatttctttgattttaaagctggagaagaagttctggctcgttggacagactgtcgctattaccctgccaagattgaagcaattaacaaagaaggaacatttacagttcagttttatgatggagtaattcgttgtttaaaaagaatgcacattaaagccatgcccgaggatgctaaggggcaggattggatagctttagtcaaagcagctgctgcagctgcagccaagaacaaaacagggagtaaacctcgaaccagcgctaacagcaataaagataaggataaagatgagagaaagtggtttaaagtaccttcaaagaaggaggaaacttcaacttgtatagccacaccagacgtagagaagaaggaagatctgcctacatctagtgaaacatttggacttcatgtagagaacgttccaaagatggtctttccacagccagagagcacattatcaaacaagaggaaaaataatcaaggcaactcgtttcaggcaaagagagctcgacttaacaagattactggtttgttggcatccaaagctgttggggttgatggtgctgaaaaaaaggaagactacaatgaaacagctccaatgctggagcaggtatgaaatggtagcatttgatttttttcaaggttcccactggaatgatcacggagctctagtatctacgtaattgaaattccccttttgatcagatatgggaataggaagctaattaattgatgatatatttttaactctgccttctccaaggtatacagataactacagacttcattagtgtttgatttcatagactggcattaaagcctttgtctccaaaatttgaaggcctggagacaggcatcccagggtataagcttccagctggatcacctttaactagcttacaaaaagacccttacacaaatactttccatttgtgagttaaaacagggttttttgacatcgaataaagcttcttttgtaagaagtttcttttatattgtaacaattggtgttgttagactgactatgtgttttatgaattgatcaatgagccatacatttttgctaggatgtatattttaataactacaaaaaaagagagtttaaaaaactattaagggtctgtctttaaaccacctaatagaggaatttaaaagtgaaggttgcagttgctagattttgccttggctaccttcagattcccacaatacttgtacataatgaactgtgcatgcttttacattctctaagggcttaacttcttaggcactgtaagactataagaacgcagtaatagccataactggatttccttggttctcctgttttaaaatctgagccttaatgtagttttaatatatcctttttgtattacttttctttattagtagcctaataaagaagactttgagtatcttttgctctcctctagatgcgttttaaaaactattccaaatttaattgatattgtattgagtttttcagggttattttaggcctgatttgataacaatgcgttgttttggtgcctccattaatgttgtattaaatcaatgggtcttttaaattgattaatatgtcattgaatcataccttctgattttctgtgatcatccaacggttaagtctttgccgttattgtcaatatatcaaccaaattttaaataactttttttactgtgtattactatattcaacgtcccagatataacaatattttgtattttcaccactgtttatggtattctcagaatgcgataaatcagggacttgggtaataaaatgtttctggaaaattcattacaatgtcaatctttgattatgcacaatcctgctgaggtgaatgtgattgtgaaaagtacttattaaatgtggaagttagtgtagagggcagtacccgtcttagagagaagtacagaaaaccacgttttgaaattgaatttaaaaaagaaaggaaaattgtgtaactcggctgtttctattttcataattaaaaacttttgagagtccttgccagttttgtaacaaagagaccaacaatcattaatgaaaaccttgtaaattattttagattttcaggaacaccatgccattccctcattttctacttgtcattcaggttgatttcaatgtgaaaatgttttgtgaacaaacacttatttttatcctatgtgttagcctcgcttcatagttaaaaagccgagttataaagctcttaattacatctcaattggtatcagcaatagacctaaaggagaggtattgattgttactaacctctgtttcctaatgagttaaagtaatgtcactcatgacatagattgataacaggcctgtagtcaaaacttactgtgctaatggacttatttatattttttaaaaattcaaactgtggtcttgaaccccaattctcagcttattaattatagattatttaattgtattagggatatgtcatgttatatttacttttggataaaacttgcattagatgcataataactcagtaagttttaaaaacaatgttaatttttccttgtttagaagttaagcaccttatcaagatattaagttttaaaatcttgttttataactttgtaacttgagagtaatggatgctgtagtgatgtctttcacatatgtgaagatgaacaataaaattgtttatttacaagtaaaaaaaaaaaaaaaaaaa

SEQ ID NO: 56721 - DNA, 3369 bp, Homo Sapiens
ggttttcaggagcccgagcgagggcgccgcttttgcgtccgggaggagccaaccgtggcgcaggcggcgcggggaggcgtcccagagtctcactctgccgcccaggctggactgcagtgacacaatctcggctgactgcaaccactgcctccagggttcaagcgattctcttgcctcagcctcccaagtagctgggattacagattgatgttcatgttcctggcactactacaagattcatactcctgatgctactgacaacgtggcttctccacagtcaccaaaccagggatgctatactggacttccctactctcatctgctccagccccctgaccttatagttgcccagctttcctggcaattgactttgcccatcaatacacaggatttagcatccagggaagatgtcggagcctcagatgttaattttctaattgagaatgttggcgctgtccgaacctggagacaggaaaacaaaaagtcctttctcctgattcaccaaaaaataaaatactgactaccatcactgtgatgagattcctatagtctcaggaactgaagtctttaaacaaccagggaccctctgcccctagaataagaacatactagaagtcccttctgctaggacaacgaggatcatgggagaccacctggaccttctcctaggagtggtgctcatggccggtcctgtgtttggaattccttcctgctcctttgatggccgaatagccttttatcgtttctgcaacctcacccaggtcccccaggtcctcaacaccactgagaggctcctgctgagcttcaactatatcaggacagtcactgcttcatccttcccctttctggaacagctgcagctgctggagctcgggagccagtatacccccttgactattgacaaggaggccttcagaaacctgcccaaccttagaatcttggacctgggaagtagtaagatatacttcttgcatccagatgcttttcagggactgttccatctgtttgaacttagactgtatttctgtggtctctctgatgctgtattgaaagatggttatttcagaaatttaaaggctttaactcgcttggatctatccaaaaatcagattcgtagcctttaccttcatccttcatttgggaagttgaattccttaaagtccatagatttttcctccaaccaaatattccttgtatgtgaacatgagctcgagcccctacaagggaaaacgctctccttttttagcctcgcagctaatagcttgtatagcagagtctcagtggactggggaaaatgtatgaacccattcagaaacatggtgctggagatactagatgtttctggaaatggctggacagtggacatcacaggaaactttagcaatgccatcagcaaaagccaggccttctctttgattcttgcccaccacatcatgggtgccgggtttggcttccataacatcaaagatcctgaccagaacacatttgctggcctggccagaagttcagtgagacacctggatctttcacatgggtttgtcttctccctgaactcacgagtctttgagacactcaaggatttgaaggttctgaaccttgcctacaacaagataaataagattgcagatgaagcattttacggacttgacaacctccaagttctcaatttgtcatataaccttctgggggaactttacagttcgaatttctatggactacctaaggtagcctacattgatttgcaaaagaatcacattgcaataattcaagaccaaacattcaaattcctggaaaaattacagaccttggatctccgagacaatgctcttacaaccattcattttattccaagcatacccgatatcttcttgagtggcaataaactagtgactttgccaaagatcaaccttacagcgaacctcatccacttatcagaaaacaggctagaaaatctagatattctctactttcttctacgggtacctcatctccagattctcattttaaatcaaaatcgcttctcctcctgtagtggagatcaaaccccttcagagaatcccagcttagaacagcttttccttggagaaaatatgttgcaacttgcctgggaaactgagctctgttgggatgtttttgagggactttctcatcttcaagttctgtatttgaatcataactatcttaattcccttccaccaggagtatttagccatctgactgcattaaggggactaagcctcaactccaacaggctgacagttctttctcacaatgatttacctgctaatttagagatcctggacatatccaggaaccagctcctagctcctaatcctgatgtatttgtatcacttagtgtcttggatataactcataacaagttcatttgtgaatgtgaacttagcacttttatcaattggcttaatcacaccaatgtcactatagctgggcctcctgcagacatatattgtgtgtaccctgactcgttctctggggtttccctcttctctctttccacggaaggttgtgatgaagaggaagtcttaaagtccctaaagttctcccttttcattgtatgcactgtcactctgactctgttcctcatgaccatcctcacagtcacaaagttccggggcttctgttttatctgttataagacagcccagagactggtgttcaaggaccatccccagggcacagaacctgatatgtacaaatatgatgcctatttgtgcttcagcagcaaagacttcacatgggtgcagaatgctttgctcaaacacctggacactcaatacagtgaccaaaacagattcaacctgtgctttgaagaaagagactttgtcccaggagaaaaccgcattgccaatatccaggatgccatctggaacagtagaaagatcgtttgtcttgtgagcagacacttccttagagatggctggtgccttgaagccttcagttatgcccagggcaggtgcttatctgaccttaacagtgctctcatcatggtggtggttgggtccttgtcccagtaccagttgatgaaacatcaatccatcagaggctttgtacagaaacagcagtatttgaggtggcctgaggatctccaggatgttggctggtttcttcataaactctctcaacagatactaaagaaagaaaaagaaaagaagaaagacaataacattccgttgcaaactgtagcaaccatctcctaatcaaaggagcaatttccaacttatctcaagccacaaataactcttcactttgtatttgcaccaagttatcattttggggtcctctctggaggttttttttttctttttgctactatgaaaacaacataaatctctcaattttcgtatcaaa

SEQ ID NO: 56722 - DNA, 5054 bp, Homo Sapiens; identical to SEQ ID NO: 31759

SEQ ID NO: 56723 - DNA, 6616 bp, Homo Sapiens
atcgatgctagacagacagtctttttactgctggattgtgcaagatatttaaccctattttgtttgaattatgacttaaatgtcaaacatcttaactaagaaaagggaaacattttagttttggaagtcagaatgccaaggagaaggaaaaatcttgggggaaatccttttcggaagactgcaaaccctaaggaagttgtcgtatccagtgttgctagtcgtgaggagccaaccactactctaccttccatgggtgagacaaaagttgatcaggaagaactcttcaccagtatctcagagatattttctgatctggatcctgatgtagtgtatttgatgctttctgaatgtgatttcaaagttgaaaatgctatggattgtctattagaattatctgccactgataccaagatagaagaatcatcttcacaaagtttcgttgcttctgagaaccaagtaggtgcagcagaaagtaaaataatggaaaaacgtcctgaagaagagagtgaagattcaaaaatggattcatttttggacatgcagctaactgaagacctggattccttaatacagaatgcttttgagaaattgaactcttctcctgatgaccaagtatactcatttttgccttcacaagatgttaatagttttaatgactcaagtgagtttataaatcctgattcaagtaatatgactcccattttttctacacaaaatatgaatttgaacggtgaaaatttagagaattctggttctactttaagtttaaacccattaccttcacattcagttttgaacgagtccaagtgttttataaaggataacacattggctttggaaagtaactacccggaagattctcttctcagtagttctttaaatgtagcaagtgactccatcgcaggttgtagcagtctcaatcaaaaacagaaagaacttttagaatctgagtgcgttgaggctcaattctctgaagctcctgtagatttggatgccagtgaacctcaggcttgtttaaaccttccagggcttgatttaccaggtacaggtggggatcagaaatctactcgggtctctgatgtgtttctaccttccgaagggttcaacttcaagccacacaaacatcctgaactgccaactaaggggaaggatgtgagttactgcccggtacttgctcctctcccattgctgttgcctcctccgccacctccaccgatgtggaatccaatgattcctgcttttgacctcttccaaggaaaccatggctttgtagctcctgttgtaaccacagctgcacactggagatctgtcaactacacatttccaccctcagttatttctcacacttccccaacaaaagtatggagaaataaagatggaacaagtgcttatcaagtacaagaaaccccagtttctcaggttgtaagaaagaagacatcttacgttggactagttcttgttcttctcagaggtcttccgggatctggaaaatcttttttggcaaggactttgcaagaggataatccaagtggagtcattcttagtactgatgattatttttatataaatggacagtaccagtttgatgtaaagtacttaggagaagcacatgaatggaaccagaatcgtgcaaaagaagcatttgagaagaagatatctcctataattatagataatacaaacctacaggcatgggaaatgaaaccatatgttgctttgtctcagaaacacaaatataaagtcctttttcgggaaccagacacatggtggaagtttaaaccaaaggaacttgcaaggcgtaacattcatggggtaagcaaagaaaaaataacaagaatgttggaacattatcaacgttttgtttcagtgccaataattatgagttcttcggttccagagaaaattgaacgtattgagttgtgtgcatattcttgtgaggatagaagcactagcccaagagacgatgaagatattatctctgaaaaagaagaaaatattttatctttatctttgaagcatctagagttcactgaagagaagaatcttgatgtaaccaaagaaacaatgttacctgagaatgttgcatatctctctaatgcagatttaaacaaaagaagaaaagaaataagtgatatgaatcctagcattcaaagtgctttaattctggaaactccacacatgtatttttctgactctgaaagcaaactacaggcaacagacaaaagtgaaaacgagcaaatagaaatggtggctgtaaaagggtatagtaaaactgacacagatagttctatggagagagtatcacctagtacttgctgtagtgaaaataatcaagaagactgtgatcttgcaaatagtggaccacttcaaaatgaaaaatcctcacctggtgaaatagtggaagaaagagcaacagtaacgaaaaaagcctttgggaaacaaaaaagcaaatcgactttggaaaagttcccaagacatgagctatcaaattttgttggtgactggccagttgataagactattggtcagaggacaaaaaggaacagaaaaactgaaaaaacttcatccgtacaaagcgacaaaaagtataattaccctcagtcacacaaattagttaacagtgtatctgtgaatacagattgtgtccagcaacgaggatctccacatgaaagtgtagaggatggcagaaagtcacagtgtgatgatgcttcagagccactcaatagctataaatatgatgcttataaaaatattgacaaaaactcattcaacattatgggtgactggccttcatctgattctttagctcagagggaacacagatcaagaatgccaaagactggtttaagtgagcccaacctagaaattggaacaaatgacaaaatgaatgaaatatccttatctacagcacatgaggcctgttggggcacaagctctcaaaaactaaagacattgggtagctccaatctaggaagttctgaaatgctgctcagtgaaatgacctgtgagagtcagacttgtctaagtaaaaagagtcatgggcaacacacatcgttgcctcttacttttaccaatagtgcaccaactgtttctggagtagtagaaccacaaacgttagctgaatgtcaagagcaaatgcctaagagagaccctggaaaagaagtaggcatgtgcacccagactgaaccacaggattttgctcttttatggaaaatagaaaagaataaaattagcatttcagattctatcaaagtattaacaggaagattagatggatttaagccgaaagttttcaatattaacacaaaatcagacgttcaagaagcaattccatatagagtaatgtatgataaaagcacgtttgttgaagaaagtgagcttaccagtgcagatgaatctgaaaatcttaacattctttgtaaactgtttggatccttttcattagaagccctgaaagacttatatgagaggtgcaataaagatattatttgggccacaagccttttgttggattctgaaactaagttatgtgaggatacagagtttgagaatttccaaaaatcgtgtgatggatcacaaattgggcctttttctctggggttgaatttgaaagaaattattagccaaagaggaactttagagaattctaattctcctgtgccagagtttagccatgggattggtattagtaacgctgactcacagtctacttgtgatgcagaaagaggaaactcagagcaggcggaaatgagagctgtcactcctgaaaaccatgaatcgatgacaagtatatttcccagtgctgctgtgggtctaaagaataataatgacatacttcctaacagccaggaagaacttttatatagcagtaagcagtcctttccaggtattctaaaagctactactcctaaagatatgagtgaaacagaaaaaaacctagtagtcacagagactggagacaacatacattctccttcacatttctctgatatttttaactttgtatctagtacttcaaatcttgaattaaatgaagaaatttattttactgattctcttgaaataaagagaaatgaaaattttccaaaggattatgtgaaattttcagatgaagaagaatttatgaatgaagatgagaaggaaatgaaggaaattctaatggcaggaagtagtttatcagctggagttagtggggaagataaaaccgagatattgaatcccactccagcgatggccaaatctctgaccatagactgtctggaattggcattaccccctgaactggcttttcaacttaatgaattatttggtcctgttggtattgattcagggtctctaacagttgaagattgtgtggttcatatagatctgaatctggcgaaagtgattcatgagaaatggaaagaatctgtaatggagcgacaaagacaagaagaggtgtcttgtggcaagtttatgcaagatccttccttggttggacatactgggcttgataatcctgaacaaaaatcatctcagagaacaggcaaaaaattactgaagactttaacagcatctgaaatgctacctttattggatcattggaatactcaaactaaaaaagtatcactcagagaaataatgtcagaagaaattgccttacaggaaaaacataatttgaaaagggagacccttatgtttgaaaaagattgtgccactaaactaaaggagaagcagctctttaagatatttccagccattaaccaaaattttctggtggacattttcaaggaccacaactattcattagaacacacagtgcaatttcttaactgtgttcttgaaggggaccctgtaaaaacagttgtagcccaagagtttgttcaccaaaatgagaatgtcacatctcatactggccagaagtctaaagagaaaaagccaaagaaattaaaagagactgaagaaacaccaagtgaactgtctttccaggactttgagtacccagactatgatgactacagagcagaggctttccttcaccaacagaagaggatggagtgctacagcaaggccaaagaagcttatcggatagggaaaaaaaatgtcgccaccttttatgcccagcagggtactcttcatgagcagaagatgaaagaagccaatcaccttgctgccatagagatctttgagaaagtcaatgcttcgctgctgccacagaatgttttagacctccatgggctgcatgtggatgaagctctagaacatttgatgagagttttagagaagaagactgaagaatttaagcagaacggtgggaagccctatttgtctgtgattacggggagaggaaaccacagccagggaggagttgctcgcatcaaaccagctgtcattaagtacctcataagccatagcttcaggttctctgaaattaaaccagggtgcttgaaagtcatgctaaagtaaaataaacatccttgaattagaagtatgaaggtttgtaggttaaaattacttttatttgcagtaattcagtcaattctaccctaaagatgtgttttattataaataatattcaattatgaaacaaaaaaattatgatgtttttcaaaatgcaagtgaggtttgattttttactgaatcaaatgcaaatgttacctgttaaagatattacagagaaattttattgattacaaaatatgtaagaaaattatcagctacagttttaaagtttaaaatgctctgattgtttctcagaaaaggttacctttgtattaattgttgtatgacatttagtaatgtcctaaaagtcttttgtgagaggtatttaaagtgctttgagacctgattcatgccccccaaagggtggtattaaaagaggaaaaaggacatagtagtggtagtaaagaaaaaaaggagatctaacaaaaacacttgaatattttttattttcaaaactaaacacataaaatgcttttattttgccatatcctacaggaaggaagacatgcttttgccctttcttctgctttgtatatgaccttgatcttttaccttttgttctgttcttctgtgtgcattttatggaaagaaagttgggtctgagattatattgtaattttatactttctatagacagaaaggttttcagagaaaaagaaatggttaaatatcttccagatgttgctgccttatcgaaatgcttctagaactgtctgtataagtcgtatttcagacagtactaaatacttatattttatttttgaggcatgtaattttaaaactgcagtaggttaaaattctattaaacaaatatagaaaatattttgtttataattggcctggtgtggtggcccacgcctgtaatcccagcactttgggaggccgaggtaggtggatcgcctgaggtcagaagttcaagaccagcctggccaacatggtgaatccccgtctctattaaaaatacaaaaattagctgggtgtggtggcgtgtgcctgtaatcccagctacttgggaggctgaggcaggagaaccgcttaaacctgggaggtggaggttgcagtgacccgagatcgagatcacaccactgcactcagcctgggtgacagagcaagactccgtctccaaaaaaaaaaa

SEQ ID NO: 56724 - DNA, 1704 bp, Homo Sapiens
gaggcgggggaggggccgtgagtgccgcagtcggccagccatggagcggagcttgctggcggcgaggccgcggcgacaaggtagccacccccgcagcatgcctcgaccgcggtccgcagctgcaccgcctctccccgccccccagggtgcgctggtcccggtcgcgcgctcagacctccgcatcccgggcgtggtcggttaagtccccggccgtgacccaggcccggggagctagtctccgcccttcgctcttacggatcccctcggagtacgccgcaccatgcagctcaggctcttccggcgcctccttctcgccgctttgctgctggtgatcgtctggaccctcttcgggccttcggggttgggggaggagctgctgagcctctcactagcctccctgctcccagcccccgcctcaccggggccgcccctggccctgccccgcctcttgatccccaaccaggaagcttgcagtggtcccggggcccctcccttcctgctcatcctggtgtgcacggctccggagaacctgaaccagagaaacgccattcgggcttcgtggggcgggctgcgcgaggcccgggggctcagggtacagacgctattcttgctgggagagccgaacgcacagcaccccgtgtggggttcccaggggagtgacctggcctcggagtcagcagcccagggggatatcttgcaggccgccttccaggactcctaccgcaacctcaccctaaagaccctcagcgggctgaactgggctgagaaacactgccccatggcccgatacgtcctcaagacggacgatgatgtgtatgtcaacgtccctgaactggtatcagagctggtcttgcgagggggccgttgggggcaatgggagagaagcacggaaccccagagagaggctgagcaggaaggaggccaggttttgcacagcgaggaagtgcctcttctgtacttgggccgggtgcactggcgcgtgaacccctctcggacaccggggggcaggcaccgcgtatcagaggagcagtggcctcacacctggggcccctttccaccctatgcctcaggcacggggtatgtgctgtcagcgtctgctgtgcagctcattctcaaggtggccagccgggcaccccttctcccattagaggatgtctttgtgggggtaagtgcccgacgaggaggcctcgccccaacacagtgtgtcaagctggctggtgccacccactacccgctagaccggtgctgctatgggaaattcctgctgacgtcccacaggctggacccctggaagatgcaggaagcctggaagctggtgggtggctctgacggggaaaggactgcgcccttttgctcctggttccagggagtcctgggcatcctgcggtgtcgagcaatagcctggcttcagagctgagagtgcctggggccacaggaaaggcaggaacaggaccttctctctcccaggcccaacgcaggggccctcactggctgcagctgatctgtttccttataccagatcctcagtctcactaaagacagcgatatgggagacacccaggggcctggcccgccagcccaaaagatggtcatcgggaagagaaaaagaaaaaaatgctgcagttgttctctcaagctagggcagaagaggggtgtcaagctcctcaataaacttgtctccacttcaaaaaaaaaaaaaaaaaa

SEQ ID NO: 56725 - DNA, 4348 bp, Homo Sapiens; identical to SEQ ID NO: 30537

SEQ ID NO: 56726 - DNA, 2063 bp, Homo Sapiens
tgccgggatccaggtctccggggtccgctttggccagaggcgcggaaggaagcagtgcccggcgacactgcacccatcccggctgcttttgctgcgccctctcagcttcccaagaaaggcatcgtcatgtgatcatcacctaagaactagaacatcagcaggccctagaagcctcactcttgcccctccctttaatatctcaaaggatgacacttctgtggtgtgtagtgagtctctacttttatggaatcctgcaaagtgatgcctcagaacgctgcgatgactggggactagacaccatgaggcaaatccaagtgtttgaagatgagccagctcgcatcaagtgcccactctttgaacacttcttgaaattcaactacagcacagcccattcagctggccttactctgatctggtattggactaggcaggaccgggaccttgaggagccaattaacttccgcctccccgagaaccgcattagtaaggagaaagatgtgctgtggttccggcccactctcctcaatgacactggcaactatacctgcatgttaaggaacactacatattgcagcaaagttgcatttcccttggaagttgttcaaaaagacagctgtttcaattcccccatgaaactcccagtgcataaactgtatatagaatatggcattcagaggatcacttgtccaaatgtagatggatattttccttccagtgtcaaaccgactatcacttggtatatgggctgttataaaatacagaattttaataatgtaatacccgaaggtatgaacttgagtttcctcattgccttaatttcaaataatggaaattacacatgtgttgttacatatccagaaaatggacgtacgtttcatctcaccaggactctgactgtaaaggtagtaggctctccaaaaaatgcagtgccccctgtgatccattcacctaatgatcatgtggtctatgagaaagaaccaggagaggagctactcattccctgtacggtctattttagttttctgatggattctcgcaatgaggtttggtggaccattgatggaaaaaaacctgatgacatcactattgatgtcaccattaacgaaagtataagtcatagtagaacagaagatgaaacaagaactcagattttgagcatcaagaaagttacctctgaggatctcaagcgcagctatgtctgtcatgctagaagtgccaaaggcgaagttgccaaagcagccaaggtgaagcagaaaggtaatagatgcggtcagtgatgaatctctcagctccaaattaacattgtggtgaataaggacaaaaggagagattgagaacaagagagctccagcacctagcccgacggcatctaacccatagtaatgaatcaaacttaaatgaaaaatatgaaagttttcatctatgtaagatactcaaaatattgtttctgatattgttagtaccgtaatgcccaaatgtagctaaaaaaatcgacgtgagtacagtgagacacaattttgtgtctgtacaattatgaaaaattaaaaacaaagaaaatattcaaagctaccaaagatagaaaaaactggtagagccacatattgttggtgaattattaagacccttttaaaaatcattcatggtagagtttaagagtcataaaaaagattgcatcatctgacctaagactttcggaatttttcctgaacaaataacagaaagggaattatataccttttaatattattagaagcattatctgtagttgtaaaacattattaatagcagccatccaattgtatgcaactaattaaggtattgaatgtttattttccaaaaatgcataattataatattattttaaacactatgtatcaatatttaagcaggtttataatataccagcagccacaattgctaaaatgaaaatcatttaaattatgattttaaatggtataaacatgatttctatgttgatagtactatattattctacaataaatggaaattataaagccttcttgtcagaagtgctgctcctaaaaaaaaaaaaaaaaaaaaaa

SEQ ID NO: 56727 - DNA, 6926 bp, Homo Sapiens
atttgagcatcagttgagggagaggacgcttcatttcctttttggttgggaatgtgccgtgaacatcctctgctggagcttggggcctggagcagactggggctgcagatttagacgtagacgtttccgaggacgcgagactgcagagctttgtaggcagccaatcccagagaagcagacgggatggctagttcagcccgggagcacctgctttttgtgaggcgtcgaaatccccagatgcggtacacattgagcccagagaacctccagagccttgccgcccagagctccatgccagagaacatgaccctgcagcgggccaacagcgacaccgacctggtgacttctgagagccgctccagcttaactgccagcatgtacgagtacacgctggggcaagcccagaacctcattatcttctgggacattaaagaggaggtggaccccagtgattggattggactttatcatatagatgagaattctccagccaacttctgggattctaagaacaggggtgtgactggaacacaaaaagggcaaattgtatggagaattgagcctgggccctatttcatggaaccggagataaaaatctgttttaaatattaccacggcattagtggagccctgcgagccacgaccccctgcatcaccgtgaagaacccagctgtgatgatgggggcagaaggcatggagggaggtgcttcaggaaacctgcattctcgaaaacttgttagctttacattgtcagatcttagggcagttgggctaaagaaagggatgttcttcaatcctgacccttatcttaagatgtcaattcagccaggaaagaagagcagtttccccacctgtgcccaccacgggcaggagagacggtctactatcatcagtaacaccaccaatccaatttggcaccgagagaaatattccttttttgcacttcttactgatgtcttagaaattgaaattaaagacaaatttgccaagagccgtcccatcatcaagcgttttctggggaaactaaccattccagtccagaggctgctggagcgacaagccatcggtgatcaaatgctcagctacaaccttggcagaaggctcccagctgaccacgtgagtgggtacctccagtttaaagtggaggttacgtcttctgttcatgaagatgcctctccagaagctgttggcacaatacttggagtcaattctgtgaatggagacttaggtagcccttccgatgacgaggacatgccagggagccatcacgacagccaggtgtgctctaatgggccagtttctgaggacagtgctgccgatggaacccccaagcattcattcaggactagctccactctggaaatagacacagaggaattaacctctacgtcttcaaggacctcacctcccagaggacgtcaggattcactcaatgattacttagatgctatcgaacacaatggccactccaggccagggacagcgacctgctctgagaggtccatgggtgcctctccgaaactgaggagtagttttcccactgacacaagactcaatgccatgcttcatattgattcagatgaagaagatcacgagttccagcaagacctgggttacccatcttccttggaggaggagggaggcctgatcatgtttagcagggcatccagagctgatgatggaagcctgacatctcagacaaagctggaggacaaccctgttgagaatgaggaagcctccacacacgaagctgcttcctttgaggataagccagaaaatcttccagagcttgcagagagctccttacctgcaggcccagccccagaggaaggtgaaggcggcccagagcctcaacccagtgctgaccagggcagtgctgaactgtgtggctctcaagaggtagatcagcccacaagtggcgcagacacagggacttccgatgcatcaggaggaagccgaagagccgtcagtgagaccgagtctctcgatcagggctctgagccttcccaggtgtcctctgaaacagaacccagtgatcctgccaggacagagagtgtgagcgaagccagcaccaggcctgagggagagagtgacctggaatgcgctgacagctcctgcaatgagagtgtgaccacgcagctgtcctctgtggacacacggtgctcctctcttgagagcgcacggtttcctgaaaccccagccttttcttctcaggaggaggaagacggagcctgtgcagcagagcccaccagcagtggccctgccgaagggtcgcaggaatccgtgtgcactgctggttctttacctgtggtacaggtgcccagtggggaggatgaagggccaggggcagaatcggccactgtacctgaccaggaggagctgggggaggtctggcagcggagggggagcctggagggagctgcagctgctgccgagagcccaccgcaagaagaaggcagtgctggggaggcccaaggcacctgtgaaggggcaactgcccaggaggagggcgctactggaggttctcaagccaacggccaccagccactgcgatcactaccttcagtgcgccaggatgttagccggtaccagagggtggacgaggctctcccaccaaactgggaggcacgcattgacagccacggcaggatcttctacgtggatcacgtaaacagaaccacgacgtggcagcgaccgacagctcccccagccccgcaggtgctgcagagatctaactccatacagcaaatggagcagctgaaccggcgatatcagagtatccgcagaaccatgaccaatgagaggcctgaggaaaataccaatgctattgatggggcaggggaggaagctgactttcaccaagccagtgcagatttccgacgggagaacatcctgcctcactctacctccagatccaggatcacgttgctgttacagtctccccccgtgaagttcctcatcagcccagagttcttcaccgtgctgcattctaaccctagtgcctaccgcatgtttacaaacaacacgtgtttgaagcacatgatcaccaaagtccggagggacacccaccactttgaacgctaccagcataaccgcgaccttgtgggattcctcaacatgttcgcgaacaaacagctagagctgccgcggggatgggaaatgaaacatgatcaccagggcaaggcattctttgtggaccacaactcccgcaccaccactttcattgatccccggctcccacttcagagcagtagacccacaagtgcgctggttcatcggcaacacctgacaaggcaacgcagccacagtgcgggtgaggtaggagaagattctcgacatgcaggaccaccagttcttcccaggccatccagtacattcaatacagtcagtaggccacagtaccaggacatggttccagtggcttacaatgacaagattgttgcatttctacgtcaacccaatatctttgaaattctacaggagcgtcaacctgatcttaccaggaatcactcactcagggagaagatccaatttatccgaactgaagggactccaggattggtgcgcctttcaagcgatgcagaccttgttatgttgctgagcttatttgaagaagagataatgtcatatgtgcctccacatgccttactccaccccagctactgtcagtccccacgtggctctcccgtgtcatctcctcagaactcgccaggtacccagcgtgccaatgcccgggctccagccccttacaagcgggatttcgaagccaaactgaggaacttttacaggaagttagagactaaaggatatggacaaggcccagggaagttaaagttaattatccgaagagatcacttactagaagatgcttttaatcagattatgggctactccagaaaagacctgcagagaaataagctatatgtcaccttcgttggggaggaagggctggattacagtgggccttctagagagtttttcttcctggtatccagagaactctttaacccatattatggcttatttgaatattcagccaatgacacatacacagtacaaataagtcctatgtctgcttttgtagacaatcaccatgaatggttccgattcagtggtaggatccttggtcttgcactaatacaccagtatttgttggatgccttcttcacacggcccttttataaggctcttctcagaattctatgtgacctgagtgacctagaataccttgatgaagagttccatcagagcctgcagtggatgaaagacaatgatatccatgacatcctagacctcacgttcactgtgaacgaagaagtatttgggcagataactgaacgagaattaaagccagggggtgccaatatcccagttacagagaagaacaagaaggagtacatcgagaggatggtgaagtggaggattgagaggggtgttgtacagcaaacagagagcttagtgcgtggcttctatgaggtggtggatgccaggctggtatctgtttttgatgcaagagaactggaattggtcatcgcaggcacagctgaaatagacctaagtgattggagaaacaacacagaatatagaggaggataccatgacaatcatattgtaattcggtggttctgggctgcagtggaaagattcaacaatgaacaacgactaaggttgttacagtttgttacaggcacatccagcattccctatgaaggatttgcttcactccgagggagtaacggcccaagaagattctgtgtggagaaatgggggaaaatcactgctcttcccagagcgcatacatgttttaaccgtctggatctgcctccctacccatccttttccatgctttatgaaaaactgttgacagcagttgaagaaaccagtacttttggacttgagtgacctggaagctgaatgcccatctctgtggacaggcagtttcagaagctgccttctagaagaatgattgaacattggaagtttcaagaggatgcttcctttaggataaagctacgtgctgttgttttccaggaacaagtgctctgtcacatttggggactggagatgagtcctcttggaaggatttgggtgagcttgatgcccagggaacaacccaaccgtctttcaatcaacagttcttgactgccaaactttttccatttgttatgttccaagacaaagatgaacccatacatgatcagctccacggtaatttttagggactcaggagaatcttgaaacttacccttgaacgtggttcaagccaaactggcagcatttggcccaatctccaaattagagcaagttaaataatataataaaagtaaatatatttcctgaaagtacattcatttaagccctaagttataacagaatattcatttcttgcttatgagtgcctgcatggtgtgcaccataggtttccgctttcatgggacatgagtgaaaatgaaaccaagtcaatatgaggtacctttacagatttgcaataagatggtctgtgacaatgtatatgcaagtggtatgtgtgtaattatggctaaagacaaaccattattcagtgaattactaatgacagattttatgctttataatgcatgaaaacaattttaaaataactagcaattaatcacagcatatcaggaaaaagtacacagtgagttctgtttattttttgtaggctcattatgtttatgttctttaagatgtatataagaacctacctatcatgctgtatgtatcactcattccattttcatgttccatgcatactcgggcatcatgctaatatgtatccttttaagcactctcaaggaaacaaaagggccttttatttttataaaggtaaaaaaaattccccaaatattttgcactgaatgtaccaaaggtgaagggacattacaatatgactaacagcaactccatcacttgagaagtataatagaaaatagcttctaaatcaaacttccttcacagtgccgtgtctaccactacaaggactgtgcatctaagtaataattttttaagattcactatatgtgatagtatgatatgcatttatttaaaatgcattagactctcttccatccatcaaatactttacaggatggcatttaatacagatatttcgtatttcccccactgctttttatttgtacagcatcattaaacactaagctcagttaaggagccatcagcaacactgaagagatcagtagtaagaattccattttccctcatcagtgaagacaccacaaattgaaactcagaactatatttctaagcctgcattttcactgatgcataattttcttattaatattaagagacagtttttctatggcatctccaaaactgcatgacatcactagtcttacttctgcttaattttatgagaaggtattcttcattttaattgcttttgggattactccacatctttgtttatttcttgactaatcagattttcaatagagtgaagttaaattgggggtcataaaagcattggattgacatatggtttgccagcctatgggtttacaggcattgcccaaacatttctttgagatctatatttataagcagccatggaattcctattatgggatgttggcaatcttacattttatagaggtcatatgcatagttttcataggtgttttgtaagaactgattgctctcctgtgagttaagctatgtttactactgggaccctcaagaggaataccacttatgttacactcctgcactaaaggcatgtactgcagtgtgaagaaatgttctgaaaaagggttatagaaatctggaaataagaaaggaagagctctctgtattctataattggaagagaaaaaaagaaaaacttttaactggaaatgttagtttgtacttattgatcatgaatacaagtatatatttaattttgc

SEQ ID NO: 56728 - DNA, 2404 bp, Homo Sapiens
ctggagaggatctacccgggtccctgcctggccagtggggaaacaccggtcccccaggcaccttcacctaaccagagcggggatttccaccgcccctcatgccgccctttggaggaaagtgaaagtgaaaggaggaagaggaggcttcatggctgaggaggtcgcagcgccatgaagtccctgtctctgctcctcgctgtggctttgggcctggcgaccgccgtctcagcaggacccgcggtgatcgagtgttggttcgtggaggatgcgagcggaaagggcctggccaagagacccggtgcactgctgttgcgccagggaccgggggaaccgccgccccggccggacctcgaccctgagctctatctcagtgtacacgaccccgcgggcgccctccaggctgccttcaggcggtatccccggggcgcccccgcaccacactgcgagatgagccgcttcgtgcctctccccgcctctgcgaaatgggccagcggcctgacccccgcgcagaactgcccgcgggccctggatggggcttggctgatggtcagcatatccagcccagtcctcagcctctccagcctcttgcgaccacagccagagcctcagcaggagcctgttctcatcaccatggcaacagtggtactgactgtcctcacccacacccctgcccctcgagtgagactgggacaagatgctctgctggacttgagctttgcctacatgccccccacctccgaggccgcctcatctctggctccgggtccccctccctttgggctagagtggcgacgccagcacctgggtaagggacatctgctcctggctgcaactcctgggctgaatggccagatgccagcagcccaagaaggggccgtggcatttgctgcttgggatgatgatgagccatggggcccatggaccggaaatgggaccttctggctgcctacagttcaaccctttcaggagggcacctatctggccaccatacacctgccatacctgcaaggacaggtcaccctggagcttgctgtgtacagtgagttgggggacagaggtctccaggggtagagggtgggcactggattgtggggaccgtaatagggggagggatgatggataagagggtgcctgggcaagtaagtagagatagaaagaggttcctgggagttagaggggtaatgggaggctagaagtttcctggaaatttgaggggctttgacatgggtatttctgtgacgcaccaatggagagacagtgggttccctatttcaggagaagaaacctaaccttctttagttctgaggaagccagcaggcaaactgagggtctcttagggaggacagtatggactgatttccctatgctcatttcgtcctctttccccagaaccccccaaagtgtccctgatgccagcaacccttgcacgggccgccccaggggaggcacccccggaattgctctgccttgtgtcccacttctacccttctgggggcctggaggtggagtgggaactccggggtggcccagggggccgctctcagaaggccgaggggcagaggtggctctcggccctgcgccaccattccgatggctctgtcagcctctctgggcacttgcagccgcccccagtcaccactgagcagcatggggcacgctatgcctgtcgaattcaccatcccagcctgcctgcctcggggcgcagcgctgaggtcaccctggaggtagcaggtaagagctgggagctctgcggaatctgagccagcacccaggaagacaggagctcactctcaccccttctgcctgccaggtctttcagggccctcccttgaggacagcgtaggccttttcctgtctgcctttcttctgcttgggctcttcaaggcactgggctgggctggtaagtgtcagccctaccctgaccatgacctgaggttggtggactttccccacctactcccaagagcctgacacccatccctctgccctccacctctaccactccagcatcccatcccttctcaatctttccccacagctgtctacctgtccacctgcaaggattcaaagaaggtacagtgctccacctctctgtatctttcccttgtcactttatctcctcatcctatctcaaaacccatggagggaggctgctggtgtggtaggcagaacctaggcttggaattcacactgatctgggttaaaacctggcactatatcctaactgtaggactctttgagcatgctacttaatctatatgtttccttgggtgtagggattttaaaaagttacttaggcagtgctgtccaatagaaagataatgcaagccacatatgtaaatttaaatactctagtactcacattaaaaaaataagcagaaacaggtaaaaaaaaaaaaaaaaa

SEQ ID NO: 56729 - DNA, 4428 bp, Homo Sapiens
aggtcacagagcagtgataactacctgccagtgtctcttaggagtgaggtacctggagttcggggaccccaacctgtgacaatgacagcagacaaattggttttctttgtgaatggcagaaaggtggtggagaaaaatgcagatccagagacaacccttttggcctacctgagaagaaagttggggctgagtggaaccaagctcggctgtggagaggggggctgcggggcttgcacagtgatgctctccaagtatgatcgtctgcagaacaagatcgtccacttttctgccaatgcctgcctggcccccatctgctccttgcaccatgttgcagtgacaactgtggaaggaataggaagcaccaagacgaggctgcatcctgtgcaggagagaattgccaaaagccacggctcccagtgcgggttctgcacccctggcatcgtcatgagtatgtacacactgctccggaatcagcccgagcccaccatggaggagattgagaatgccttccaaggaaatctgtgccgctgcacaggctacagacccatcctccagggcttccggacctttgccagggatggtggatgctgtggaggagatgggaataatccaaattgctgcatgaaccagaagaaagaccactcagtcagccactcgccatctttattcaaaccagaggagttcacgcccctggatccaacccaggagcccatttttcccccagagttgctgaggctgaaagacactcctcggaagcagctgcgatttgaaagggagcgtgtgacgtggatacaggcctcaaccctcaaggagctgctggacctcaaggctcagcaccctgacgccaagctggtcgtggggaacacggagattggcattgagatgaagttcaagaatatgctgtttcctatgattgtctgcccagcctggatccctgagctgaattcggtagaacatggacccgacggtatctcctttggagctgcttgccccctgagcattgtggaaaaaaccctggtggatgctgttgctaagcttcctgcccaaaagacagaggtgttcagaggggtcctggagcagctgcgctggtttgctgggaagcaagtcaagtctgtggcgtccgttggagggaacatcatcactgccagccccatctccgacctcaaccccgtgttcatggccagtggggccaagctgacactagtgtccagaggcaccaggagaactgtccagatggaccacaccttcttccctggctacagaaagaccctgctgagcccggaggagatactgctctccatagagatcccctacagcagggagggggagtatttctcagcattcaagcaggcctcccggagagaagatgacattgccaaggtaaccagtggcatgagagttttattcaagccaggaaccacagaggtacaggagctggccctttgctatggtggaatggccaacagaaccatctcagccctcaagaccactcagaggcagctttccaagctctggaaggaggagctgctgcaggacgtgtgtgcaggactggcagaggagctgcatctgcctcccgatgcccctggtggcatggtggacttccggtgcaccctcaccctcagcttcttcttcaagttctacctgacagtccttcagaagctgggccaagagaacctggaagacaagtgtggtaaactggaccccactttcgccagtgcaactttactgtttcagaaagaccccccagccgatgtccagctcttccaagaggtgcccaagggtcagtctgaggaggacatggtgggccggcccctgccccacctggcagcggacatgcaggcctctggtgaggccgtgtactgtgacgacattcctcgctacgagaatgagctgtctctccggctggtcaccagcacccgggcccacgccaagatcaagtccatagatacatcagaagctaagaaggttccagggtttgtttgtttcatttccgctgatgatgttcctgggagtaacataactggaatttgtaatgatgagacagtctttgcgaaggataaggttacttgtgttgggcatatcattggtgctgtggttgctgacaccccggaacacacacagagagctgcccaaggggtgaaaatcacctatgaagaactaccagccattatcacaattgaggatgctataaagaacaactccttttatggacctgagctgaagatcgagaaaggggacctaaagaaggggttttccgaagcagataatgttgtgtcaggggagatatacatcggtggccaagagcacttctacctggagactcactgcaccattgctgttccaaaaggcgaggcaggggagatggagctctttgtgtctacacagaacaccatgaagacccagagctttgttgcaaaaatgttgggggttccagcaaaccggattgtggttcgagtgaagagaatgggaggaggctttggaggcaaggagacccggagcactgtggtgtccacggcagtggccctggctgcatataagaccggccgccctgtgcgatgcatgctggaccgtgatgaggacatgctgataactggtggcagacatcccttcctggccagatacaaggttggcttcatgaagactgggacagttgtggctcttgaggtggaccacttcagcaatgtggggaacacccaggatctctctcagagtattatggaacgagctttattccacatggacaactgctataaaatccccaacatccggggcactgggcggctgtgcaaaaccaaccttccctccaacacggccttccggggctttggggggccccaggggatgctcattgccgagtgctggatgagtgaagttgcagtgacctgtgggatgcctgcagaggaggtgcggagaaaaaacctgtacaaagaaggggacctgacacacttcaaccagaagcttgagggtttcaccttgcccagatgctgggaagaatgcctagcaagctctcagtatcatgctcggaagagtgaggttgacaagttcaacaaggagaattgttggaaaaagagaggattgtgcataattcccaccaagtttggaataagcttcacagttccttttctgaatcaggcaggagccctacttcatgtgtacacagatggctctgtgctgctgacccacggggggactgagatgggccaaggccttcataccaaaatggtccaggtggccagtagagctctgaaaatccccacctctaagatttatatcagcgagacaagcactaacactgtgcccaacacctctcccacggctgcctctgtcagcgctgacctcaatggacaggccgtctatgcggcttgtcagaccatcttgaaaaggctggaaccctacaagaagaagaatcccagtggctcctgggaagactgggtcacagctgcctacatggacacagtgagcttgtctgccactgggttttatagaacacccaatctgggctacagctttgagactaactcagggaaccgcttccactacttcagctatggggtggcttgctctgaagtagaaatcgactgcctaacaggagatcataagaacctccgcacagatattgtcatggatgttggctccagtctaaaccctgccattgatattggacaggtggaaggggcatttgtccagggccttggcctcttcaccctagaggagctacactattcccccgaggggagcctgcacacccgtggccctagcacctacaagatcccggcatttggcagcatccccattgagttcagggtgtccctgctccgcgactgccccaacaagaaggccatctatgcatcgaaggctgttggagagccgcccctcttcctggctgcttctatcttctttgccatcaaagatgccatccgtgcagctcgagctcagcacacaggtaataacgtgaaggaactcttccgcctagacagccctgccaccccggagaagatccgcaatgcctgcgtggacaagttcaccaccctgtgtgtcactggtgtcccagaaaactgcaaaccctggtctgtgagggtctaaagagagagtcctcagcagagtcttcttgtgctgcctttgggcttccatggagcaggaggaacataccacagaacatggatctattaaagtcacagaatgacagacctgtgatttgtcaagatgggatttggaagacaagtgaatgcaatggaagattttgatcaaaaatgtaatttgtaaacacaatgataagcaaattcaaaactgttatgcctaaatggtgaatatgcaattaggatcattttctgtctgttttaatcatgtatctggaatagggtcgggaagggtttgtgctattccccacttactggacagcctgtataacctcaaaaaaaaaaaaaaaaa

SEQ ID NO: 56730 - DNA, 4931 bp, Homo Sapiens
gctcatcgtttgttgtttagataatatcatgaactgataaatgcagttgccacgttgattccctagggcctggcttaccgactgaggtcataagatattatgccttctctttagacttggtcagtggagaggaaatgggcaaagaaccagcctatggaggtgacaaggccttagggccaaaagtcttgagggtgaaggtttagggcctgcgcagcttccctgccatgccccgcaaggtctcgcattcgcaaggcttgtgacagtgggagcctcattacggactctcctaaagtccatggtgtcctcttttcgcatttgcgccccgtgggtgatgcccgatgccgcccttcccatcgctctcttccccttcaagcgtatcgcaactgcaaaaacacccagcacagacactccattttctatcttaatgcatttaactagcacaacctacaggttgttccatcccagagactacccttttctccatagacgtgaccatcaaccaaccagcggtcagaatcagtcagcctctgtcatgttcctaggtccttggcgaactggctgggcggggtcccagcagcctaggagtacagtggagcaatgcctgacgtaagtcaacaaagatcacgtgagacgaatcagtcgcctagattggctacaactaagtggttgggagcggggaggtcgcggcggctgcgtggggttcgcccgtgacacaattacaactttgtgctggtgctggcaaagtttgtgattttaagaaattctgctgtgctctccagcactgcgagcttctgccttccctgtagtttcccagatgtgatccaggtagccgagttccgctgcccgtgcttcggtagcttaagtctttgcctcagcttttttccttgcagccgctgaggaggcgataaaattggcgtcacagtctcaagcagcgattgaaggcgtcttttcaactactcgattaaggttgggtatcgtcgtgggacttggaaatttgttgtttccatgaaatcctgcgcagtgtcgctcactaccgccgctgttgccttcggtgatgaggcaaagaaaatggcggaaggaaaagcgagccgcgagagtgaagaggagtctgttagcctgacagtcgaggaaagggaggcgcttggtggcatggacagccgtctcttcgggttcgtgaggcttcatgaagatggcgccagaacgaagaccctactaggcaaggctgttcgctgctacgaatctttaatcttaaaagctgaaggaaaagtggagtctgacttcttttgccaattaggtcacttcaacctcttgttggaagattattcaaaagcattatctgcatatcagagatattacagtttacaggctgactactggaagaatgctgcgtttttatatggccttggtttggtctacttctactacaatgcatttcattgggcaattaaagcatttcaagatgtcctttatgttgaccccagcttttgtcgagccaaggaaattcatttacgacttgggctcatgttcaaagtgaacacagactacaagtctagtttaaagcattttcagttagccttgattgactgtaatccatgtactttgtccaatgctgaaattcaatttcatattgcccatttgtatgaaacccagaggaagtatcattctgcaaaggaggcatatgaacaacttttgcagacagaaaaccttcctgcacaagtaaaagcaactgtattgcaacagttaggttggatgcatcataatatggatctagtaggagacaaagccacaaaggaaagctatgctattcagtatctccaaaagtctttggaggcagatcctaattctggccaatcgtggtattttcttggaaggtgttattcaagtattgggaaagttcaggatgcctttatatcttacaggcaatctattgataaatcagaagcaagtgcagatacatggtgttcaataggtgtgttgtatcagcagcaaaatcagcctatggatgctttacaggcatatatttgtgctgtacaattggaccatgggcatgccgcagcctggatggacctaggtactctctatgaatcctgcaatcaacctcaagatgccattaaatgctacctaaatgcagctagaagcaaacgttgtagtaatacctctacgcttgctgcaagaattaaatttctacagaatggttctgataactggaatggtggccagagtctttcacatcatccagtacagcaagtttattcgttgtgtttgacaccacagaaattacagcacttggaacaactgcgagcaaatagagataatttaaatccagcacagaagcatcagctggaacagttagaaagtcagtttgtcttaatgcagcaaatgagacacaaagaagttgctcaggtacgaactactggaattcataacggggccataactgattcatcactgcctacaaactctgtctctaatcgacaaccacatggtgctctgaccagagtatctagcgtctctcagcctggagttcgccctgcttgtgttgaaaaacttttgtccagtggagctttttctgcaggctgtattccttgtggcacatcaaaaattctaggaagtacagacactatcttgctaggcagtaattgtatagcaggaagtgaaagtaatggaaatgtgccttacctgcagcaaaatacacacactctacctcataatcatacagacctgaacagcagcacagaagagccatggagaaaacagctatctaactccgctcaggggcttcataaaagtcagagttcatgtttgtcaggacctaatgaagaacaacctctgttttccactgggtcagcccagtatcaccaggcaactagcactggtattaagaaggcgaatgaacatctcactctgcctagtaattcagtaccacagggggatgctgacagtcacctctcctgtcatactgctacctcaggtggacaacaaggcattatgtttaccaaagagagcaagccttcaaaaaatagatccttggtgcctgaaacaagcaggcatactggagacacatctaatggctgtgctgatgtcaagggactttctaatcatgttcatcagttgatagcagatgctgtttccagtcctaaccatggagattcaccaaatttattaattgcagacaatcctcagctctctgctttgttgattggaaaagccaatggcaatgtgggtactggaacctgtgacaaagtgaataatattcacccagctgttcatacaaagactgatcattctgttgcctcttcaccctcttcagccatttccacagcaacaccttctcctaaatccactgagcagagaagcataaacagtgttaccagccttaacagtcctcacagtggattacacacagtcaatggagaggggctggggaagtcacagagctctacaaaagtagacctgcctttagctagccacagatctacttctcagatcttaccatcaatgtcagtgtctatatgccccagttcaacagaagttctgaaagcatgcaggaatccaggtaaaaatggcttgtctaatagctgcattttgttagataaatgtccacctccaagaccaccaacttcaccatacccacccttgccaaaggacaagttgaatccacccacacctagtatttacttggaaaataaacgtgatgctttctttcctccattacatcaattttgtacaaatccaaaaaaccctgttacagtaatacgtggccttgctggagctcttaaattagatcttggacttttctctaccaaaactttggtagaagctaacaatgaacatatggtagaagtgaggacacagttgctgcaaccagcagatgaaaactgggatcccactggaacaaagaaaatctggcgttgtgaaagcaatagatctcatactacaattgccaaatacgcacaataccaggcttcctccttccaggaatcattgagagaagaaaatgagaaaagaacacaacacaaagatcattcagataacgaatccacatcttcagagaattctggaaggagaaggaaaggaccttttaaaaccataaaatttgggaccaacattgacctctctgataacaaaaagtggaagttgcagttacatgaactgactaaacttcctgcttttgcgcgtgtggtgtcagcaggaaatcttctaacccatgttgggcataccattctgggcatgaatacagtacaactgtatatgaaagttccagggagtcggacaccaggtcaccaagaaaataacaacttctgctctgttaacataaatattggtccaggagattgtgaatggtttgttgtacctgaagattattggggtgttctgaatgacttctgtgaaaaaaataatttgaattttttaatgagttcttggtggcccaaccttgaagatctttatgaagcaaatgtccctgtgtatagatttattcagcgacctggagatttggtctggataaatgcaggcactgtgcattgggttcaagctgttggctggtgcaataacattgcctggaatgttggtccacttacagcctgccagtataaattggcagtggaacggtatgaatggaacaaattgaaaagtgtgaagtcaccagtacccatggtgcatctttcctggaatatggcacgaaatatcaaagtctcagatccaaagctttttgaaatgattaagtaagtgccttctgaaactgctgcagtttctctttgggggtattggtagccattcagtatttttttcaaaagaattctgttgacattaaatgatatcagcagtccagaagtcttggcaaaatgtaataagatgtaaataatcttatatattcataagtgttataaaatctcataagattaaaatattgccttcccttaaaaaaaaaa

SEQ ID NO: 56731 - DNA, 5975 bp, Homo Sapiens
ggacagcagcgggttaagtgccgcccgcgcggagacggctgagtccggagccgcggctccgagctcgcattcggatccgctagagcaggaagatggcgacggacggcgcgagctgcgagcccgacttgtcccgggccccggaggacgcggcgggggccgcggcggaggcggcgaaaaaagagtttgatgtggatactctcagtaaatccgagctgcggatgctcctcagcgtgatggaaggggagctggaggccagagaccttgtcatcgaggccctgcgggctcgcaggaaggaggtatttatccaggaacggtatgggagatttaatctaaatgacccgttcctggcactccagagagactatgaagcaggtgctggtgacaaagagaagaagccagtttgtaccaaccccctctccatccttgaagcagtcatggcccactgcaagaaaatgcaagaaaggatgtccgcacagctggctgctgctgagagcagacaaaagaagctggaaatggagaagcttcagctacaagcccttgagcaagagcacaagaagctggctgcccgccttgaggaagagcgtggcaagaacaagcaggtggtcctgatgctggtcaaagagtgcaagcagctctcaggcaaagtcatagaggaggcccagaagctcgaagacgtaatggccaaactggaagaggaaaagaaaaagacgaatgaattagaagaggaactctccgctgagaaacgaagaagcacagaaatggaagctcagatggaaaaacaactctctgagtttgacactgagcgggaacagcttcgtgccaagctgaaccgggaagaagcacacaccactgacctcaaagaggagatagacaagatgaggaaaatgattgagcaactgaaaaggggaagtgacagcaaaccaagcctctctcttccacggaagacaaaagataggcgtttggtttccatatctgtgggaacagaaggaactgtgacaaggtctgttgcatgccagacagacctagtgacagaaaatgctgaccacatgaaaaagttgcctttaaccatgcctgtaaaaccttccacagggagtcccctagtttctgcaaatgcaaaagggagcgtgtgcaccagtgccaccatggccagaccaggtattgacaggcaggcttcctatggtgacttgattggcgcttctgtacccgctttcccacctccaagtgcaaacaaaattgaggaaaatggaccaagcactggctcaacaccagatccaaccagtagcacacccccacttcccagtaacgctgcccctcccaccgctcaaacaccaggcatagctcctcagaactcgcaagctccacctatgcacagtttacattcaccatgtgccaacacctctttgcatccaggtctaaacccacgaatccaagcagctagatttagatttcagggcaatgctaacgacccagaccaaaatggaaatactacccaaagtcctccgtcaagagatgtctcgcctacaagtcgtgacaacctagtggccaaacaactagctcggaatactgtgacccaagcactgtcaagatttacaagccctcaagcaggtgctccctcaaggcctggagtgcccccaacaggggatgttggcacccaccctccagttggtcggaccagtttaaagactcatggtgtagcacgagttgacagaggaaatcctcctcctatccctccaaaaaagccagggctctcccaaactccttctccaccacacccccaactcaaggttattatagacagcagcagggcctcgaacacaggggccaaagttgataacaaaactgtggcttcgactccttccagtttgccacaagggaacagggtgatcaatgaggagaaccttcctaagtcatcctcccctcagctgccaccaaaaccatccatagatttaactgtggcacctgcaggctgtgccgtttcagccctggccacgtctcaggtgggtgcctggcctgctgcaacccccggactgaaccaacctgcatgttcagacagttcccttgtcattcctaccaccattgccttttgctcttccataaaccccgttagtgcctcatcctgtagaccaggtgcctcagacagcctcctggtaacagcatcaggctggtcaccctccctaacccctttgctaatgagtggtggtcctgcccccctggctggcaggcccacccttcttcagcaagctgctgcccagggaaatgtcactttattatcaatgctgcttaatgaagaaggactggacattaattactcctgtgaagatggccattctgccttgtattctgctgctaagaatggacatacagactgtgtgagattgctgctgagtgcagaagcccaagtcaatgctgctgataaaaatggcttcacacccttgtgtgctgcagctgctcagggacatttcgagtgtgtagaattattaatttcatatgatgctaacattaatcatgctgctgatggaggacagacacctctatacctggcctgtaaaaatggaaataaagaatgtattaaactcttgttggaagctggaaccaatcgaagtgtaaaaaccacagatggctggacaccagttcacgcagctgtggacactggtaatgtggacagcctcaagcttcttatgtaccatagaataccagctcatggaaattctttcaatgaggaggagtccgagtcaagtgtctttgacttggatggaggagaagagagtcctgaaggcatatccaagcctgttgttcctgcagacctcattaaccacgccaacagagaaggctggactgctgcccacattgctgcttccaaaggttttaagaactgcctagaaatcttgtgtaggcacggagggcttgagccagaaaggagagacaagtgcaatcggactgtgcatgatgttgccactgatgactgcaagcatttgctggagaatctgaatgctcttaaaatacccttaaggatttcagtgggtgagattgaaccaagcaactatggttctgatgacttggaatgtgaaaacacaatatgtgctttaaatatccgcaaacagacatcatgggatgatttttcaaaagcagtgagtcaagctctgacaaatcatttccaggcaatctcttctgatggatggtggagtctggaagacgtgacttgcaataacaccactgattccaacatcggcctcagtgcaagaagcatacgatccatcacgctaggaaatgtgccgtggtcagtgggtcagagcttcgcgcagtccccgtgggactttatgaggaagaataaggcagagcacatcactgtgcttttgtcaggtcctcaagaaggctgtctcagtagtgtgacttatgcctccatgatccctctccagatgatgcagaactacctcaggctggttgagcaatatcataatgtcattttccacggcccagaaggaagcttgcaagactacatagtacatcagcttgcactctgcctgaagcacagacaaatggctgcaggattctcctgtgaaatagtgagagctgaagtagatgctggtttttccaaggaacagctactagacctgttcattagtagcgcttgtctgatcccagtgaaacaatctcccagtaagaagaaaatcatcatcattttagaaaatttagaaaaatcttcactgtcggagttattgagggactttttggcacctcttgaaaatcgcagcactgaaagcccctgcactttccaaaaaggaaatggactgtccgaatgttattactttcatgagaactgctttctgatgggaaccatcgccaaggcctgtctccagggctccgacttgctggtgcagcagcatttccgctgggtgcagctgcggtgggatggcgagcccatgcaaggactgctgcagaggttcttacgaaggaaagttgtgaataagttcaaaggtcaggcgccctccccctgcgatcctgtgtgcaagattgtcgactgggctctgtccgtctggcgtcagcttaactcctgcctggcccgcttgggcacacctgaagcacttcttggaccaaaatatttcctgtcttgtcctgtagttcctgggcatgcccaagtgacagtgaagtggatgtctaagctgtggaatggcgtcatcgcacccagagttcaagaagcaatattgtcaagagcctctgtgaaaagacaacctggctttgggcagacaactgctaaaagacaccctagccaaggacagcaggctgtggtcaaagctgctctcagcatcttgctaaataaagctgtactgcatggctgtcccctccccagagcagagctagaccagcatacagctgatttcaaaggaggaagtttccctttatccatagtttccagttataacacttgtaacaagaagaaaggagagagtggtgcctggagaaaggtgaacaccagtcctcgcaggaagtctggccgcttctctttacccacctggaataagccagacctaagcactgaaggtatgaaaaataagactatatcacagctgaattgtaacaggaatgcttctctgtcaaaacaaaagtctttagagaatgatctatcactgacgttgaatttggatcagagactctctctgggttcagatgacgaagcagatcttgtcaaggaacttcagagcatgtgctccagcaagtctgagtctgatatcagcaagattgctgattccagggatgatttaaggatgtttgatagttctggaaacaaccctgtactttcagcaactattaataatctgagaatgccagtgtcacaaaaggaggtcagtcctctcagcagccatcaaactactgaatgcagcaacagtaaatcaaagactgagttgggtgtttcaagagttaaatcttttcttcctgttcctagaagtaaagtcacccagtgttcccagaacaccaaaagaagcagcagcagcagtaatacaaggcaaatagaaatcaacaacaactcaaaagaagtgaattggaacttacacaaaaatgaacacctagaaaaacctaacaaataggcctgcctacaatattctcattattaacttcctctatttcacacagaaaccaaggacaacaagatacaaatacctttaaattgataaaatgttttcactgtaatataaattatgagtgcgggaccactattcaatttttttttgtaaagaatgtatttataaccaacattttgttgcttttttttttaattctgtaggattgaacttcaataccaggaagttatgccaacttttcaagtagttttataatagaaaaattgtaatagttttaatcaagatgttcaggggtattaaaacagaactgtgtactgtatatctgtatatatgtatatatgtatgtatatttaaggaagtccagaaatcatactgcatacatgctacaaaaaagtagcaaaaaagtacaaagttggcttagataacttgtaccattttaaatggagatcataattttatgttcacttgatggggaatgactagaatggggcaataacaaatcatttctaaacagttattttccattaaaagccatattaagtattttgcttgttaaattctagttttatgttttaaatctcttagtggttacattgccatttggtagcatcatgtatatatttatgcttataagtttgcattatgactcctgtaaaatatgaaattataatgcaataaaagtgttatctttcttacaaaagttttgtacctaagtggatatagataactgcataaatgaataaattcagaattaactccttcaatatttctagtagcacaactgataatattgatattttctacaaatgttacttctaaaattacagacaaaattacttacacaattcagttaagatgctttgacactgaataaaatattgatttcatgaaaaaaaa

SEQ ID NO: 56732 - DNA, 3949 bp, Homo Sapiens; identical to SEQ ID NO: 25266

SEQ ID NO: 56733 - DNA, 2880 bp, Homo Sapiens; identical to SEQ ID NO: 29421

SEQ ID NO: 56734 - DNA, 3127 bp, Homo Sapiens; identical to SEQ ID NO: 29058

SEQ ID NO: 56735 - DNA, 2910 bp, Homo Sapiens
acttgaggagtcgactgagagctttatctttgcccctgtgacgggtggcctgtggtttcctgccaacaactcctgtttccggaggcccaacaaggcccacgcagagccaggaggggcagtggggctgggcctgggtggccccaccagccccgccccatctatctttgggaatttatttgtccatgggcgaggctggcctgcagtctgttgccttccaggggccaagagctgctctgatcacccagggattctctctccaacccaagtgcctccagctgacctctggctcctgtcctctggctccacctgcaccgccctgctcttcctaaggggccaggaagcccccagaagctctaccatcgacgtgggtggtggcacccggctcaccctgagagcagaggccgtgcagggggctcagttctgagccccagccggcccaccatggcacggcggttccaggaggagctggccgccttcctcttcgagtatgacaccccccgcatggtgctggtgcgtaataagaaggtgggcgttatcttccgactgatccagctggtggtcctggtctacgtcatcgggtgggtgtttctctatgagaagggctaccagacctcgagcggcctcatcagcagtgtctctgtgaaactcaagggcctggccgtgacccagctccctggcctcggcccccaggtctgggatgtggctgactacgtcttcccagcccagggggacaactccttcgtggtcatgaccaatttcatcgtgaccccgaagcagactcaaggctactgcgcagagcacccagaagggggcatatgcaaggaagacagtggctgtacccctgggaaggccaagaggaaggcccaaggcatccgcacgggcaagtgtgtggccttcaacgacactgtgaagacgtgtgagatctttggctggtgccccgtggaggtggatgacgacatcccgcgccctgcccttctccgagaggccgagaacttcactcttttcatcaagaacagcatcagctttccacgcttcaaggtcaacaggcgcaacctggtggaggaggtgaatgctgcccacatgaagacctgcctctttcacaagaccctgcaccccctgtgcccagtcttccagcttggctacgtggtgcaagagtcaggccagaacttcagcaccctggctgagaagggtggagtggttggcatcaccatcgactggcactgtgacctggactggcacgtacggcactgcagacccatctatgagttccatgggctgtacgaagagaaaaatctctccccaggcttcaacttcaggtttgccaggcactttgtggagaacgggaccaactaccgtcacctcttcaaggtgtttgggattcgctttgacatcctggtggacggcaaggccgggaagtttgacatcatccctacaatgaccaccatcggctctggaattggcatctttggggtggccacagttctctgtgacctgctgctgcttcacatcctgcctaagaggcactactacaagcagaagaagttcaaatacgctgaggacatggggccaggggcggctgagcgtgacctcgcagctaccagctccaccctgggcctgcaggagaacatgaggacatcctgatgctcgggccccaactcctgactgggtgcagcgtgaggcttcagcctggagccctggtgggtcccagccagggcagaggggcctccccaggaagtctcctaccctctcagccaggcagagagcagtttgccagaagctcagggtgcatagtaggagagacctgtgcaaatctgagctccggctccgaccccacacaccctgagggagccctaccctagcctcagccgctcctggtggggaatggctggggctgggcaggaccctcccacacacctgcaccctagcttcgtgcttctctctccggactctcattatccaacccgctgcctccatttctctagatctgtgctctccgatgtggcagtcagtaaccataggtgactaaattaaactaaaataaaatagaatgaaacacaaaattcaattcctcggctgaactagccacatttcaactgctcagtagatacgtgtggttagtggctgccatactggacagctcggggcattttcactgtcaaagaaagttctattagacagccctgcttgagccctgtttcttcctggccttcggtttccctggggaacttatcgacaatgcaagctcctgggcccacccccagacctcctgaaccaaaagctccagggctggccgtatgatctgtgtggatggcaaactccccaggccattctgggacctaagtttaagaagtgccgtcctcgaactttctgactctaagctcctgagcgggagtcagacttagccctgagcctgcacttcctgttcaggtgcagacactgaacagggtctcaaacaccttcagcatgtgtgttgtgtgctcacgtgccacacagtgtctcatgcacacaacccagtgtacacaccacctacgtgcacacagcatccttccacactgtgtatgtgaacagcttgggccctgcaaacacaaccatctacacacatctacacccccaagcacacacacatggtccgtgccatgtcacctccatagggaaaggcttctctccaagtgtgccaggccaggacagccctcccagccatgaatccttactcagctacctcgggttggggtgggagccccagccaaatcctgggctccctgcctgtggctcagccccagctcccaaggcctgcctggctctgtctgaacagaaggtctgggggaagcgacgggtggagtacaataaagggaatgaggacaaacaaaaaaaaaaaaaaaaaaaaaaaaaaaaaaaaaaaaaaaaaaaaaa

SEQ ID NO: 56736 - DNA, 3855 bp, Homo Sapiens
caagctgggaggaccaaggccgggcagccgggagcacccaaggcaggaaaatgaggtggctgcttctctattatgctctgtgcttctccctgtcaaaggcttcagcccacaccgtggagctaaacaatatgtttggccagatccagtcgcctggttatccagactcctatcccagtgattcagaggtgacttggaatatcactgtcccagatgggtttcggatcaagctttacttcatgcacttcaacttggaatcctcctacctttgtgaatatgactatgtgaaggtagaaactgaggaccaggtgctggcaaccttctgtggcagggagaccacagacacagagcagactcccggccaggaggtggtcctctcccctggctccttcatgtccatcactttccggtcagatttctccaatgaggagcgtttcacaggctttgatgcccactacatggctgtggatgtggacgagtgcaaggagagggaggacgaggagctgtcctgtgaccactactgccacaactacattggcggctactactgctcctgccgcttcggctacatcctccacacagacaacaggacctgccgagtggagtgcagtgacaacctcttcactcaaaggactggggtgatcaccagccctgacttcccaaacccttaccccaagagctctgaatgcctgtataccatcgagctggaggagggtttcatggtcaacctgcagtttgaggacatatttgacattgaggaccatcctgaggtgccctgcccctatgactacatcaagatcaaagttggtccaaaagttttggggcctttctgtggagagaaagccccagaacccatcagcacccagagccacagtgtcctgatcctgttccatagtgacaactcgggagagaaccggggctggaggctctcatacagggctgcaggaaatgagtgcccagagctacagcctcctgtccatgggaaaatcgagccctcccaagccaagtatttcttcaaagaccaagtgctcgtcagctgtgacacaggctacaaagtgctgaaggataatgtggagatggacacattccagattgagtgtctgaaggatgggacgtggagtaacaagattcccacctgtaaaattgtagactgtagagccccaggagagctggaacacgggctgatcaccttctctacaaggaacaacctcaccacatacaagtctgagatcaaatactcctgtcaggagccctattacaagatgctcaacaataacacaggtatatatacctgttctgcccaaggagtctggatgaataaagtattggggagaagcctacccacctgccttccagagtgtggtcagccctcccgctccctgccaagcctggtcaagaggatcattgggggccgaaatgctgagcctggcctcttcccgtggcaggccctgatagtggtggaggacacttcgagagtgccaaatgacaagtggtttgggagtggggccctgctctctgcgtcctggatcctcacagcagctcatgtgctgcgctcccagcgtagagacaccacggtgataccagtctccaaggagcatgtcaccgtctacctgggcttgcatgatgtgcgagacaaatcgggggcagtcaacagctcagctgcccgagtggtgctccacccagacttcaacatccaaaactacaaccacgatatagctctggtgcagctgcaggagcctgtgcccctgggaccccacgttatgcctgtctgcctgccaaggcttgagcctgaaggcccggccccccacatgctgggcctggtggccggctggggcatctccaatcccaatgtgacagtggatgagatcatcagcagtggcacacggaccttgtcagatgtcctgcagtatgtcaagttacccgtggtgcctcacgctgagtgcaaaactagctatgagtcccgctcgggcaattacagcgtcacggagaacatgttctgtgctggctactacgagggcggcaaagacacgtgccttggagatagcggtggggcctttgtcatctttgatgacttgagccagcgctgggtggtgcaaggcctggtgtcctgggggggacctgaagaatgcggcagcaagcaggtctatggagtctacacaaaggtctccaattacgtggactgggtgtgggagcagatgggcttaccacaaagtgttgtggagccccaggtggaacggtgagctgacttacttcctcggggcctgcctcccctgagcgaagctacaccgcacttccgacagcacactccacattacttatcagaccatatggaatggaacacactgacctagcggtggcttctcctaccgagacagcccccaggaccctgagaggcagagtgtggtatagggaaaaggctccaggcaggagacctgtgttcctgagcttgtccaagtctctttccctgtctgggcctcactctaccgagtaatacaatgcaggagctcaaccaaggcctctgtgccaatcccagcactcctttccaggccatgcttcttaccccagtggcctttattcactcctgaccacttatcaaacccatcggtcctactgttggtataactgagcttggacctgactattagaaaatggtttctaacattgaactgaatgccgcatctgtatattttcctgctctgccttctgggactagccttggcctaatccttcctctaggagaagagcattcaggttttgggagatggctcatagccaagcccctctctcttagtgtgatcccttggagcaccttcatgcctggggtttctctcccaaaagcttcttgcagtctaagccttatcccttatgttccccattaaaggaatttcaaaagacatggagaaagttgggaaggtttgtgctgactgctgggagcagaatagccgtgggaggcccaccaagcccttaaattcccattgtcaactcagaacacatttgggcccatatgccaccctggaacaccagctgacaccatgggcgtccacacctgctgctccagacaagcacaaagcaatctttcagccttgaaatgtattatctgaaaggctacctgaagcccaggcccgaatatggggacttagtcgattacctggaaaaagaaaagacccacactgtgtcctgctgtgcttttgggcaggaaaatggaagaaagagtggggtgggcacattagaagtcacccaaatcctgccaggctgcctggcatccctggggcatgagctgggcggagaatccaccccgcaggatgttcagagggacccactccttcatttttcagagtcaaaggaatcagaggctcacccatggcaggcagtgaaaagagccaggagtcctgggttctagtccctgctctgcccccaactggctgtataacctttgaaaaatcattttctttgtctgagtctctggttctccgtcagcaacaggctggcataaggtcccctgcaggttccttctagctggagcactcagagcttccctgactgctagcagcctctctggccctcacagggctgattgttctccttctccctggagctctctctcctgaaaatctccatcagagcaaggcagccagagaagcccctgagagggaatgattgggaagtgtccactttctcaaccggctcatcaaacacactcctttgtctatgaatggcacatgtaaatgatgttatattttgtatcttttatatcatatgcttcaccattctgtaaagggcctctgcattgttgctcccatcaggggtctcaagtggaaataaaccctcgtggataaccaaaaaaaaaaaaaaaaaaaa

SEQ ID NO: 56737 - DNA, 1983 bp, Homo Sapiens
ggggcggggcgcgctacccgcagcccccggagctcggctaactcggcgcccagtgcacggccgcaccatggggtcccgccacttcgaggggatttatgaccacgtggggcacttcggcagattccagagagtcctctatttcatatgtgccttccagaacatctcttgtggtattcactacttggcttctgtgttcatgggagtcacccctcatcatgtctgcaggcccccaggcaatgtgagtcaggttgttttccataatcactctaattggagtttggaggacaccggggccctgttgtcttcaggccagaaagattatgttacggtgcagttgcagaatggtgagatctgggagctctcaaggtgtagcaggaataagagggagaacacatcgagtttgggctatgaatacactggcagtaagaaagagtttccttgtgtggatggctacatatatgaccagaacacatggaaaagcactgcggtgacccagtggaacctggtctgtgaccgaaaatggcttgcaatgctgatccagcccctatttatgtttggagtcctactgggatcggtgacttttggctacttttctgacaggctaggacgccgggtggtcttgtgggccacaagcagtagcatgtttttgtttggaatagcagcggcgtttgcagttgattattacaccttcatggctgctcgcttttttcttgccatggttgcaagtggctatcttgtggtggggtttgtctatgtgatggaattcattggcatgaagtctcggacatgggcgtctgtccatttgcattccttttttgcagttggaaccctgctggtggctttgacaggatacttggtcaggacctggtggctttaccagatgatcctctccacagtgactgtcccctttatcctgtgctgttgggtgctcccagagacacctttttggcttctctcagagggacgatatgaagaagcacaaaaaatagttgacatcatggccaagtggaacagggcaagctcctgtaaactgtcagaacttttatcactggacctacaaggtcctgttagtaatagccccactgaagttcagaagcacaacctatcatatctgttttataactggagcattacgaaaaggacacttaccgtttggctaatctggttcactggaagtttgggattctactcgttttccttgaattctgttaacttaggaggcaatgaatacttaaacctcttcctcctgggtgtagtggaaattcccgcctacaccttcgtgtgcatcgccatggacaaggtcgggaggagaacagtcctggcctactctcttttctgcagtgcactggcctgtggtgtcgttatggtgatcccccagaaacattatattttgggtgtggtgacagctatggttggaaaatttgccatcggggcagcatttggcctcatttatctttatacagctgagctgtatccaaccattgtaagatcgctggctgtgggaagcggcagcatggtgtgtcgcctggccagcatcctggcgccgttctctgtggacctcagcagcatttggatcttcataccacagttgtttgttgggactatggccctcctgagtggagtgttaacactaaagcttccagaaacccttgggaaacggctagcaactacttgggaggaggctgcaaaactggagtcagagaatgaaagcaagtcaagcaaattacttctcacaactaataatagtgggctggaaaaaacggaagcgattacccccagggattctggtcttggtgaataaatgtgccatgcctgctgtctagcacctgaaatattatttaccctaatgcctttgtattagaggaatcttattctcatctcccatatgttgtttgtatgtctttttaataaattttgtaagaaaattttaaagcaaatatgttataaaagaaataaaaactaagatgaaaaaaaaaaaaaaaa

SEQ ID NO: 56738 - DNA, 10434 bp, Homo Sapiens
atggcgaaccggcgagtggggcgaggctgctgggaagtgagcccgaccgagcggaggccgcccgcggggctgcggggccccgcggccgaggaggaggcgtcttccccgccggtcctgtctctcagccacttctgcaggtctcctttcctttgcttcggggacgttctcctgggagcctcacggacgctgtctctggccctagacaaccctaacgaggaggtggcagaagtgaagatctcccacttcccggccgcggacctgggcttcagtgtgtcgcagcgctgtttcgtgttgcagcctaaagagaaaattgttatttctgttaactggacaccactcaaagaaggccgagtaagagagattatgacatttcttgtaaatgatgttctgaaacaccaagctatattactaggaaatgcagaagagcagaaaaagaaaaagaggagtctttgggataccattaaaaagaagaaaatttcagcctctacaagtcacaacagaagggtttcaaatattcagaatgttaataaaacatttagtgtttcccaaaaagttgacagagttaggagcccactacaagcttgtgaaaacttggctatgaatgaaggcggtcccccaacagaaaacaattctttaatacttgaagaaaataaaatacccatatcacctattagccctgctttcaatgaatgccatggtgcaacttgcttgccactctctgtacgtcgatctactacctactcatctcttcatgcatcagaaaatagggaactattaaatgtacacagtgccaacgtttcaaaagtttcttttaatgagaaagctgtaactgaaacttcctttaattctgtaaatgttaatggccaaagaggagagaatagtaaacttagtcttacccccaactgttcttcaactttgaacattacacaaagccaaatacattttctaagtccagattcttttgtaaataatagtcatggagctaataatgaactagaattagtaacatgtctttcatcagatatgtttatgaaagataattcacagcctgtgcatttggaatcaacaattgcacatgaaatttatcagaaaattttaagtccagattctttcataaaagataattatggactaaatcaggatctagaatcagagtcagttaatcctattttatcccctaatcaatttttaaaagataacatggcatatatgtgtacatctcagcaaacatgtaaagtaccattatcaaatgaaaattctcaagtcccacagtctcctgaagattggagaaaaagtgaagtttcgccacgtattcctgaatgtcagggttcaaaatctcccaaagctatttttgaagaactagtagaaatgaagtcaaattactacagttttataaaacaaaataatcctaaattttctgcagttcaggatatttctagtcatagccacaataaacaacctaagagacgtccaatactttctgccactgttactaaaaggaaggccacctgtaccagagaaaaccaaactgagattaataaaccaaaagcaaaaagatgtctcaacagtgcagtgggtgaacatgaaaaagtaataaataatcaaaaggaaaaagaagattttcattcttatcttccaattatagatccaatattaagtaaatctaagagttataaaaacgaggtaacaccctcttcgacaacagcttcagttgctcggaaaagaaagagcgatggaagcatggaagatgcaaatgtgagagttgcaattacagaacatacagaagtgcgagaaatcaaaagaatccatttttctccctcagagcctaaaacatcagctgttaagaaaacaaaaaatgtgacaacacccatctcaaaacgtattagcaacagagagaaattaaacctgaagaagaaaactgatttatcaatattcagaactccaatttctaaaacaaacaaaaggacaaaacccattatcgctgtggcacagtccagtttgaccttcataaaaccattaaaaacagatattcccagacacccgatgccatttgctgcaaaaaacatgttttatgatgaacgctggaaggaaaagcaggaacagggcttcacttggtggttaaattttatattaacccctgatgacttcactgtaaaaacaaatatttctgaagtaaatgctgctactcttcttttgggaatagagaatcaacataaaataagtgttcctagagcacctacaaaagaggaaatgtctctcagagcttatactgctcggtgtaggttaaacagactacgtcgtgcagcatgccgtttgtttacttctgaaaaaatggttaaagctattaaaaagcttgaaattgaaattgaagctaggcggttaattgttcgaaaagatagacacctatggaaagatgtgggagaacgtcagaaagtcctgaattggctgttgtcctacaatcctttgtggcttcgaattggtctagagacaacttatggagaactcatatctttggaagataacagtgatgtcacagggttggctatgtttattctgaatcgcctactttggaatcctgatatagcagctgagtatagacaccccactgttcctcacctgtatagagatggtcatgaagaagctttgtccaagtttacattgaaaaagttattgttgttggtctgttttcttgattatgctaaaatttccagactcattgatcatgatccttgtctcttctgtaaagatgccgaattcaaggctagtaaagaaatccttttggctttttcacgagatttcctaagtggtgaaggtgacctttcccgtcaccttggcttattgggattacctgttaaccatgttcagacaccatttgatgaatttgattttgccgttacaaatcttgccgtagacttgcaatgtggagtgcgccttgtgcgaaccatggaacttctcacacagaactgggacctctcaaagaaactcaggattccggcaataagtcgtcttcaaaagatgcacaatgttgacattgttcttcaagttcttaaatcacgaggaattgaattaagtgatgagcatggaaatacaattctatctaaggatattgtggataggcacagagaaaaaactctcaggttgctttggaaaatagcgtttgcttttcaggtggatatttcccttaacttagatcaattaaaggaagaaattgcctttctaaaacacacaaagagtataaagaaaacaatatctctactatcatgccattctgatgatcttattaataagaaaaaaggcaaaagggatagtggttcctttgaacaatatagtgaaaacataaagttattgatggattgggtaaatgctgtttgtgccttctataataaaaaggtggagaattttacagtgtctttctcagacggccgtgtgttatgttacctgatccaccattaccatccttgctatgtgccatttgacgctatatgtcagcgtactactcaaactgtggaatgtacgcaaactggttcagtggtattaaattcatcatctgaatctgatgacagttctctggatatgtcacttaaagcatttgatcatgaaaatacttcagagctatacaaagagctcctagaaaatgaaaagaaaaattttcacttggttaggtctgcagttagagaccttggtggaatacctgctatgattaatcattcagatatgtcaaatacaattccagatgaaaaggtggttattacctatttgtcatttctttgtgcaaggcttttggatcttcgtaaagaaataagagctgctcgactcatacaaacaacatggagaaaatataaactaaaaacagatctcaaacgccatcaggagagagagaaagctgcaagaattattcaattggctgtaatcaattttctagcaaaacaaagattgagaaaaagagttaatgcagcactcgtcattcagaaatattggcgaagagtcttagcacagagaaaattattaatgttaaaaaaggaaaagctggaaaaagttcaaaataaagcagcatcacttattcagggatattggagaagatattccactagacaaagatttctgaaattgaaatattattcaatcatcctgcaatctaggataagaatgataattgctgttacatcttataaacgatatctttgggctacagttacaattcagaggcattggcgtgcttatttaagaagaaaacaagatcaacaaagatatgaaatgctaaaatcatcaactcttataatccaatctatgttcagaaaatggaagcaacgtaaaatgcaatcacaagtaaaagctacagtaatattgcaaagagcttttagagaatggcatttaagaaaacaagctaaagaagaaaattctgctattatcatacaatcatggtatagaatgcataaagaattacggaagtatatttatattagatcttgtgttgttatcattcagaaaagatttcggtgctttcaagcccaaaagttatataaaagaagaaaagagtccatactaaccatccagaagtactacaaagcatatctgaaaggaaagattgagcgcaccaactatttgcagaaacgagctgcagccattcaattacaagctgcttttaggagactgaaagctcataatttatgtagacaaattagagctgcttgtgttattcagtcatactggagaatgagacaagacagagttcgatttttaaaccttaagaagactattatcaaatttcaggcacatgtaagaaaacatcaacaacgacagaaatataagaagatgaagaaagcagctgttataattcagactcatttccgagcttatatttttgccatgaaagttctagcatcttaccagaaaacacgctctgctgtcattgtgctgcagtctgcatatagagggatgcaagccaggaaaatgtatattcacatcctcacatctgttataaagattcaatcatattatcgtgcttatgtttctaaaaaggaatttttgagcctaaaaaatgctacaataaaattgcagtcaactgttaagatgaaacaaacacgtaaacaatatttgcatttaagagcagctgcactatttatccagcaatgttaccgttccaaaaaaatagctgcacaaaagagagaagagtatatgcagatgcgggaatcttgtatcaaactgcaagcatttgttagaggataccttgtccgaaagcagatgaggttacaaagaaaagctgttatttcactacagtcttatttcagaatgagaaaggctcggcagtattatctgaaaatgtataaagcaattattgtcattcagaattactatcatgcatacaaagcacaggtcaatcagaggaagaacttcttgcaagtcaaaaaagcagctacttgcttgcaagcagcttacagaggttataaagtacgccagctaatcaaacaacaatctatagctgctcttaaaattcagtctgcttttagaggctataataaaagggtaaaatatcaatctgtgcttcaatctataataaagattcagagatggtacagggcgtacaagactcttcatgatacaagaacacattttttgaagacaaaggcagctgtgatttccctccagtctgcttatcgtggctggaaggttcggaaacagattagaagggaacatcaagctgccttgaagattcagtctgcttttagaatggccaaggcccagaaacagtttagattgtttaaaacagcagcattagtcatccagcaaaatttcagagcatggactgcaggaaggaagcaatgtatggagtatattgaactccgtcatgcggtactggtgcttcaatctatgtggaagggaaaaacactgagaagacagcttcaaaggcaacataaatgtgctatcatcatacagtcatactatagaatgcatgtgcaacaaaagaagtggaaaatcatgaaaaaagctgctcttctgattcaaaagtattatagggcttacagtattggaagagaacagaatcatttatatttgaaaacaaaagcagctgtagtaactttacagtcagcttatcgtggtatgaaagtgagaaaaagaataaaggattgcaacaaagcagcagtcactatacagtctaaatacagagcttacaaaaccaaaaagaaatatgcaacctatagagcttcagctattataattcagagatggtatcgaggtattaaaattacaaaccatcagcataaggagtatcttaatttgaagaagacagcaattaaaatccaatctgtttatagaggtattagagttagaagacatattcaacacatgcacagggcagccacttttattaaagccatgtttaaaatgcatcagtcaagaataagttaccatacaatgagaaaagcagctattgttattcaagtaagatgtagagcatattatcaaggtaaaatgcagcgtgaaaagtacctgacaattttgaaagctgttaaagtccttcaggcaagttttagaggagtaagagttagacggactcttagaaagatgcagactgcagcaacactcattcagtcaaactacagaagatacagacagcaaacatactttaataagttaaagaaaataacaaaaacagtacagcaaagatactgggcaatgaaagaaagaaacatacaatttcaaaggtataacaaactgaggcattctgtaatatacattcaggctatttttaggggaaagaaagctagaagacatttaaaaatgatgcatatagccgcaactctcattcagaggagatttagaactctaatgatgagaagaagattcctctctctcaagaaaactgctattttgattcagagaaaatatcgggcacatctttgtacaaagcatcacttacagttccttcaggtacaaaatgcagttattaaaatccagtcatcatacagaagatggatgataaggaaaaggatgcgagagatgcacagggctgctactttcatccagtctactttcagaatgcacagattacatatgagatatcgagctttgaaacaggcctccgttgtgatccaacagcaataccaagcaaatagagctgcaaaactgcagaggcagcattatctcagacaaagacactctgctgtgatccttcaggctgcattcaggggtatgaaaactagaagacatttgaagagtatgcattcctctgcaacccttattcagagtaggtttagatcattactggtgaggagaagattcatttccctcaaaaaagctactatttttgttcagaggaaatatcgagccaccatttgtgccaaacataaattgtaccaattcttgcacttaagaaaggcagccattacaatacagtcatcttacagaagactgatggtaaagaagaagttacaagaaatgcaaagggctgcagttctcattcaggctactttcaggatgcacagaacatatattacatttcagacttggaaacatgcttcaattctaattcagcaacattatcgaacatatagagctgcaaaattgcaaagagaaaattatatcagacaatggcattctgctgtggttattcaggctgcatataaaggaatgaaagcaagacaacttttaagggaaaaacacaaagcttctatcgtaatacaaagcacctacagaatgtataggcagtattgtttctaccaaaagcttcagtgggctacaaaaatcatacaagaaaaatatagagcaaataaaaagaaacagaaagtatttcaacacaatgaacttaagaaagagacttgtgttcaggcaggttttcaggacatgaacataaaaaaacagattcaggaacagcaccaggctgccattattattcagaagcattgtaaagcctttaaaataaggaagcattatctccaccttagagcaacagtagtttctattcaaagaagatacagaaaactaactgcagtgcgtacccaagcagttatttgtatacagtcttattacagaggctttaaagtacgaaaggatattcaaaatatgcaccgggctgccacactaattcagtcattctatcgaatgcacagggccaaagttgattatgaaacaaagaaaactgcaattgtggttatacagaattattataggttgtatgttagagtaaaaacagaaagaaaaaactttttagcagttcagaaatctgtacgaactattcaggctgcttttagaggcatgaaagttagacaaaaattgaaaaatgtatcagaggaaaagatggcagccattgttaaccaatctgcactctgctgttacagaagtaaaactcagtatgaagctgttcaaagtgaaggtgttatgattcaagagtggtataaagcttctggccttgcttgttcacaggaagcagagtatcattctcaaagtagggctgcagtaacaattcaaaaagctttttgtagaatggtcacaagaaaactggaaacacagaaatgtgctgccctacggattcagttcttccttcagatggctgtgtatcggagaagatttgttcagcagaaaagagctgctatcactttacagcattattttaggacgtggcaaaccagaaaacagtttttactatatagaaaagcagcagtggttttacaaaatcactacagagcatttctgtctgcaaaacatcaaagacaagtctatttacagatcagaagcagtgttatcattattcaagctagaagtaaaggatttatacagaaacggaagtttcaggaaattaaaaatagcaccataaaaattcaggctatgtggaggagatatagagccaagaaatatttatgtaaagtgaaagctgcctgcaagattcaagcctggtatagatgttggagagcacacaaagaatatctagctatattaaaagctgttaaaattattcaaggttgcttctataccaaactagagagaacacggtttttgaatgtgagagcatcagcaattatcattcagagaaaatggagagctatacttcctgcaaagatagctcatgaacacttcttaatgataaaaagacatcgagctgcttgtttgatccaagcacattatagaggatataaaggaaggcaggtctttcttcggcagaaatctgctgctttgatcatacaaaaatatatacgagccagggaggctggaaagcatgaaaggataaaatatattgaatttaaaaaatctacagttatcctacaagcactggtgcgtggttggctagtacgaaaaagatttttagaacagagagccaaaattcgacttcttcacttcactgcagctgcatattatcacctgaatgctgttagaattcaaagagcctataaactttacctggctgtgaagaatgctaacaagcaggttaattcagtcatctgtattcagagatggtttcgagcaagattacaagaaaagagatttattcagaaatatcatagcatcaaaaagattgagcatgaaggtcaagaatgtctgagccagcgaaatagggctgcatcagtaatacagaaagcagtgcgccattttctcctccgtaaaaagcaggaaaaattcactagtggaatcattaaaattcaggcattatggagaggctattcttggaggaagaaaaatgattgtacaaaaattaaagctatacgactaagtcttcaagttgttaatagggagattcgagaagaaaacaaactctacaaaagaactgcacttgcacttcattaccttttgacatataagcacctttctgccattcttgaggccttaaaacacctagaggtagttactagattgtctccactttgttgtgagaacatggcccagagtggagcaatttctaaaatatttgttttgatccgaagttgtaatcgcagtattccttgtatggaagtcatcagatatgctgtgcaagtcttgcttaatgtatctaagtatgagaaaactacttcagcagtttatgatgtagaaaattgtatagatatactattggagcttttgcagatataccgagaaaagcctggtaataaagttgcagacaaaggcggaagcatttttacaaaaacttgttgtttgttggctattttactgaagacaacaaatagagcctctgatgtacgaagtaggtccaaagttgttgaccgtatttacagtctctacaaacttacagctcataaacataaaatgaatactgaaagaatactttacaagcaaaagaagaattcttctataagcattccttttatcccagaaacacctgtaaggaccagaatagtttcaagacttaagccagattgggttttgagaagagataacatggaagaaatcacaaatcccctgcaagctattcaaatggtgatggatacgcttggcattccttattag

SEQ ID NO: 56739 - DNA, 9123 bp, Homo Sapiens
agcgaagcggaggcataagcagagaggattctggaaaggtctctttgttttcttatccacagagaaagaaagaaaaaaaattgtaactaatttgtaaacctctgtggtcaaaaaaaaaaaaaaaaaaaaagctgaacagctgccagaggaagacacgttataccctaaccatcttggatgctgggctttgttatgctgtaattcataaggctctgttttatcagagattatggagcaagaaaactgaagccaagccacatcaaggtttgacagggatgagatacctgtcaaggattcatagtagagtggcttactgggaaaggagcaaagaatctcttctagggatattgtaagaataaatgagataattcacagaagggacctggagcttttccggaaaaaggtgctgtgactatctaaggtaattcgtatgcaagaagctacacgtaattaaatgtgcaggatgaaaagatggcacaggcactgttggtacccccaggacctgaaagcttccgcctttttactagagaatctcttgctgctatcgaaaaacgtgctgcagaagagaaagccaagaagcccaaaaaggaacaagataatgatgatgagaacaaaccaaagccaaatagtgacttggaagctggaaagaaccttccatttatttatggagacattcctccagagatggtgtcagagcccctggaggacctggatccctactatatcaataagaaaacttttatagtaatgaataaaggaaaggcaattttccgattcagtgccacctctgccttgtatattttaactccactaaaccctgttaggaaaattgctatcaagattttggtacattctttattcagcatgcttatcatgtgcactattttgaccaactgtgtatttatgaccttgagcaaccctcctgactggacaaagaatgtagagtacacattcactggaatctatacctttgagtcacttataaaaatcttggcaagagggttttgcttagaagattttacgtttcttcgtgatccatggaactggctggatttcagtgtcattgtgatggcatatgtgacagagtttgtggacctgggcaatgtctcagcgttgagaacattcagagttctccgagcactgaaaacaatttcagtcattccaggtttaaagaccattgtgggggccctgatccagtcggtaaagaagctttctgatgtgatgatcctgactgtgttctgtctgagcgtgtttgctctcattgggctgcagctgttcatgggcaatctgaggaataaatgtttgcagtggcccccaagcgattctgcttttgaaaccaacaccacttcctactttaatggcacaatggattcaaatgggacatttgttaatgtaacaatgagcacatttaactggaaggattacattggagatgacagtcacttttatgttttggatgggcaaaaagaccctttactctgtggaaatggctcagatgcaggccagtgtccagaaggatacatctgtgtgaaggctggtcgaaaccccaactatggctacacaagctttgacacctttagctgggctttcctgtctctatttcgactcatgactcaagactattgggaaaatctttaccagttgacattacgtgctgctgggaaaacatacatgatattttttgtcctggtcattttcttgggctcattttatttggtgaatttgatcctggctgtggtggccatggcctatgaggagcagaatcaggccaccttggaagaagcagaacaaaaagaggccgaatttcagcagatgctcgaacagcttaaaaagcaacaggaagaagctcaggcagttgcggcagcatcagctgcttcaagagatttcagtggagtaggtgggttaggagagctgttggaaagttcttcagaagcatcaaagttgagttccaaaggtgctaaagaatggaggaaccggaggaagaaaagaagacagagagagcaccttgaaggaaacaacaaaggagagagagacagctttcccaaatccgaatctgaagacagcgtcaaaagaagcagcttccttttctccatggatggaaacagactgaccagtgacaaaaaattctgctcccctcatcagtctctcttgagtatccgtggctccctgttttccccaagacgcaatagcaaaacaagcattttcagtttcagaggtcgggcaaaggatgttggatctgaaaatgactttgctgatgatgaacacagcacatttgaagacggcgaaagcaggagagactcactgtttgtgccgcacagacatggagagcgacgcaacagtaacgttagtcaggccagtatgtcatccaggatggtgccagggcttccagcaaatgggaagatgcacagcactgtggattgcaatggtgtggtttccttggtgggtggaccttcagctctaacgtcacctactggacaacttcccccagagggcaccaccactgaaacggaagtcagaaagagaaggttaagctcttaccagatttcaatggagatgctggaggattcctctggaaggcaaagagccgtgagcatagccagcattctgaccaacacaatggaagaacttgaagaatctagacagaaatgtccgccatgctggtatagatttgccaatgtgttcttgatctgggactgctgtgatgcatggttaaaagtaaaacatcttgtgaatttaattgttatggatccatttgttgatcttgccatcactatttgcattgtcttaaataccctctttatggccatggagcactaccccatgactgagcaattcagtagtgtgttgactgtaggaaacctggtctttactgggattttcacagcagaaatggttctcaagatcattgccatggatccttattactatttccaagaaggctggaatatctttgatggaattattgtcagcctcagtttaatggagcttggtctgtcaaatgtggagggattgtctgtactgcgatcattcagactgcttagagttttcaagttggcaaaatcctggcccacactaaatatgctaattaagatcattggcaattctgtgggggctctaggaaacctcaccttggtgttggccatcatcgtcttcatttttgctgtggtcggcatgcagctctttggtaagagctacaaagaatgtgtctgcaagatcaatgatgactgtacgctcccacggtggcacatgaacgacttcttccactccttcctgattgtgttccgcgtgctgtgtggagagtggatagagaccatgtgggactgtatggaggtcgctggccaaaccatgtgccttattgttttcatgttggtcatggtcattggaaaccttgtggttctgaacctctttctggccttattattgagttcatttagctcagacaaccttgctgctactgatgatgacaatgaaatgaataatctgcagattgcagtaggaagaatgcaaaagggaattgattatgtgaaaaataagatgcgggagtgtttccaaaaagccttttttagaaagccaaaagttatagaaatccatgaaggcaataagatagacagctgcatgtccaataatactggaattgaaataagcaaagagcttaattatcttagagatgggaatggaaccaccagtggtgtaggtactggaagcagtgttgaaaaatacgtaatcgatgaaaatgattatatgtcattcataaacaaccccagcctcaccgtcacagtgccaattgctgttggagagtctgactttgaaaacttaaatactgaagagttcagcagtgagtcagaactagaagaaagcaaagagaaattaaatgcaaccagctcatctgaaggaagcacagttgatgttgttctaccccgagaaggtgaacaagctgaaactgaacccgaagaagactttaaaccggaagcttgttttactgaagggtgtattaaaaagtttccattctgtcaagtaagtacagaagaaggcaaagggaagatctggtggaatcttcgaaaaacctgctacagtattgttgagcacaactggtttgagactttcattgtgttcatgatccttctcagtagtggtgcattggcctttgaagatatatacattgaacagcgaaagactatcaaaaccatgctagaatatgctgacaaagtctttacctatatattcattctggaaatgcttctcaaatgggttgcttatggatttcaaacatatttcactaatgcctggtgctggctagatttcttgatcgttgatgtttctttggttagcctggtagccaatgctcttggctactcagaactcggtgccatcaaatcattacggacattaagagctttaagacctctaagagccttatcccggtttgaaggcatgagggtggttgtgaatgctcttgttggagcaattccctctatcatgaatgtgctgttggtctgtctcatcttctggttgatctttagcatcatgggtgtgaatttgtttgctggcaagttctaccactgtgttaacatgacaacgggtaacatgtttgacattagtgatgttaacaatttgagtgactgtcaggctcttggcaagcaagctcggtggaaaaacgtgaaagtaaactttgataatgttggcgctggctatcttgcactgcttcaagtggccacatttaaaggctggatggatattatgtatgcagctgttgattcacgagatgttaaacttcagcctgtatatgaagaaaatctgtacatgtatttatactttgtcatctttatcatctttgggtcattcttcactctgaatctattcattggtgtcatcatagataacttcaaccagcagaaaaagaagtttggaggtcaagacatctttatgacagaggaacagaaaaaatattacaatgcaatgaagaaacttggatccaagaaacctcagaaacccatacctcgcccagcaaacaaattccaaggaatggtctttgattttgtaaccagacaagtctttgatatcagcatcatgatcctcatctgcctcaacatggtcaccatgatggtggaaacggatgaccagggcaaatacatgaccctagttttgtcccggatcaacctagtgttcattgttctgttcactggagaatttgtgctgaagctcgtttccctcagacactactacttcactataggctggaacatctttgactttgtggtggtgattctctccattgtaggtatgtttctggctgagatgatagaaaagtattctgtgtcccctaccttgttccgagtgatccgtcttgccaggattggccgaatcctacgtctgatcaaaggagcaaaggggatccgcacgctgctctttgctttgatgatgtcccttcctgcgttgtttaacatcggcctcctgctcttcctggtcatgtttatctatgccatctttgggatgtccaactttgcctatgttaaaaaggaagctggaattgatgacatgttcaactttgagacctttggcaacagcatgatctgcttgttccaaattacaacctctgctggctgggatggattgctagcacctattcttaatagtgcaccacccgactgtgaccctgacacaattcaccctggcagctcagttaagggagaccgtggggacccatctgttgggattttcttttttgtcagttacatcatcatatccttcctggttgtggtgaacatgtacatcgcggtcatcctggagaacttcagtgttgctactgaagaaagtgcagagcccctgagtgaggatgactttgagatgttctatgaggtttgggaaaagtttgatcccgatgcgacccagtttatagagttctctaaactctctgattttgcagctgccctggatcctcctcttctcatagcaaaacccaacaaagtccagcttattgccatggatctgcccatggtcagtggtgaccggatccactgtcttgatattttatttgcctttacaaagcgtgttttgtgtgagagtggagagatggatgcccttcgaatacagatggaagacaggtttatggcatcaaacccctccaaagtctcttatgagcctattacaaccactttgaaacgtaaacaagaggaggtgtctgccgctatcattcagcgtaatttcagatgttatcttttaaagcaaaggttaaaaaatatatcaagtaactataacaaagaggcaattaaagggaggattgacttacctataaaacaagacatgattattgacaaactaaatgggaactccactccagaaaaaacagatgggagttcctctaccacccctcctccttcctatgatagtgtaacaaaaccagacaaggaaaagtttgagaaagacaaaccagaaaaagaaagcaaaggaaaagaggtcagagaaaatcaaaagtaaaaagaaacaaagaattatctttgtgatcaattgtttacagcctatgaaggtaaagtatatgtgtcaactggacttcaagaggaggtccatgccaaactgactgttttaacaaatactcatagtcagtgcctatacaagacagtgaagtgacctctctgtcactgcaactctgtgaagcagggtatcaacgttgacaagaggttgctgtttttattaccagctgacactgctgaggagaaacccaatggctacctagactatagggatagttgtgcaaagtgaacattgtaactacaccaaacacctttagtacagtccttgcatccattctatttttaacttccatatctgccatatttttacaaaatttgttctagtgcatttccatggtccccaattcatagtttattcataatgctatgtcactatttttgtaaatgaggtttacgttgaagaaacagtatacaagaaccctgtctctcaaatgatcagacaaaggtgttttgccagagagataaaatttttgctcaaaaccagaaaaagaattgtaatggctacagtttcagttacttccattttctagatggctttaattttgaaagtattttagtctgttatgtttgtttctatctgaacagttatgtgcctgtaaagtctcctctaatatttaaaggattatttttatgcaaagtattctgtttcagcaagtgcaaattttattctaagtttcagagctctatatttaatttaggtcaaatgctttccaaaaagtaatctaataaatccattctagaaaaatatatctaaagtattgctttagaatagttgttccactttctgctgcagtattgctttgccatcttctgctctcagcaaagctgatagtctatgtcaattaaataccctatgttatgtaaatagttattttatcctgtggtgcatgtttgggcaaatatatatatagcctgataaacaacttctattaaatcaaatatgtaccacagtgtatgtgtcttttgcaagcttccaacagggatgtatcctgtatcattcattaaacatagtttaaaggctatcactaatgcatgttaatattgcctatgctgctctattttactcaatccattcttcacaagtcttggttaaagaatgtcacatattggtgatagaatgaattcaacctgctctgtccattatgtcaagcagaataatttgaagctatttacaaacacctttacttttgcacttttaattcaacatgagtatcatatggtatctctctggatttcaaggaaacacactggatactgcctactgacaaaacctattcttcatattttgctaaaaatatgtctaaaacttgtttaaatataaataatgtaaaaatataatcaactttatttgtcagcattttgtacataagaaaattattttcaggttgatgacatcacaatttattttactttatgcttttgcttttgatttttaatcacaattccaaacttttgaatccataagatttttcaatggataatttcctaaaataaaagttagataatgggttttatggatttctttgttataatatattttctaccattccaataggagatacattggtcaaacactcaaacctagatcattttctaccaactatggttgcctcaatataaccttttattcatagatgtttttttttattcaacttttgtagtatttacgtatgcagactagtcttatttttttaattcctgctgcactaaagctattacaaatataacatggactttgttctttttagccatgaacaaagtggcaaagttgtgcaattacctaacatgatataaatttttgttttttgcacaaaccaaaagtttaatgttaattctttttacaaaactatttactgtagtgtattgaagaactgcatgcagggaattgctattgctaaaaagaatggtgagctacgtcattattgagccaaaagaataaatttcattttttattgcatttcacttattgggctctggggttttttgtttttgttttttgctgttggcagtttaaaatatatataattaataaaacctgtgcttgatctgacatttgtatacataaaagtttacatgaattttacaacaaactagtgcatgattcaccaagcagtactacagaacaaaggcaaattaaaagcagctttgtgaacttttatgtgtgcaaaggatcaagttcacatgttccaactttcaggtttgataataatagtagtaaccacctacaatagctttcaatttcaattaactcccttggctataagcatctaaactcatcttctttcaatataattgatgctatctcctaattacttggtggctaataaatgttacattctttgttacttaaatgcattatataaactcctatgtatacataaggtattaatgatatagttattgagaatttatattaacttttttttcaagaacccttggatttatgtgaggtcaaaaccaaactcttattctcagtggaaaactccagttgtaatgcatatttttaaagacaatttggatctaaatatgtatttcataattctcccataataaattatataaggtggaaaaaaaaaaaaaaaaaaaaaaaaaaaaa

SEQ ID NO: 56740 - DNA, 4094 bp, Homo Sapiens
agttgcaactgttgtgctgcagcagatttggtctgagtctgggcagagcccctttttatggagcaaccctcccgatttgttacagcaagagcctggtgcaagtgatctttgccttcccatcgcacacaaaggcaaagagctccttaaagggacctgcctgctcctccgtgcagctgcaaacccgtgtcggtgcaggctcagcaacccaggctttcgctcgagaatgagtggggaggggtcttgaggagcccccacgtcctcccggagcggaggcgggagggagctgacagccggagtggatggagaccaccagtccgaggggacccgcttgcgattagctgcttcttgggatgctccgcgcgccagttgagcatcctgcctgtggtccaggggatgctggcggcgcatcttgcggtaagcctgcgctgatttgagccatcgcccagaagcgagcccgcattcagacaccgcggaccggctccgcgaagggctgcgtgcagtcaccatgaatgctcagctctaggcttctgtaaaaacctcccccactgcatggatttggctgtttaatcagccgagattacagcccgggaagatttgcaaacctgattctccctccagctgctgtgacaacttcggggccgtctgtttacttctctgggtccccggggactctttcctgcatcgcagccccttgtgccactttgtgggcttggctcgaaagtcagccgccaggactcctctgacggcatccccaggaagggggagcaaggagggcttaaaagaaaagcagaaatccccgcaactgctcaacctctcgtgactgcctgtgttctggggttctgagagggaccgtgcgctgcctggggaagcaatgcaagtctccatagcctgcacagagcacaatttgaagagtcggaatggtgaggaccgacttctgagcaagcagagctccaccgcccccaatgtggtgaacgcagcccgggccaaattccgcacggtcgctatcatcgcgcgcagcctggggacgttcacgcctcagcatcacatttctctcaaagagtccaccgcaaagcagactggcatgaaatataggaatcttggaaaatcaggactcagagtttcttgcttgggtcttggaacatgggtgacatttggaggtcaaatttcagatgaggttgctgaacggctgatgaccatcgcctatgaaagtggtgttaacctctttgatactgccgaagtctatgctgctggaaaggctgaagtgattctggggagcatcatcaagaagaaaggctggaggaggtccagtctggtcataacaaccaaactctactggggtggaaaagctgaaacagaaagagggctgtcaagaaagcatattattgaaggattgaagggctccctccagaggctgcagctcgagtatgtggatgtggtctttgcaaatcgaccggacagtaacactcccatggaagaaattgtccgagccatgacacatgtgataaaccaaggcatggcgatgtactggggcacctcgagatggagtgctatggagatcatggaagcctattctgtagcaagacagttcaatatgatcccaccggtctgtgaacaagctgagtaccatcttttccagagagagaaagtggaggtccagctgccagagctctaccacaaaataggtgttggcgcaatgacatggtctccacttgcctgtggaatcatctcaggaaaatacggaaacggggtgcctgaaagttccagggcttcactgaagtgctaccagtggttgaaagaaagaattgtaagtgaagaagggagaaaacagcaaaacaagctaaaagacctttccccaattgcggagcgtctgggatgcacactacctcagctagctgttgcgtggtgcctgagaaatgaaggtgtgagttctgtgctcctgggatcatccactcctgaacaactcattgaaaaccttggtgccattcaggttctcccaaagatgacatcacatgtggtaaatgagattgataacatactgcgcaacaagccctacagcaagaaggactatagatcataaggcaatgcatgaaccacagaagctgcatggttaaaatagcggcctgtgcccagtacagaaaggtgttactaaccagtcttttgaatcacttagcagcttgctgctcaacctctagtgtccctccctggattctttgaggtgtctgctgtcgctaccactgtgcacatctgaaaactcacaaccaagaaaatccattctattttcttatcttggactggagtcacctattcttgcattgctgtatacacctcatgcttatgcaatgggaagaatatgggggccagggggtgtggtactaccttcaggcatttggtaactcaaagaaggctgtacagatatattttttcaaaagaacaaaatccacagatgcaatgtgagttgcgtaagaaacagagtagatagactaaattcagtgaaggaaaggaattgagagatttttcttagtaaatagattattgttaagtaaatagttattaaaaatatatctcactgcaaaaaaaaaaaagcagtatcttcactcaaaagtcttgcttggaagaataagcagaaataattttatatattttttttctattttcacattcatactaacaagttttgttccatttgttattcaataaaacaaaaatttctaggtatttgctttattacctttcaaatatttactgttgcttggccccaagaatggccttgtacaacttatccagaatgtctattaggattctaatgttatgtccacttacaagtagagacagtaaaaggatgaatacccaatctttagtgacaatgcagctgatttatgaaagagagggctacactgctatggaaacttagcttcaaagaaaatgcaatgtatctgcaattaggtgttcattttttactacattttattaaaacctgctttatactttcaactgcttgtaggcacaacttctgcaagtttaaatatttgagctttacaaataaacatacacatgctcagttttttaagtaaacctgtaaaatacccaggaaggcaaatgttcattgtttaattagcactgggattttataatataatgtttggtatttttgaggcattgttaacatgaaagtcaaccactggctttgtgaaaaatgctatgtcactattcagaatatgctgggtaaattgacttgcctagtgaaaagcaaaatgttaaagaaagaacttctggttctataatcatattatatgcactaaactatatgcatgaaagttctttgcatggattaatggggcttacccttgttgcactcgaaatctgaggtgtatctagccctgccactattggctacttaccctcattaatatcccacttgagaaaaattgtgagactatactgtgtcaatatctgtaaaaagagagaaaacatgttttgtttttttttgaagggggtggtgtgggagtggccctttaactctatttggctatctgaggatgtacaaaattctcatttaattttctggtcagcaagttccccacacagaaatcactctgaggtttacagaagaactgtaatattattttaaaatgcgatttttctgtcattagttctagatatgtacttcatggttaaattctaaatctgaaaatgctagtgggagatatcaagaaattttctttttgattactagtacctgtattctaacagagagtttgaattttttgcccgtgttatcagaatgatggaaattgatcattttcagttgttcattgtgtattcaatccagcgaactgctgtatgtatagaggagctgaggtgctgtctaatgggaaatgtgatttgattgatttatttgcttagagtaataaaagcattttgtgcattcaatcttacaatagattttatctgatctttcactgtaaggcttatgtgtattttccatatatgtaaaacatacacatgtaaaatatatgtggccataaattaggcaataatcatctaaataaaaattatattggcagctaagctgcactgaatactcaaaaaaaaaa

SEQ ID NO: 56741 - DNA, 5961 bp, Homo Sapiens
atgtctctgggccttatctccatatttcagaaaccaagttcagggtcagtcacagggaagtcacctgaaccggacagcaaggtctgtgactgccttatccacaggcagatcccgctcgccctgccctggcatcaccaccactgggcagctttgcctctcactagatatgaaaaaagtggaaaagcaaaacagaaactaaaggtgacaactctgcagagctgggcacgttggaaaggccaagccttaaccctgtctctctctctctcccatcttcatccccacagagccaaggtgaagaagggggtgaacatcctgagtgctcagacccgtgagccccggcagtggggcgtcaagcaggaggtgggcagcggcggaaagcacgtgacggccaccgtggcctgccagcgcctggggcccagcccacgcaacagaacccactcctctgtccttcctttaatgtgtaatgagaaaaagaaaatctggtgtcccaaacagttcacaaactcaaatgccaaccgtcaccatcattaccccaagaaggattttagtgcatctggcggaggaagcatcttccgcctcccccttcatctcctttcctcggtctgcatcttttttcaaaaccaggtgtccggctccgggggtgtctgtgcccaggactggttacgggccatgtgggagactttcactttaacctcaaaacttctaaaagaatctaaaaaggaaacactttctgtccacgtgattcaaccttactcaagggatgcacgttgccttttggaaacctttcctgggatacttcatcagtcccctagaggggctgtcactgacacttgtacagagtttgcagcaaaacagctgtctgggaactcgactgtgcctcttttggagggacttagaaagaaggccagctgtttcaaagactcagctgcccctcattttcaccacacgagccctcctaaacagagcacatcgcacagacgctcctgtatttccagcagatgctataaacacgcatctgagctccggttcttatggctaagcagctgctgcatccccaagctccttaattcaagagccagcatcgtgcttcagggactctctgctgcaggggagaaaagtaaatcaggcaggaattccagttcaaccatgatgttttctgattcttacatcaaccctgagatatgggtacgatgggtcccatattccagaaaacaatgtgacatgaagacagagcccacactagagcggcttgtggagagagtagtaaaacctgacaggctccttagcaccagagaggagtggaaaggtgaaagaaagaaaattcaagggctgaaaaatatctacacctccccacccccgcaccccccacacactcacactgtggtcacattgagaaaagatgcaagacgcattctgacacttagattgcgatgtggagacactcacacagccaatccatggagctcaggctttgacctggatatgcctgattcctgcatgggaattggagttgagttggtctgggttccggtcctgctccagcagctctgtgcactggggcaggtcctgattctgcaggaggccggtgcctactttacgaacagctacggcctcagtgcctgtgatttgaaaaatgcccctagctgtccgtcccggctgctgaagggaacgagcttcggtggtgactgcatccctcacatccgaggagggtcctggtacagaggcagcagggcttcactgatcccgttttctgtccatcacactgggctgcccctttcgcaggtcctggtacagaggtggcacggcttgactgatcccgtgttctctccatcacactgggctgcccctttcgcaggtcctgtgggctgcccctttcgcaggtcttggtacagaggtggcagggcttcactgatcccatgttctctccgtcacactgggctgccccttttgcaggtcctggtacagaggcggcagggcttcactgatccctgttctgtccatcgcactgggctgccccttttgcaggtcctggtacagaggcaccagggcttcactgatcccatgtcctctccatcacactgggctgcccctttcgcaggtcctgatcctcgcctaagacagctggtggtcaagaaccacctgagcagcagtttattcaatgaggttgtgcagatgaactttgaaatagccagtttcagcagcctttcagggactcagcccatcacgtggcaggtggagtacccacggaaggggaccacagacatcgccgtgtccgagatctttgtcagccagaaggacctggtgggcatcgttcccttggctatggacactgaaattctgaacaccgccgtactcacaggaaagacagttgccatgcctatcaaggtggtctctgtggaggagaacagtgccgtgatggacatctcagagtcggtggagtgcaagtccacagacgaggacgttatcaaagtgtctgagcgctgtgactacatctttgtcaatggcaaagagatcaaaggaaagatggatgcggtggtgaacttcacataccagtacctgagcgcccccctgtgtgtcaccgtgtgggtgccccggctgcccctgcagatcgaggtctctgacacggagctcagccagataaagggctggagggtccccattgtgaccaataagaggcccactcgtgagagcgaggatgaggacgaggaggagcggcggggccggggctgcgcactgcaataccagcacgccaccgtgcgggtcctcacccagtttgtgtctgagggcgccggtccatggggccagccgaactacctgcttagtcctaactggcagttcgacatcactcacctggtggcagacttcatgaagctggaggaacctcacgtggccaccctccaggacagccgggtcctggttgggcgagaggttgggatgacgaccatccaggtgttgtctccactgtctgactccatcctggcagagaagacaataaccgtgctagatgacaaagtatcggtgacagacttggccatccagctcgtggctgggctgtctgtcgccctttaccccaacgcagaaaacagcaaggccgtaacagctgtggtcacagctgaggaggtgctgcggacccccaaacaggaggctgtattcagcacgtggctgcagttcagtgatggctctgtgacgcccctggacatctacgacaccaaggacttctccctggcagccacctcccaggacgaggctgtcgtgtcagtcccccagccccgctctcccaggtggcccgttgtggtggccgaaggggaaggccagggcccactgatccgagtggacatgacgatcgccgaggcctgccagaaatctaaacgcaagagcatcctggctgtgggcgtcggcaacgtcagggtcaagttcggacagaacgatgctgactccagccccggcggggactatgaggaagatgagatcaagaaccacgccagcgaccgccggcagaagggccagcaccatgagcgcacaggccaagatgggcacctctatggcagctctcccgtggagcgtgaggaaggggctctccgaagagccactaccacggccaggtccctgctggacaacaaagtggtgaagaacagtcgggcagacgggggcaggctggcaggagaggggcagctgcagaacatccccattgacttcaccaacttccctgcccacgtggacctccccaaggccgggagtgggctggaggaaaacgacctggtgcagactccgcggggcctgagtgatctggagatagggatgtacgccctcctgggggtgttctgcctggccatcctcgtcttcctgatcaactgcgccacctttgccctgaagtacaggcacaagcaagtgcccctggaaggtcaggcctccatgacccactctcacgactgggtgtggcttggcaatgaggccgaactcctggagagcatgggggatgcgccgccgccccaggacgagcacaccaccatcatagaccgcggaccgggggcctgcgaggagagcaaccatctcctgctcaatggtggctcccacaagcacgtgcagagccagattcacaggtcagccgactccggggggcggcagggcagagaacagaagcaggaccccctgcactcgcccacctccaagaggaagaaggtgaaatttaccacctttaccaccatccccccggacgacagctgccccacggtgaactccatcgtcagcagcaatgatgaggacatcaaatgggtgtgtcaagacgtggctgtgggtgcccccaaggaacttagaaactatctggagaaactcaaagataaggcttaggcccctctagccaaagggccctgcccagatgccttccttgtactggaaactggcccaagtggggcagaaggcgttgtcagtggggttaagaagggacggtcccagggtccatgctagaccagttggaaagttttgaagtcaggaaaagacgtttttgtatcaagggatttttagcagttaatggtggtggatttttaaaggtcaggggaataaagtctggggcatggggagtgcagaccaagttactgaactgcacaggcaaaattaggaaggttattttatgagtcaaaacatactacagacaagctaccaaaaattatttgttaaaaaatgcaacaagacaaataaaaagagaaataatcatctgtttatatttctaataaaggagcaaaatataaaaataggacctgctaagagacattttccattctaattcacgattcacttttccaaggacagccttcaactgtcaccacacagctgggggggagtcatttcttaacaagggatgcctcttgggatagaactagggagttttaaatctttacttgatcatcttttattttcttttccactttttccttttttctctctctctgtgtcctagacttccattgcatttatatttaatgtttatttctgagaatcaagcagtatatttttcctaaatgaaacataaattatattcctattcattagataggttcctaggaacaatgccaattaatccattgtttaagtagtaacttgaatgtttttctatatccctccagctttgttgatagtggcgggttttgtacaattggagggagccctcagagccttctgggggaggagaggaactgtccttaatccatcaccactaccatagggcaaagccagcaggtgtggccctgtgaggggctgtacagacgggatgtggccaggagaacagagccccacctggaccacctgacccctcgggattccacccctgtcatcgtggggatgttcctatatgggagaaagttgggttaaatcaaaaaagaggccacgcccaggtgtaatcagagccaacctggtgggcttggtctatcacaagacataactgatgctgaacatgaacaaagataaaaactgtttggagggtttttgagttgtttttcttatgttgttgggtggggtataccagcataaactctaaagataaaatctatgttagattgtcaatcaactgtgtttttgaacagcataattgtgtagcagcacattgcaaaaatgcattcatccaaagcgacacatgtggcaacgtagaccacgccagtgaaataagccccttcgtgatcacctgactccagttctccgtgtgctccattggctgcggctgcaggaggaagatgcctgacagccctcatgctctccgcaggggggcgctcacaaagatgccaggggtgtttattgtgtttatttttttaattactaaaatcagtagctaagaaagggtccttgaagcctcctaacctgggttggacctttgaaaaatatatttgtagcacatattatagatggaaagaagaagatatttatttatacctgtgatgccaattgtcattaaaaggcttttcatggcttgac

SEQ ID NO: 56742 - DNA, 5933 bp, Homo Sapiens; identical to SEQ ID NO: 32269

SEQ ID NO: 56743 - DNA, 2704 bp, Homo Sapiens
gttttacgctgccgccggcatccgctcggacgcggccacgttgtcttgcgcgctttgcccgcctggccctgggactctgaccctcggctaccctttcctgccccactagcgtggccgcgagcctcggtgagccggccgtattcccgctctcgcttagggggcacaggcgcaggcatcggcccggccactccaagccttcggtgcgcgggcgcgtctgggatacgggcccgggaggcgccgccctccgtccgcccggtgcctctcaggaacagcgaaccggagagagcgccggagagttgggctcagtgcggagctcggcgccggggcccatgcccgtgcgcccccgcaggccggcgccatggcctccgggagtgtggccgagtgcctgcagcaggagaccacctgccccgtgtgcctgcagtacttcgcagagcccatgatgctcgactgcggccataacatctgttgcgcgtgcctcgcccgctgctggggcacggcagagactaacgtgtcgtgcccgcagtgccgggagaccttcccgcagaggcacatgcggcccaaccggcacctggccaacgtgacccaactggtaaagcagctgcgcaccgagcggccgtcggggcccggcggcgagatgggcgtgtgcgagaagcaccgcgagcccctgaagctgtactgcgaggaggaccagatgcccatctgcgtggtgtgcgaccgctcccgcgagcaccgcggccacagcgtgctgccgctcgaggaggcggtggagggcttcaaggagcaaatccagaaccagctcgaccatttaaaaagagtgaaagatttaaagaagagacgtcgggcccagggggaacaggcacgagctgaactcttgagcctaacccagatggagagggagaagattgtttgggagtttgagcagctgtatcactccttaaaggagcatgagtatcgcctcctggcccgccttgaggagctagacttggccatctacaatagcatcaatggtgccatcacccagttctcttgcaacatctcccacctcagcagcctgatcgctcagctagaagagaagcagcagcagcccaccagggagctcctgcaggacattggggacacattgagcagggctgaaagaatcaggattcctgaaccttggatcacacctccagatttgcaagagaaaatccacatttttgcccaaaaatgtctattcttgacggagagtctaaagcagttcacagaaaaaatgcagtcagatatggagaaaatccaagaattaagagaggctcagttatactcagtggacgtgactctggacccagacacggcctaccccagcctgatcctctctgataatctgcggcaagtgcggtacagttacctccaacaggacctgcctgacaaccccgagaggtctccttctacaacgtgacagagaggtgtcacaccttcactttctctcatgctaccttttgtgggcctgtccggccctacttcagtctgagttactcgggagggaaaagtgcagctcctctgatcatctgccccatgagtgggatagatgggttttctggccatgttgggaatcatggtcattccatggagacctccccttgaggaggtgaattcaggccaaaagggctgttggctgtaatcctacgccaggcacaaggcatcttgttgccttgccacgtcctgtcacagctgggtatccttaccatgttccacgcccttgcagtgggagacaggatgtccatgttctctaccatccttttccttcccatgcagattgtgaaatgtaatgagatgtatcaagacatcctagaaataaaaaccagatgtccacctccagtgtttcatactttctggttttacacatcgctggagggataaagagtatggataatctttggatttggagagccgttcaagatacttccagcttcttggctcagcctggcttcctctggttcagccccacataatgattatggctatttgctgtcatttctgggctagggctcctttctaacaacctagactggaataaggccctgtcagcatggctccctttatcccagttttccgtctgggaacagtacctctgcccctgattcccaatgtgccatagttttattaactccattaaagaagcctgtatgtgttttggttagttacagttattttacaataatggtgggtaatggccccacctctgttatgagataatgttctaatcaatgtctctgcctttgtatcttttctgagggctttgtctgttctcttcattctaatgaaaggtgtattctagtgctgggtgcatatcatccaggataatattctgcccaactccatcctctgttactagatcccttaccagtcacatttgtggactggtggccagtcgtataccatccctggaaggattctgggacaatattccagggattcattgacttcttggctccttttctccatttcctttgggggaagggggaattgaccatgcttaagtgcatcctatcaaggggcagctccgtccccatggccattggatcatgagacactcgaagtcagaaggctggggcagatcacttcaagcaagcccccatgatggttctcagtcctgcttctctgtgggtacgtgcccctctgtttaaaaataaactgaatatggatgtttaaaaaaaaaaaaaaaaaa

SEQ ID NO: 56744 - DNA, 641 bp, Homo Sapiens
ctggcatcccgagaagccaggaagcagtgagcccaggagtcctcggccagccctgcctgcccaccaggaggatgaaggtctccgtggctgccctctcctgcctcatgcttgttactgcccttggatcccaggcccgggtcacaaaagatgcagagacagagttcatgatgtcaaagcttccattggaaaatccagtacttctggacatgctctggaggagaaagattggtcctcagatgaccctttctcatgctgcaggattccatgctactagtgctgactgctgcatctcctacaccccacgaagcatcccgtgttcactcctggagagttactttgaaacgaacagcgagtgctccaagccgggtgtcatcttcctcaccaagaaggggcgacgtttctgtgccaaccccagtgataagcaagttcaggtttgcgtgagaatgctgaagctggacacacggatcaagaccaggaagaattgaacttgtcaaggtgaagggacacaagttgccagccaccaactttcttgcctcaactaccttcctgaattattttttaaagaagcatttattcttgtgttctggatttagagcaattcatctaataaacagtttctcactttaaaaaaaaaaaaaaaa

SEQ ID NO: 56745 - DNA, 3769 bp, Homo Sapiens; identical to SEQ ID NO: 31437

SEQ ID NO: 56746 - DNA, 1194 bp, Homo Sapiens
acaggatctgcttagtgaaagaagtggcaagcaatggatcccaaatatcagcgtgtagagctaaatgatggtcacttcatgcccgtattgggatttggcacctatgcacctccagaggttccgaggaacagagctgtagaggtcaccaaattagcaatagaagctggcttccgccatattgattctgcttatttatacaataatgaggagcaggttggactggccatccgaagcaagattgcagatggcagtgtgaagagagaagacatattctacacttcaaagctttggtgcactttctttcaaccacagatggtccaaccagccttggaaagctcactgaaaaaacttcaactggactatgttgacctctatcttcttcatttcccaatggctctcaagccaggtgagacgccactaccaaaagatgaaaatggaaaagtaatattcgacacagtggatctctctgccacatgggaggtcatggagaagtgtaaggatgcaggattggccaagtccatcggggtgtcaaacttcaactgcaggcagctggagatgatcctcaacaagccaggactcaagtacaagcctgtctgcaaccaggtagaatgtcatccttacctcaaccagagcaaactgctggatttctgcaagtcaaaagacattgttctggttgcccacagtgctctgggaacccaacgacataaactatgggtggacccaaactccccagttcttttggaggacccagttctttgtgccttagcaaagaaacacaaacaaaccccagccctgattgccctgcgctaccagctgcagcgtggggttgtggtcctggccaagagctacaatgagcagcggatcagagagaacatccaggtttttgaattccagttgacatcagaggatatgaaagttctagatggtctaaacagaaattatcgatatgttgtcatggattttcttatggaccatcctgattatccattttcagatgaatattagcatagagggtgttgcacgacatctagcagaaggccctgtgtgtggatggtgatgcagaggatgtctctatgctggtgactggacacacagcctctggttaaatccctcccctcctgcttggcaacttcagctagctagatatatccatggtccagaaagcaaacataataaatttttatcttgaagtaa

SEQ ID NO: 56747 - DNA, 3227 bp, Homo Sapiens
aacagatgagcaaggagctggcagcaatggggcctggagcttcaggggacggggtcaggactgagacagctccacacatagcactggactccagagttggtctgcacgcctacgacatcagcgtggtggtcatctactttgtcttcgtcattgctgtggggatctggtcgtccatccgtgcaagtcgagggaccattggcggctatttcctggccgggaggtccatgagctggtggccaattggagcatctctgatgtccagcaatgtgggcagtggcttgttcatcggcctggctgggacaggggctgccggaggccttgccgtaggtggcttcgagtggaacatgaggaaatcaaggtctggaggagacagagggatccatccaaggtcacacgggaggactggggtcaggtcccaggcaacctggctgctcctggcccttggctgggtcttcgtccctgtgtacatcgcagcaggtgtggtcacaatgccgcagtatctgaagaagcgatttgggggccagaggatccaggtgtacatgtctgtcctgtctctcatcctctacatcttcaccaagatctcgactgacatcttctctggagccctcttcatccagatggcattgggctggaacctgtacctctccacagggatcctgctggtggtgactgccgtctacaccattgcaggtggcctcatggccgtgatctacacagatgctctgcagacggtgatcatggtagggggagccctggtcctcatgtttctgggctttcaggacgtgggctggtacccaggcctggagcagcggtacaggcaggccatccctaatgtcacagtccccaacaccacctgtcacctcccacggcccgatgctttccacattcttcgggaccctgtgagcggggacatcccttggccaggtctcattttcgggctcacagtgctggccacctggtgttggtgcacagaccaggtcattgtgcagcggtctctctcggccaagagtctgtctcatgccaagggaggctccgtgctggggggctacctgaagatcctccccatgttcttcatcgtcatgcctggcatgatcagccgggccctgttcccagacgaggtgggctgcgtggaccctgatgtctgccaaagaatctgtggggcccgagtgggatgttccaacattgcctaccctaagttggtcatggccctcatgcctgttggtctgcgggggctgatgattgccgtgatcatggccgctctcatgagctcactcacctccatcttcaacagcagcagcaccctgttcaccattgatgtgtggcagcgcttccgcaggaagtcaacagagcaggagctgatggtggtgggcagagtgtttgtggtgttcctggttgtcatcagcatcctctggatccccatcatccaaagctccaacagtgggcagctcttcgactacatccaggctgtcaccagttacctggccccacccatcaccgctctcttcctgctggccatcttctgcaagagggtcacagagcccggagctttctggggcctcgtgtttggcctgggagtggggcttctgcgtatgatcctggagttctcatacccagcgccagcctgtggggaggtggaccggaggccagcagtgctgaaggacttccactacctgtactttgcaatcctcctctgcgggctcactgccatcgtcattgtcattgtcagcctctgtacaactcccatccctgaggaacagctcacacgcctcacatggtggactcggaactgccccctctctgagctggagaaggaggcccacgagagcacaccggagatatccgagaggccagccggggagtgccctgcaggaggtggagcggcagagaactcgagcctgggccaggagcagcctgaagccccaagcaggtcctggggaaagttgctctggagctggttctgtgggctctctggaacaccggagcaggccctgagcccagcagagaaggctgcgctagaacagaagctgacaagcattgaggaggagccactctggagacatgtctgcaacatcaatgctgtccttttgctggccatcaacatcttcctctggggctattttgcgtgattccacagacctggcttcagtgtagacagattaaacaaagcccaagcctgtcagccacagaaacaggctctcctcttactttgctgtctaaactggagatcacagaagtcaagactgcaagctcccctgaagagaatccaactcaacctgcacacttgacaagtggagaaacagaagcccagagagagcactgggtttgttcaggaccacccagaaggtgtcacacggggtttccccactctttctgatatattgccttacagacctacctcaaacacactgtttccaccctcttcttgaatgtattcagtagcctttactgaatgtgtgtcttgagagtagaaaaatggaggatacaagaaaaggagcaggaagaaatttgcaaaaatccaagagcacctttgctcccccttatcctccttcctcttcccctttctagttcccctacctctctatctttctattctcaccaataatctctttgttgcatgaatttacccaggagagtcctatatttccattggtggctccacagtggtggctgtcagacccgaaggggtggggagccaagggtggactttaagcatggtgacagatggtattttgggcagaaagctcttagacaatggactatccaaagcactatttaaattctgcctcttcctactctctaacccaaatatgcacaaactctctatggccttgagaagcagttggagagacatgacttgttaaaacctcaaggaatcaagacatgttactctgtatttaagggtaagccccacagcgggcagcacaaacagcctgggagccactgtgcctgtgcttctctgtccttctccctttgcttgccatgaatccgcataccttggaatacactgtgaccccagttaagtgtcccttcgccaggaagctgccgcaacgtccagacctgggtcaagttcccactcctgctcccatagccttgacctgcttctgtcacagcactgatcacactgagatggaagactccagggggcaaggaccaagggccatatcccaagtgactttgtacccagaaaataacagctgttcaataaatgtgtattgagttaattagtt

SEQ ID NO: 56748 - DNA, 3801 bp, Homo Sapiens
cccacccttggtggcagaaccgagcactacccagcaaggtgtaattacttcaagcctccaggatggcaatccagttccgttcgctcttccccttggcattgcctgggatgctggcgctcctcggctggtggtggtttttctctcgtaaaaaaggccatgtcagcagccatgatgagcagcaggtggaggctggtgctgtgcagctgagggctgaccctgccatcaaggaacctctccccgtggaagacgtctgtcccaaagtagtgtccacaccccccagtgtcacagagcctccagaaaaggaactgtccaccgtgagcaagctgcctgcagagcccccagcattgctccagacacacccaccttgccgaagatcagagtcctcgggcattcttcctaacaccacagacatgagattgcgaccaggaacacgcagagatgacagtacaaagctggagctagccctgacaggtggtgaagccaaatcgattcctctagagtgccccctttcatccccaaagggtgtactattctccagcaaatcagctgaggtgtgtaagcaagattcccccttcagcagggtgccaaggaaggtccagccaggctaccccgtagtccccgcagagaagcgtagctctggggagagggcaagagagacaggtggggccgaagggactggtgatgccgtgttgggggaaaaggtgcttgaagaagctctgttgtctcgggagcatgtcttggaattggagaacagcaagggccccagcctggcctctttagagggggaagaagataaggggaagagcagctcatcccaggtggtggggccagtgcaggaggaagagtatgtagcagagaagttgccaagtaggttcatcgagtcggctcacacagagctggcaaaggacgatgcggcgccagcacccccagtcgcagacgccaaagcccaggatagaggtgtcgagggagaactgggcaatgaggagagcttggatagaaatgaggagggcttggatagaaatgaggagggcttggatagaaatgaggagagcttggatagaaatgaggagggcttggatagaaatgaggagattaagcgggctgccttccagataatctcccaagtgatctcagaagcaaccgaacaggtgctggccaccacggttggcaaggttgcaggtcgtgtgtgtcaggccagtcagctccaagggcagaaggaagagagctgtgtcccagttcaccagaaaactgtcttgggcccagacactgcggagcctgccacagcagaggcagctgttgccccgccggatgctggcctccccttgccaggcctaccagcagagggctcaccaccaccaaagacctacgtgagctgcctgaagagccttctgtccagccccaccaaggacagtaagccaaatatctctgcacaccacatctccctggcctcctgcctggcactgaccacccccagtgaagagttgccggaccgggcaggcatcctggtggaagatgccacctgtgtcacctgcatgtcagacagcagccaaagtgtccctttggtggcttctccaggacactgctcagattctttcagcacttcagggcttgaagactcttgcacagagaccagctcgagccccagggacaaggccatcaccccgccactgccagaaagtactgtgcccttcagcaatggggtgctgaagggggagttgtcagacttgggggctgaggatggatggaccatggatgcggaagcagatcattcaggagttgcagctccacccccgggaaagcggggcactttgataacgaggtgtcctgggtttttcgagtgctgaccccagcgtagacagttcagaccgctaacttacaggttctgacaggaacagcatggattccgtggatagctgttgcagtctcaagaagactgagagcttccaaaatgcccaggcaggctccaaccctaagaaggtcgacctcatcatctgggagatcgaggtgccaaagcacttagtcggtcggctaattggcaagcaggggcgctatgtgagttttctgaagcaaacatctggtgccaagatctacatttcaaccctgccttacacccagagcgtccagatctgccacatagaaggctctcaacatcatgtagacaaagcgctgaacttgattgggaagaagttcaaagagctgaacctcaccaatatctacgctcccccattgccttcactggcactgccttctctgccgatgacatcctggctcatgctgcctgatggcatcaccgtggaggtcattgtggtcaaccaggtcaatgccgggcacctgttcgtgcagcagcacacacaccctaccttccacgcgctgcgcagcctcgaccagcagatgtacctctgttactctcagcctggaatccccaccttgcccaccccagtggaaataacggtcatctgtgccgcccctggtgcggacggggcctggtggcgagcccaagtggttgcctcctacgaggagaccaacgaagtggagattcgatacgtggactacggcggatataagagggtgaaagtagacgtgctccggcaaatcaggtctgactttgtcaccctgccgtttcagggagcagaagtccttctggacagtgtgatgcccctgtcagacgatgaccagttttcaccggaagcagatgccgccatgagcgagatgacggggaatacagcactgcttgctcaggtgacaagttacagtccaactggtcttcctctgattcagctgtggagtgtggttggagatgaagtggtgttgataaaccggtccctggtggagcgaggccttgcccagtgggtagacagctactacacaagcctttgacccccatgctgcttcctgagagtctttttttgcactgttgaaattgggcttggcactcaagtcaaagatgaacatcggaataacaaacattgtcctctccagaaagtcctttctttatccatactgtagtcctattgagaagacatttcgtctctgagaaaaaaggatggaactatgggttctcttcgcaaagccaaaggatagtgtttaacaagccagctggcttatcctggttctcagctgtttaaaaaaaaaaaaaaaaaggaatagaaacagtttcaaccagattgtcctattccccctgttccattcccctcttcttccttctatctccttccccggcaaaaaccaaacaaactggcagacaggccagggatgtatgttgcttgcttgagagggtttcttttacttcaaaatctttcttcagggagcaagacatgaactgactaattggtatccactacttgtacagcttacataaatgagttgatgatatttaaccagtttttataaacttcatttaggtctctaaacacagactttttaaattgcaactgtaaatatgaaatggtcatcacatctgaccttggtcagtggggaggggaactggtatcctgccaagcctggttgtaatttgtaaccattttctatttgtgcaaactctgtaaatatgtgtttaaacaaatgtaatattttgtacaagatacactggagaacaaagggaactcaagattcttccagccacatgtcacctgtaggtagaagtaaactctgcagtgcagcttctgctcttggcccctctggccagggcccctgtggcttcctgcacactggacaggtgactgtatggtagagactgtgatctgggaactttttgctgtacaaatctgtttaaaaaaaaaaaaaagtaactcattgaattaa

SEQ ID NO: 56749 - DNA, 1782 bp, Homo Sapiens
gcggttcctctaggaaaattcctttgtgcagatcaggcccgtggattggtgagtgaatcctaaccacgtcttccctggcctgtcttcactcttctccccagaatcaccacttctgcactggtgtctgaaggtgtattgagtgattttgtggagggcagaagtaggaagtctttgggacaaaactgtatttaccttgggatctgtgaacaagaggaacctcagcagccaggacaggcaggagcagtggaatagctactatggcttctggaatcctggttaatgtaaaggaggaggtgacctgccccatctgcctggaactcctgacacaacccctgagcctggactgcggccacagcttctgccaagcatgcctcactgcaaaccacaagaagtccatgctagacaaaggagagagtagctgccctgtgtgccggatcagttaccagcctgagaacatacggcctaatcggcatgtagccaacatagtggagaagctcagggaggtcaagttgagcccagaggggcagaaagttgatcattgtgcacgccatggagagaaacttctactcttctgtcaggaggacgggaaggtcatttgctggctttgtgagcggtctcaggagcaccgtggtcaccacacgttcctcacagaggaggttgcccaggagtaccaagtgaagctccaggcagctctggagatgctgaggcagaagcagcaggaagctgaagagttggaagctgacatcagagaagagaaagcttcctggaagactcaaatacagtatgacaaaaccaacgtcttggcagattttgagcaactgagagacatcctggactgggaggagagcaatgagctgcaaaacctggagaaggaggaggaagacattctgaaaagccttacgaactctgaaactgagatggtgcagcagacccagtccctgagagagctcatctcagatctggagcatcggctgcaggggtcagtgatggagctgcttcagggtgtggatggcgtcataaaaaggacggagaacgtgaccttgaagaagccagaaacttttccaaaaaatcaaaggagagtgtttcgagctcctgatctgaaaggaatgctagaagtgtttagagagctgacagatgtccgacgctactggggctggagtgcaatggcacgatctcggttcactgcaacctccacctctcagattcaagcaattctcctgcctcagcctcccaagtagctgggattacaggtgcccaccaccacccctggctaaatttgtattttcagtagagacggggtttccccatgttggttaggctcgtctagaacctctgacctcaggtgatccacccgcctcggcctcccaaagtgctgggattacaggcgtgagccacggcgcccagcctgtgcttattttcttaaaataatttttgtattaaaaacttcacattaaataagtgctaatgttttattgcatagtagggtgactagagttaacaataacctattgcatatattttgaaatagctagaagagaggattttgaaagttctcaacacaaagaaatgacacatatttgaggtgatggatatgctaattaccctggttcggttattacgcaatgtatacatgtatcaaaacatcacactgtaccacataaatatgtatatttattatttgtcaattaaaagcaaaataaaacaaaaaaccttcatctaatactttggatcattgtgaaaaaataaattcctgaagtataaagaaaaaaaaaaaaaaaaaaa

SEQ ID NO: 56750 - DNA, 7586 bp, Homo Sapiens; identical to SEQ ID NO: 29429

SEQ ID NO: 56751 - DNA, 2777 bp, Homo Sapiens; identical to SEQ ID NO: 27047

SEQ ID NO: 56752 - DNA, 1677 bp, Homo Sapiens
gaattcgcggccgccccgcgccgccgcatctcctcgccgcctcccgggcttcggacccccggtctcgcccccgaaacatgactcgcgatttcaaacctggagacctcatcttcgccaagatgaaaggttatccccattggccagctcgagtagacgaagttcctgatggagctgtaaagccacccacaaacaaactacccattttcttttttggaactcatgagactgcttttttaggaccaaaggatatatttccttactcagaaaataaggaaaagtatggcaaaccaaataaaagaaaaggttttaatgaaggtttatgggagatagataacaatccaaaagtgaaattttcaagtcaacaggcagcaactaaacaatcaaatgcatcatctgatgttgaagttgaagaaaaggaaactagtgtttcaaaggaagataccgaccatgaagaaaaagccagcaatgaggatgtgactaaagcagttgacataactactccaaaagctgccagaagggggagaaagagaaaggcagaaaaacaagtagaaactgaggaggcaggagtagtgacaacagcaacagcatctgttaatctaaaagtgagtcctaaaagaggacgacctgcagctacagaagtcaagattccaaaaccaagaggcagacccaaaatggtaaaacagccctgtccttcagagagtgacatcattactgaagaggacaaaagtaagaaaaaggggcaagagggaaaacaacctaaaaagcagcctaagaaggatgaagagggccagaaggaagaagataagccaagaaaagagccggataaaaaagaggggaagaaagaagttgaatcaaaaaggaaaaatttagctaaaacaggggttacttcaacctccgattctgaagaagaaggagatgatcaagaaggtgaaaagaagagaaaaggtgggaggaactttcagactgctcacagaaggaatatgctgaaaggccaacatgagaaagaagcagcagatcgaaaacgcaagcaagaggaacaaatggaaactgagcaccaaacaacatgtaatctacagtaataaaaaatatatctcattttgggctcaaagcattaatccagttactgaaaagagaatacaagtggagcaaacaagagatgaagatcttgatacagactcattggactgaatttcccccttccccccatgatggaagaatgttcagattctaaattgaggacttcattattaatggcattactgtgttatgattaacaaatttcttgtaaggtacacactacatactaaggtcggccatcattccgtttttttttttttttttttttttaaccaagcttaaaatgaagcttaaaatgaagctttgtgtttgaaagtaataacaagctcagacgaagatggtggttgtacattattcatctagaaaatataaaaattcattttgttttgaagctagttattaaactggaatagcagttatatccctgagaatggggcccttctcttgacattccttttgttgtttaattctttagaatcttaataaatgtttttttaatcctgagagattaaacagtagtagacttgttaagaatgaaactgtaaccaaaattttaaaataaagttttttttaaaaaaaaaaaaaaaaaaaaaaaaaaaa

SEQ ID NO: 56753 - DNA, 3575 bp, Homo Sapiens
aggattctaaaaagagcaatggttcacaaggaaacttctgcctcaggtggggagaggagtccatagatcagggaaacttatgtcttggtgaaatggaagaccatgtttctaaacacctgtcgccaggttacttgaatttccactagaggagcagaaatgccaccaatgccaagtgccccacctgtgcatccacctccagatggaggatggggttggattgtggttggagcagcttttatctccattggattttcctatgcattccccaaagctgtcaccgtattcttcaaagaaattcagcaaatattccacactacctacagtgaaatagcatggatttcatccattatgctggctgttatgtacgcaggaggtcctgtaagtagtgttttggtgaataaatacggcagccggccggtggtgatagcaggaggcttattatgctgtcttggaatggtgttggcctcctttagtagcagcgtggtacagctgtacctcactatgggattcattacaggtttaggtttagccttcaacctgcaacccgccttaaccataattggcaaatacttctataggaagcgacccatggcaaatggattggccatggcaggaagtcctgttttcttaagttcattggctcctttcaatcagtacctttttaatacttttggctggaaaggaagcttcctgattttgggaagtctacttttgaatgcctgtgtggctggttccctcatgagaccccttggacccaatcaaaccacttctaagtctaaaaataagactggcaaaacagaagatgattcaagcccaaagaaaatcaaaacgaagaaatcaacttgggaaaaagttaataagtatttagatttctccctttttaagcatagaggatttctgatatatctgtctggaaatgtcattatgttcctaggtttttttgcccccattatattcttggctccatatgctaaagaccaaggaattgatgagtactcggcagcttttctgctatctgttatggctttcgttgatatgtttgctaggccttctgtaggattaattgcaaactccaaatatattcgacctcgaattcagtacttcttcagttttgcaatcatgttcaatggagtgtgtcacctcttgtgcccactggcacaggactacacaagcctggtattatatgctgtattttttggccttggatttgggagtgttagcagtgttctctttgaaactctcatggacctcgtgggtgcaccaagattttccagtgccgtcggacttgtcacaattgtggagtgtggcccagttcttcttggccctcctcttgcaggtaaattggtggatttaactggagaatataaatacatgtacatgtcctgtggggctattgtggtagcagcaagcgtgtggctgctcattggcaatgctatcaactatagattgcttgcaaaggaaaggaaggaggaaaatgcaaggcagaagaccagagaatctgaacccttgagcaaatctaaacattcggaagatgttaacgtcaaagtttcaaatgcacagagtgtaacctcagaaagagaaactaacatttaacaagaatcacatctctgatttcagtgtttatgactttatctaggagtttgtttttcattttgtttttttaaagtattagaaaaggttttagctgaaatgaggagtcacaattaaggatggaggtgatattttcctcaatggcaaattttaaattagtttttaaaaacttacttatttgggtagttaaattttgagattatgcatagaaagaatccatgctataggtttatttccatacctgactctgggtgtggtggttaaaatactaattttaaagtcttccagtgactttcggtcttggttatatggagaattctgaatcccaaacccctggtttaagtaggtagaaggaggatgcctaatcatacaaagtgaccctttatacatttcattttttatttgatattaaagtatgagatagagttgagagacaattaattatcccctcttacacacaaacacacatactcccacatacttacccacatgtacacagagtatctggagaataaaacccaaattcaaaaaaaaaaatgataatttatttttaaggtaaaaataatccatgaagataaaagaaacatatgtctgcgtgctactttacaatgttggttttaaagataagcacatgggtaaaaatgagggtgatccttattcaaaaataacatctgactactataaaaatatttgcatatataagtttgacaaagaaaagaaaatcaatgttaaaccattaaatctgagcactgttagacttgattaatccatgcacatgattttttttgagtagggagcattagtacctggtgctagagaatagaaccctcaaataatttttagaattcttacctaatatgtaaaagtctgcatgactcttaacaatgagtcacatccattgattttacagggattttagttcgtaatccagaaagtaataatcagggattttattttaatcaggcatcaatccagattcactgttatactgaaatatcaaagtaaaatcctagttggcaggattgtaagtagaccgaattctaatttttcccaacacatagtggtaattggaggttactgttatgaatactccatctgactacgactaagagagtgaggggtggttttaatgaaccctctaagctctctcagttccttcccttccacaaaatgcaagagcaaaagcaaactacaaacaggccttgtgctcaaccactggaaatgcctcctgggataagaatggcagcacttgaaaattctgccctctactgatgagacttcctgctgcctttggacataactaagccaggaaactttaaaagccttctagaaatagaggcactgtatgacttgcaatcgtaggtatagtttataacctgatagcaaaaaacttgaaatattgcagcccagtttaattcagcactttcccattttcataactatgtgaaaacatctgggaatttgaatcactcctgaatacagaggcatattctttttaaactataaataccattttgagtgagaaagtacttttaaacaagaaagaaattgtacattatgactaaagttataaatacaatatttatatctataaatctgaagtttaacatgattaatttaaaaagtatttagtgcttgacaaagtagtgtcactcttaagatgtcaaagggaattagccattttttttattgtaataaaggcaggtgctatttttttctggtgagattgcacctggataccaggcttttgtaatagttaacattaaacatttgattcataaagttaattcactgcttaagcatgtggctcatatttaggaagctatataaaattcagtttttcatttaacatttgctcttttgcatatgaagagatatttgtatttttcaaatgttaagtaaaacaagatgtgccaatatcataggtaaataaattagggaaaatgtgggaaaaaaaaaaaaaaaaaaaaaaaaaaaaaaaaaaa

SEQ ID NO: 56754 - DNA, 1332 bp, Homo Sapiens
agggtattaaaacggatccttaaaaatgaaagtgcaggctgaaagttggtagtgtgggaggtagagggtgtgtgttcttgtgcagaggagcgtggggtttgcagaggagacaggggagctttgtgtacccggagcaatgaacaagcggcgacttctctacccctcagggtggctccacggtcccagcgacatgcaggggctcctcttctccactcttctgcttgctggcctggcacagttctgctgcagggtacagggcactggaccattagatacaacacctgaaggaaggcctggagaagtgtcagatgcacctcagcgtaaacagttttgtcactggccctgcaaatgccctcagcagaagccccgttgccctcctggagtgagcctggtgagagatggctgtggatgctgtaaaatctgtgccaagcaaccaggggaaatctgcaatgaagctgacctctgtgacccacacaaagggctgtattgtgactactcagtagacaggcctaggtacgagactggagtgtgtgcataccttgtagctgttgggtgcgagttcaaccaggtacattatcataatggccaagtgtttcagcccaaccccttgttcagctgcctctgtgtgagtggggccattggatgcacacctctgttcataccaaagctggctggcagtcactgctctggagctaaaggtggaaagaagtctgatcagtcaaactgtagcctggaaccattactacagcagctttcaacaagctacaaaacaatgccagcttatagaaatctcccacttatttggaaaaaaaaatgtcttgtgcaagcaacaaaatggactccctgctccagaacatgtgggatgggaatatctaacagggtgaccaatgaaaacagcaactgtgaaatgagaaaagagaaaagactgtgttacattcagccttgcgacagcaatatattaaagacaataaagattcccaaaggaaaaacatgccaacctactttccaactctccaaagctgaaaaatttgtcttttctggatgctcaagtactcagagttacaaacccactttttgtggaatatgcttggataagagatgctgtatccctaataagtctaaaatgattactattcaatttgattgcccaaatgaggggtcatttaaatggaagatgctgtggattacatcttgtgtgtgtcagagaaactgcagagaacctggagatatattttctgagctcaagattctgtaaaaccaagcaaatgggggaaaagttagtcaatcctgtcatataataaaaaaattagtgagtataaaaaaaaaaaaaaa

SEQ ID NO: 56755 - DNA, 1349 bp, Homo Sapiens
gatcttaacaccacgccttgagcaagtcgcaagagcgggaggacacagaccaggaaccgagaagggacaagcacatggaagccagcccagcatccgggcccagacacttgatggatccacacatattcacttccaactttaacaatggcattggaaggcataagacctacctgtgctacgaagtggagcgcctggacaatggcacctcggtcaagatggaccagcacaggggctttctacacaaccaggctaagaatcttctctgtggcttttacggccgccatgcggagctgcgcttcttggacctggttccttctttgcagttggacccggcccagatctacagggtcacttggttcatctcctggagcccctgcttctcctggggctgtgccggggaagtgcgtgcgttccttcaggagaacacacacgtgagactgcgcatcttcgctgcccgcatctatgattacgaccccctatataaggaggcgctgcaaatgctgcgggatgctggggcccaagtctccatcatgacctacgatgaatttaagcactgctgggacacctttgtggaccaccagggatgtcccttccagccctgggatggactagatgagcacagccaagccctgagtgggaggctgcgggccattctccagaatcagggaaactgaaggatgggcctcagtctctaaggaaggcagagacctgggttgagcagcagaataaaagatcttcttccaagaaatgcaaacagaccgttcaccaccatctccagctgctcacagacgccagcaaagcagtatgctcccgatcaagtagatttttaaaaaatcagagtgggccgggcgcggtggctcacgcctgtaatcccagcactttggaggccaaggcgggtggatcacgaggtcaggagatcgagaccatcctggctaacacggtgaaaccctgtctctactaaaaatacaaaaaattagccaggcgtggtggcgggcgcctgtagtcccagctactctggaggctgaggcaggagagtagcgtgaacccgggaggcagagcttgcggtgagccgagattgcgctactgcactccagcctgggcgacagtaccagactccatctcaaaaaaaaaaaaaaccagactgaattaattttaactgaaaatttctcttatgttccaagtacacaatagtaagattatgctcaatattctcagaataattttcaatgtattaatgaaatgaaatgataatttggcttcatatctagactaacacaaaattaagaatcttccataattgcttttgctcagtaactgtgtcatgaattgcaagagtttccacaaacact

SEQ ID NO: 56756 - DNA, 2781 bp, Homo Sapiens; identical to SEQ ID NO: 31492

SEQ ID NO: 56757 - DNA, 1956 bp, Homo Sapiens
gggcacaggagtgcggccgggggcggggccgagtgggccccggtacgaaccctccgggaagccgggcgcgctgcctgcccttggcccggggcgcagagcgtcacactggatctggggagcatcctacccccactgtggacctcagtctcctcacctgagacatgggcggccccatccgcaccctgtaagccgcaagccaaggagattcctggcccccatcctggattcacttaactacatctcctggtggaagggccctgggatctgcactttcaacatgcttctagaatgattctgatgtttactgaaggttgagaactgcaaccctgtgggattaataatgactagagaatctgagaggcgtcatccctcaagtgtatcacttagttcaagagtcctggaatcttttcacatccactatgaacacctctcacctcctggccttgctgctcccaaaatctccacaaggtgaaaacagaagcaaacccctgggcaccccatacaacttctctgaacattgccaggattccgtggacgtgatggtcttcatcgtcacttcctacagcattgagactgtcgtgggggtcctgggtaacctctgcctgatgtgtgtgactgtgaggcagaaggagaaagccaacgtgaccaacctgcttatcgccaacctggccttctctgacttcctcatgtgcctcctctgccagccgctgacctccgtctacaccatcatggactactggatctttggagagaccctctgcaagatgtcggccttcatccagtgcatgtcggtgacggtctccatcctctcgctcgtcctcgtggccctggagaggcatcagctcatcatcaacccaacaggctggaagcccagcatctcacaggcctacctggggattgtgctcatctgggtcattgcctgtgtcctctccctgcccttcctggccaacagcatcctggagaatgtcttccacaagaaccactccaaggctctggagttcctggcggataaggtggtctgtaccgagtcctggccactggctcaccaccgcaccatctacaccaccttcctgctcctcttccagtactgcctcccactgggcttcatcttggtctgttatgcacgcatctaccggcgcctgcagaggcaggggcgcgtgtttcacaagggcacctacagcttgcgagctgggcacatgaagcaggtcaatgtggtgctggtggtgatggtggtggcctttgccgtgctctggctgcctctgcatgtgttcaacagcctggaagactggcaccatgaggccatccccatctgccatgggaacctcatcttcttagtgtgccacttgcttgccatggcctccacctgtgtcaacccattcatctatggctttctcaacaccaacttcaagaaggagatcaaggccctggtgctgacttgccagcagagcgcccccctggaggagtcagagcatctgcccctgtccacagtacatacggaagtctccaaagggtccctgaggctaagtggcaggtccaatcccatttaaccaggtctaggtcttctccctgccatgtcccttgccaggctcttccacttagctaagtgggcacactgcaagctggggtggcaccccagcattcctggctttctggggtccagataggctggcaagagctgtttttgcatccatttgcatcgtgaagactggcattttgatacttcagctgtttgttcctgggagaattctgagcacagattccagaggtcacagtaagccttgcagcttgagctgaaagatgccagagccggagatgtctgctggcagcaggcagggttcattctggtgacacagcaacagatgcctggcctgggaacccagggatttcacctccaccagtgagaccacggggccactgtggggtgagggaaggagcgcttggagtcagagctctaga

SEQ ID NO: 56758 - DNA, 1827 bp, Homo Sapiens; identical to SEQ ID NO: 32342

SEQ ID NO: 56759 - DNA, 1595 bp, Homo Sapiens
ccccggcgcagcgcggccgcagcagcctccgccccccgcacggtgtgagcgcccgacgcggccgaggcggccggagtcccgagctagccccggcggccgccgccgcccagaccggacgacaggccacctcgtcggcgtccgcccgagtccccgcctcgccgccaacgccacaaccaccgcgcacggccccctgactccgtccagtattgatcgggagagccggagcgagctcttcggggagcagcgatgcgaccctccgggacggccggggcagcgctcctggcgctgctggctgcgctctgcccggcgagtcgggctctggaggaaaagaaagtttgccaaggcacgagtaacaagctcacgcagttgggcacttttgaagatcattttctcagcctccagaggatgttcaataactgtgaggtggtccttgggaatttggaaattacctatgtgcagaggaattatgatctttccttcttaaagaccatccaggaggtggctggttatgtcctcattgccctcaacacagtggagcgaattcctttggaaaacctgcagatcatcagaggaaatatgtactacgaaaattcctatgccttagcagtcttatctaactatgatgcaaataaaaccggactgaaggagctgcccatgagaaatttacaggaaatcctgcatggcgccgtgcggttcagcaacaaccctgccctgtgcaacgtggagagcatccagtggcgggacatagtcagcagtgactttctcagcaacatgtcgatggacttccagaaccacctgggcagctgccaaaagtgtgatccaagctgtcccaatgggagctgctggggtgcaggagaggagaactgccagaaactgaccaaaatcatctgtgcccagcagtgctccgggcgctgccgtggcaagtcccccagtgactgctgccacaaccagtgtgctgcaggctgcacaggcccccgggagagcgactgcctggtctgccgcaaattccgagacgaagccacgtgcaaggacacctgccccccactcatgctctacaaccccaccacgtaccagatggatgtgaaccccgagggcaaatacagctttggtgccacctgcgtgaagaagtgtccccgtaattatgtggtgacagatcacggctcgtgcgtccgagcctgtggggccgacagctatgagatggaggaagacggcgtccgcaagtgtaagaagtgcgaagggccttgccgcaaagtgtgtaacggaataggtattggtgaatttaaagactcactctccataaatgctacgaatattaaacacttcaaaaactgcacctccatcagtggcgatctccacatcctgccggtggcatttaggggtgactccttcacacatactcctcctctggatccacaggaactggatattctgaaaaccgtaaaggaaatcacaggtttgagctgaattatcacatgaatataaatgggaaatcagtgttttagagagagaacttttcgacatatttcctgttcccttggaataaaaacatttcttctgaaattttaccgttaaaaaaaaaaaaaaaaaaaaaaaaa

SEQ ID NO: 56760 - DNA, 2196 bp, Homo Sapiens
ctcctcacaggtgtgtctctagtcctcgtggttgcctgccccactccctgccgagacgcctgccagaaaggtcacctatcctgaaccccagcaagcctgaaacagctcagccaagcaccctgcgatggaagctgcagatgcctccaggagcaacgggtcgagcccagaagccagggatgcccggagcccgtcgggccccagtggcagcctggagaatggcaccaaggctgacggcaaggatgccaagaccaccaacgggcacggcggggaggcagctgagggcaagagcctgggcagcgccctgaagccaggggaaggtaggagcgccctgttcgcgggcaatgagtggcggcgacccatcatccagtttgtcgagtccggggacgacaagaactccaactacttcagcatggactctatggaaggcaagaggtcgccgtacgcagggctccagctgggggctgccaagaagccacccgttacctttgccgaaaagggcgagctgcgcaagtccattttctcggagtcccggaagcccacggtgtccatcatggagcccggggagacccggcggaacagctacccccgggccgacacgggccttttttcacggtccaagtccggctccgaggaggtgctgtgcgactcctgcatcggcaacaagcagaaggcggtcaagtcctgcctggtgtgccaggcctccttctgcgagctgcatctcaagccccacctggagggcgccgccttccgagaccaccagctgctcgagcccatccgggactttgaggcccgcaagtgtcccgtgcatggcaagacgatggagctcttctgccagaccgaccagacctgcatctgctacctttgcatgttccaggagcacaagaatcatagcaccgtgacagtggaggaggccaaggccgagaaggagacggagctgtcactgcaaaaggagcagctgcagctcaagatcattgagattgaggatgaagctgagaagtggcagaaggagaaggaccgcatcaagagcttcaccaccaatgagaaggccatcctggagcagaacttccgggacctggtgcgggacctggagaagcaaaaggaggaagtgagggctgcgctggagcagcgggagcaggatgctgtggaccaagtgaaggtgatcatggatgctctggatgagagagccaaggtgctgcatgaggacaagcagacccgggagcagctgcatagcatcagcgactctgtgttgtttctgcaggaatttggtgcattgatgagcaattactctctccccccacccctgcccacctatcatgtcctgctggagggggagggcctgggacagtcactaggcaacttcaaggacgacctgctcaatgtatgcatgcgccacgttgagaagatgtgcaaggcggacctgagccgtaacttcattgagaggaaccacatggagaacggtggtgaccatcgctatgtgaacaactacacgaacagcttcgggggtgagtggagtgcaccggacaccatgaagagatactccatgtacctgacacccaaaggtggggtccggacatcataccagccctcgtctcctggccgcttcaccaaggagaccacccagaagaatttcaacaatctctatggcaccaaaggtaactacacctcccgggtctgggagtactcctccagcattcagaactctgacaatgacctgcccgtcgtccaaggcagctcctccttctccctgaaaggctatccctccctcatgcggagccaaagccccaaggcccagccccagacttggaaatctggcaagcagactatgctggtggtttaagcaaggtctgagcatccctcaagtcctgctgtggaccacacaaaggcaaggagctgaccaggaggtgtcagttccctgagagacagggccaaaggcagtgtacccttgagtctcactaccggccattctacgtcaacaaaggcaacgggattgggtccaacgaagccccatgagctcctggcggaagggtgctcaaggattggagaggagacaaaaccaggagcagcacagtggggacatctcccgtctcaacagccccaggcctatgggggctctggaaggatgggccagcttgcaggggttggggagggagacatccagcttgggctttcccctttggaataaaccattggtctgtc

SEQ ID NO: 56761 - DNA, 3756 bp, Homo Sapiens
gtcgggatggaggtgagaagacggccgtgacgcgcgcccgcggggccccctgcacccccagcagcccacagcgctccctgcccccctcccccgcagcagcgggccttgccgtcgagtgacagcggcctgggggggcagggggggcgggggcggccggatcagcgatgccggcgggcatgacgaagcatggctcccgctccaccagctcgctgccgcccgagcccatggagatcgtgcgcagcaaggcgtgctctcggcgggtccgcctcaacgtcggggggctggcgcacgaggtactctggcgtaccctggaccgcctgccccgcacgcggctgggcaagctccgcgactgcaacacgcacgactcgctgctcgaggtgtgcgatgactacagcctcgacgacaacgagtacttctttgaccgccacccgggcgccttcacctccatcctcaacttctaccgcactgggcgactgcacatgatggaggagatgtgcgcgctcagcttcagccaagagctcgactactggggcatcgacgagatctacctggagtcctgctgccaggcccgctaccaccagaagaaagagcagatgaacgaggagctcaagcgtgaggccgagaccctacgggagcgggaaggcgaggagttcgataacacgtgctgcgcagagaagaggaaaaaactctgggacctactggagaagcccaattcctctgtggctgccaagatccttgccataatttccatcatgttcatcgtcctctccaccattgccctgtccctcaacacgctgcctgagctacagagcctcgatgagttcggccagtccacagacaacccccagctggcccacgtggaggccgtgtgcatcgcatggttcaccatggagtacctgctgaggttcctctcctcgcccaagaagtggaagttcttcaagggcccactcaatgccattgacttgttggccattctgccatactatgtcaccattttcctcaccgaatccaacaagagcgtgctgcaattccagaatgtccgccgcgtggtccagatcttccgcatcatgcgaattctccgcatccttaagcttgcacgccactccactggcctccagtctctgggcttcactttgcggaggagctacaatgagttgggcttgctcatcctcttccttgccatgggcattatgatcttctccagccttgtcttctttgctgagaaggatgaggacgacaccaagttcaaaagcatcccagcctctttctggtgggccaccatcaccatgactactgttgggtatggagacatctaccccaagactctcctggggaaaattgttgggggactctgctgcattgcaggagtcctggtgattgctcttcccatccccatcatcgtcaataacttctctgagttctataaggagcagaagagacaggagaaagcaatcaaacggcgagaggctctggagagagccaagaggaatggcagcatcgtatccatgaacatgaaggatgcttttgcccggagcattgagatgatggacattgtggttgagaaaaatggggagaatatgggtaagaaagacaaagtacaagataaccacttgtctcctaacaaatggaaatggacaaagaggacactgtctgaaaccagctcaagtaagtcctttgaaaccaaggaacagggatcccctgaaaaagccagatcgtcttctagtcctcagcacctgaacgttcagcagttggaagacatgtacaataagatggccaagacccaatcccaacccatcctcaataccaaggagtcagcagcacagagcaaaccaaaggaagaacttgaaatggagagtatccccagccccgtagcccctctgcccactcgcacagaaggggtcattgacatgcgaagtatgtcaagcattgatagtttcattagctgtgccacagacttccctgaggccaccagattctcccacagccctttgacatcactccccagcaagactgggggcagcacagccccagaagtgggctggcggggagctctgggtgccagtggtggtaggtttgtggaggccaaccccagccctgatgccagccagcactctagtttcttcatcgagagccccaagagttccatgaaaactaacaaccctttgaagctccgagcacttaaagtcaacttcatggagggtgaccccagtccactcctccccgttctagggatgtaccatgaccctctcaggaaccgggggagtgctgcggctgctgtcgctggactggagtgtgccacgcttttggacaaggctgtgctgagcccagagtcctccatctacaccacagcaagtgctaagacacccccccggtctcctgagaaacacacagcaatagcgttcaactttgaggcgggtgtccaccagtacattgacgcagacacagatgatgagggacagctgctctacagtgtggactccagcccccccaaaagcctccctgggagcaccagtccgaagttcagcacggggacaagatcggagaaaaaccactttgaaagctcccctttacccacctcccctaagttcttaaggcagaactgtatttactccacagaagcattgactggaaaaggccccagtggtcaggaaaagtgcaaacttgagaaccacatctcccctgacgtccgtgtgttgccagggggaggagcccatggaagcacacgagatcagagcatctgaactgccctgccttggaggagagacttttgggtgaggtccaaagaggagagctgttcagcttacctgccacagagcttttctgcatgaactctggaacagaaaggccctgtaaagccctcagagagaagagagactccagagaaggctccctaagaccttgagagccatgacaggtccatcagcatgaagttggccaagccatagggcacagcacctccttgtaacaactctatagccctctttgggagatgacatgagtggaactcacagccaccactaccaccactttagacaggaccgaggccacatactccccattctctcgtggctttccatctcagcctcggagggcaacattgacagtcctcctggcttcagctagagaaggatgctggaacaagcggctggtgttgaaagagtgggttgaccaatttggtattgaatgttgcccagccacccctaggaacacctgtccatcacctcctggatggattccactgttagacagctacagggaatgattggtcatggggaagtctctgcgccataagccacgatcccagcgcaaaacccttactcaaatgtcttcattgacttcggtatttcatagtacctgagattttattttgagataccatcagggtgagttgcaccacttgtactcaattctaattgccccctggcaatctgggaagggttcagaaggtgggcacccagccaacagcatgaactcagagcattgttttagggttggaggaggaacacgctttctttacatcactagtgtagactcaaaagatatgcaagtgtcaaatatgcaaaagaaatagtttattcaaagagactgtgtgttactgaagaacagcataaaaatatgatttttttacttgcaaaaatgaaaggaaaaaaataccacgcattgaaatgcccagttcagactgaataattcctgctgcagcaaggaaagtacctactataatagaaattctgttttgttttctgtggttttcaagtt

SEQ ID NO: 56762 - DNA, 1689 bp, Homo Sapiens; identical to SEQ ID NO: 30377

SEQ ID NO: 56763 - DNA, 2533 bp, Homo Sapiens
atggcgcctactccctctccgagtgccatcgaattgtacacccaggcagtgacagtcgccaaccccgtggcgcgaggacacgcgcagcagggatgcggcacagcgcgcgctgcgctcggcaccggccagcccgggacgccccaggggccgccgcatcgtgtcccccgggccggggcgacctcggcagcccagagggcgtggaccctccggagtgcccagaaagcccccggggtggccctgcgcctcctggctctttctggatggaggcgcctccggaaggagccggctgcacgccgtggccttcacctcgcagcctctgctgaccacacctccctagcgcagaggctgcccgggagcaggaaatgctccaccagtcctgagcctccaggccgccggcactccccgttccccgttgcgggggacagtcctatagttgcagcagcacagccgactcccgggaatcggggtctgaccgccaggatggaagtggggccagccaccgagaccttcgtgctggaacttcaatgtcttgaggatgggggcccagggcctgacaccctctcaggtggcagcggtgggagcgagagtcaggaggaggaagagcctcaggagaggaacagcagtccacagcggccagcagtctcggccccacccgaggaggaggaagaggtggagctggagctcatgccggtggacctggggtcagagcaggagctggagcagcagcggcaggagttggagcggcagcaggagctggaacggcagcaggagcagcggcagctgcagctcaaactgcaggaggagctgcagcagctggagcaacagctggagcagcagcagcagcagctggagcagcaggaggtgcagctggagctgaccccggtggagctaggcgcccagcagcaggaggtgcagctggagctgacccccgtgcagccggagctgcagctggaactggtgccagccgcagggggcggcggagcggcggtcccgggggctccggccgcggtcgtggtggctcccccgggctacgtggtggtgcaggagctcatggtgctgcccgccgtggcagcgccggccgtggtggccatcccgggcccggcaggcagcgcggcgttgacccctgcacggcagcggcggcggcggcgcgctcgggaccggccgaccatctgcggggagtgcggcaagggcttcagccgcagcacggacctggtgcgccaccaggccacgcacacgggtgagcggccacaccgctgcggcgagtgcggcaagggcttctcgcagcactcgaatctggtgacgcaccaacgcatccacacgggcgagaaaccctacgcctgctcctactgcgccaagcgcttcagcgagagctcggcgctcgtgcagcaccagcgcacgcacaccggggagcgaccctacgcctgcggggactgtggcaagcgcttcagcgtctcctccaacctgctgcgccaccggcgcacgcactcgggcgagcggccctacgtgtgcgaggactgtggcgagcgcttccgacacaaggtgcagatccgccgccacgagcgccagctgcacggcgcgggccgctccaggggcctcggcctgctgcgcgcctcgcggccggcggccctcggtggcccagcccgcgcggagcaggccgctacagccactgcgcccgcagacaaggcgctgtgagggccgtgatcggggctgcctggccgggaggggaccccccacccgcctccacctgaaaagctccttgacccgggttcatgggcgctggaggcgtcctggaatatccctggagtaaaaggcttccaccatcatcatcatcatcatcttccggattccctgagaaaataccaggttcacagatttcaccgccagaaaaatccatccgccaaaagagaagtggaccggggctgaaacagcacacgggacacgtttgtctgccctttgaggggtctgccaaaggttttccctccgggaaaactggacttactacgaacgaggaaaaacccccagtggcgagacgattaatgacactggccgaggactggacacccaccagggaatcaagacgtggtgagacacacgtggaaaatcttcgatcctggtgaaaatgatcgcaaggagaaattcggggaggaagcaaacttgtttgcactatgtagaaactgaccaaggcatcgaatcgtcctcagacactgtgccattgctggggctggggaaagaatatctgagacgacgtttgggagcaatgctctttaccacgttcaccaagtcgtctggggcaggggttgtgagctgcagcagttgctggtgccttgtgggaaggtggggcagggaggaggctgcccgccacctctgcccccagtcacttcctgcttgacctgactcttcacatgtggctgcttaattcctgcccctctccccccagctgcttctcctttactaacacacctgctacattttacacatgtgttggtaagtgagaaacagaaacgaaaaataaattaaaatgcagaaatacaat

SEQ ID NO: 56764 - DNA, 2450 bp, Homo Sapiens
acagaagaatagagaggctgttgcagccccgtgctttctcctgctgctggccgattgcttgctctgaactaaccctctaacccttgggagtctgtgtgcagcagtgatgtgagctgcatccgggctgaaatgggagctcccgctatggcactggctcaaggagctaatctaaagagaaagtattttggggaagacatcttggttgcacccctcattgcatcttgactaattgcttccaactccgggggcttccagggacaatctcattgttcttttctctccaagggtcagccatgttaaccatttgttaatttcttctgaacagatcaagcaaaagtagataatcagccagaagaattagtgcgtagtgctgaagatgagtgatgacagagaaacagatacagcatcagaaagcagttaccagctcagcagacacaagaagagcccgagctctttaaccaatcttagcagctcctctggcatgacgtccttgtcttctgtgagtggcagtgtgatgagtgtttatagtggagactttggcaatctggaagttaaaggaaatattcagtttgcaattgaatatgtggagtcactgaaggagttgcatgtttttgtggcccagtgtaaggacttagcagcagcggatgtaaaaaaacagcgttcagacccatatgtaaaggcctatttgctaccagacaaaggcaaaatgggcaagaagaaaacactcgtagtgaagaaaaccttgaatcctgtgtataacgaaatactgcggtataaaattgaaaaacaaatcttaaagacacagaaattgaacctgtccatttggcatcgggatacatttaagcgcaatagtttcctaggggaggtggaacttgatttggaaacatgggactgggataacaaacagaataaacaattgagatggtaccctctgaagcggaagacagcaccagttgcccttgaagcagaaaacagaggtgaaatgaaactagctctccagtatgtcccagagccagtccctggtaaaaagcttcctacaactggagaagtgcacatctgggtgaaggaatgccttgatctaccactgctaaggggaagtcatctaaattcttttgttaaatgtaccatccttccagatacaagtaggaaaagtcgccagaagacaagagctgtagggaaaaccaccaaccctatcttcaaccacactatggtgtatgatgggttcaggcctgaagatctgatggaagcctgtgtagagcttactgtctgggaccattacaaattaaccaaccaatttttgggaggtcttcgtattggctttggaacaggtaaaagttatgggactgaagtggactggatggactctacttcagaggaagttgctctctgggagaagatggtaaactcccccaatacttggattgaagcaacactgcctctcagaatgcttttgattgccaagatttccaaatgagcccaaattccactggctcctccactgaaaactactaaaccggtggaatctgatcttgaaaatctgagtaggtggacaaatatcctcactttctatctattgcacctaaggaatactacacagcatgtaaaagtcaatctgcatgtgcttctttgattacaaggcccaagggatttaaatataacaaaatgtgtaatttgtgactctaatattaaataagatatttgaacaagctaggaaaattgaatttctgctgctgcttcaaagaaaaagctgccccagagcattaaacatggggtattgttaagaagcaaaatgttcttgtttgccatcatgtgtttcacaccacaattctgtgccacagttaagagggtctggtacccttgcaggacctttgtaggttgtgggaaaaagtcgcagaaagatactcaaagtggagcagggaatggagacagacatcagtgatgataaaaaaaaaaatggaccttaagaaactatttactctgtaatctctaataaaatatggaattccatattagggcaatgagactgaaactactggtgtttttctgccttgagaaaacaaacagttaaaacaagcctcaaatgtattttagtgccacccactggccataggtacaattcagttgttggcttgttttgacttaattctaaaataggtctcaagcctgtatttttatgagtttatttttttaaaaccctgcatatatatgattgtttttcttataactttactatatgaaagcagcataagagtagtcacaaacatgttttgcaacaaagttttaattagaatgtaagttgctcagttatactgttcttcttatgtatgtaaaattttcgtattttgtaaaaacccttagaataaattatcatttgatttaaattgtattagaaaattagcgtgacttctcattttaaataaaatattttaggaattctaaacatctaaaaa

SEQ ID NO: 56765 - DNA, 5446 bp, Homo Sapiens; identical to SEQ ID NO: 29342

SEQ ID NO: 56766 - DNA, 4753 bp, Homo Sapiens
atgctgctgctaggggtggtgggagcagccgtgggacgcgtggccgggagcgggggtgacagcctgggattccgggggcttctcttccttgtcctcctcctctcctctctattcccagtgtggccgtggctgacactaaagactttgtagccatcaacccgagtgcagtttcgatggaaaatgaaggttgcacgttttcaaaaaatacctaatggtgaaaatgagacaatgattcctgtattgacatcaaaaaaagcaagtgaattaccagtcagtgaagttgcaagcattctccaagctgatcttcagaatggtctaaacaaatgtgaagttagtcataggcgagcctttcatggctggaatgagtttgatattagtgaagatgagccactgtggaagaagtatatttctcagtttaaaaatccccttattatgctgcttctggcttctgcagtcatcagtgttttaatgcatcagtttgatgatgccgtcagtatcactgtggcaatacttatcgttgttacagttgcctttgttcaggaatatcgttcagaaaaatctcttgaagaattgagtaaacttgtgccaccagaatgccattgtgtgcgtgaaggaaaattggagcatacacttgcccgagacttggttccaggtgatacagtttgcctttctgttggggatagagttcctgctgacttacgcttgtttgaggctgtggatctttccattgatgagtccagcttgacaggtgagacaacgccttgttctaaggtgacagctcctcagccagctgcaactaatggagatcttgcatcgagaagtaacattgcctttatgggaacactggtcagatgtggcaaagcaaagggtgttgtcattggaacaggagaaaattctgaatttggggaggtttttaaaatgatgcaagcagaagaggcaccaaaaacccctctgcagaagagcatggacctcttaggaaaacaactttccttttactcctttggtataataggaatcatcatgttggttggctggttactgggaaaagatatcctggaaatgtttactattagtgtaagtttggctgtagcagcaattcctgaaggtctccccattgtggtcacagtgacgctagctcttggtgttatgagaatggtgaagaaaagggccattgtgaaaaagctgcctattgttgaaactctgggctgctgtaatgtgatttgttcagataaaactggaacactgacgaagaatgaaatgactgttactcacatatttacttcagatggtctgcatgctgaggttactggagttggctataatcaatttggggaagtgattgttgatggtgatgttgttcatggattctataacccagctgttagcagaattgttgaggcgggctgtgtgtgcaatgatgctgtaattagaaacaatactctaatggggaagccaacagaaggggccttaattgctcttgcaatgaagatgggtcttgatggacttcaacaagactacatcagaaaagctgaatacccttttagctctgagcaaaagtggatggctgttaagtgtgtacaccgaacacagcaggacagaccagagatttgttttatgaaaggtgcttacgaacaagtaattaagtactgtactacataccagagcaaagggcagaccttgacacttactcagcagcagagagatgtgtaccaacaagagaaggcacgcatgggctcagcgggactcagagttcttgctttggcttctggtcctgaactgggacagctgacatttcttggcttggtgggaatcattgatccacctagaactggtgtgaaagaagctgttacaacactcattgcctcaggagtatcaataaaaatgattactggagattcacaggagactgcagttgcaatcgccagtcgtctgggattgtattccaaaacttcccagtcagtctcaggagaagaaatagatgcaatggatgttcagcagctttcacaaatagtaccaaaggttgcagtattttacagagctagcccaaggcacaagatgaaaattattaagtcgctacagaagaacggttcagttgtagccatgacaggagatggagtaaatgatgcagttgctctgaaggctgcagacattggagttgcgatgggccagactggtacagatgtttgcaaagaggcagcagacatgatcctagtggatgatgattttcaaaccataatgtctgcaatcgaagagggtaaagggatttataataacattaaaaatttcgttagattccagctgagcacgagtatagcagcattaactttaatctcattggctacattaatgaactttcctaatcctctcaatgccatgcagattttgtggatcaatattattatggatggacccccagctcagagccttggagtagaaccagtggataaagatgtcattcgtaaacctcctcgcaactggaaagacagcattttgactaaaaacttgatacttaaaatacttgtttcatcaataatcattgtttgtgggactttgtttgtcttctggcgtgagctacgagacaatgtgattacacctcgagacacaacaatgaccttcacatgctttgtgttttttgacatgttcaatgcactaagttccagatcccagaccaagtctgtgtttgagattggactctgcagtaatagaatgttttgctatgcagttcttggatccatcatgggacaattactagttatttactttcctccgcttcagaaggtttttcagactgagagcctaagcatactggatctgttgtttcttttgggtctcacctcatcagtgtgcatagtggcagaaattataaagaaggttgaaaggagcagggaaaagatccagaagcatgttagttcgacatcatcatcttttcttgaagtatgatgcatattgcattattttatttgcaaactaggaattgcagtctgaggatcatttagaagggcaagttcaagaggatatgaagatttgagaactttttaactattcattgactaaaaatgaacattaatgttaaagacttaagactttaacctgctggcagtcccaaatgaaattatgcaactttgatatcatattccttgatttaaattggcttttgtgattgagtgaaactttataaagcatatggtcagttatttaattaaaaaggcaaaacctgaaccaccttctgcacttaaagaagtctaacagtacaaatacactatctatcttagatagatatatttttttttatttttaaatattgtactatttatggtggtggggctttcttactaatacacaaataaatttaatcatttcaaaggcattctatttggtttagaagttgattcccaggagtgccatatttcagctactgtatttcctttttcttgtaatgtaagcagctcagataccatgtgctatcatttttgtatcaagttttttgcacaggatgtgaccactgtcagatcactgttcttttctttctttttgtgattgaaaagcctatactacaatttgaagtaaatttttgtttttcttagtaagtgtaaatggttgctttatttttattttaaaaaggtatgtctttggtttggcagaattcatgcagggctatcaagtggtgttctagggtaacagtgtccataattaacgcttagtcatagagtcaaaaacatttaagactgattgggttgaagtttataataaattatattaacatgtcttcctttttgaggtaaagatatatactttgtcaaatatcattttgtcatcctctaaatataaatccaaatacctcagctaagtaattctattttattatttttactgttatgtatgtttttaatcatatttcttaggaagtataggctactggacttagaataaaaagtccccaaacccaaacaaatggtttatgaaccagagtatatgtggaagattctttgctggtcttgctctgtgtgcatctgaagcttctttggcctagattttagcacaaacctgagtatatctcttctactttcatcatgtgttctgtaccttctttttgtttcattgggcatgctagggaaataggtggattttgtgtgtaatgccatcagtttttatgaaagcttgatgaggtataggtcatttgttttgagtatgtgggccagaaatttaaaattagaaatttgtttttctgttgagtatataaacaaaaattggtcccaattctaacaggtttaatccttcttgaagccaataagttttatcttttataatctgtcaggatgaaccactccttagcttttatccaatattaaactgcaagtgttagcactgaaatattgtcattgatagggaaaatatctattctttgagtcattgttactgaggcagttgagtgtaaggagctggctgcagtttattctacttaaccctttaaggctgaattgtcaaatgtacattgttccatgtcgttagatggaacatggaagccattgtctaatcaactctatcattagtgacttgatgtctcataccttaattttgtaatgatttttattctctgttacaaagacttgaaatacgtattaaatgcacgttaatgttttgctttgcattttaggttcagattatgacttgattgaaataaatgtgcctatacattcatttgctttgtactataaaaataaaaatgatttcttaagttaaaaaaaaaaaaaaa

SEQ ID NO: 56767 - DNA, 4775 bp, Homo Sapiens
gaatgatgaaaaccgaggttggaaaaggttgtgaaaccttttaactctccacagtggagtccattatttcctctggcttcctcaaattcatattcacagggtcgttggctgtgggttgcaattaccatgtctgactcagtaattcttcgaagtataaagaaatttggagaggagaatgatggttttgagtcagataaatcatataataatgataagaaatcaaggttacaagatgagaagaaaggtgatggcgttagagttggcttctttcaattgtttcggttttcttcatcaactgacatttggctgatgtttgtgggaagtttgtgtgcatttctccatggaatagcccagccaggcgtgctactcatttttggcacaatgacagatgtttttattgactacgacgttgagttacaagaactccagattccaggaaaagcatgtgtgaataacaccattgtatggactaacagttccctcaaccagaacatgacaaatggaacacgttgtgggttgctgaacatcgagagcgaaatgatcaaatttgccagttactatgctggaattgctgtcgcagtacttatcacaggatatattcaaatatgcttttgggtcattgccgcagctcgtcagatacagaaaatgagaaaattttactttaggagaataatgagaatggaaatagggtggtttgactgcaattcagtgggggagctgaatacaagattctctgatgatattaataaaatcaatgatgccatagctgaccaaatggcccttttcattcagcgcatgacctcgaccatctgtggtttcctgttgggatttttcaggggttggaaactgaccttggttattatttctgtcagccctctcattgggattggagcagccaccattggtctgagtgtgtccaagtttacggactatgagctgaaggcctatgccaaagcaggggtggtggctgatgaagtcatttcatcaatgagaacagtggctgcttttggtggtgagaaaagagaggttgaaaggtatgagaaaaatcttgtgttcgcccagcgttggggaattagaaaaggaatagtgatgggattctttactggattcgtgtggtgtctcatctttttgtgttatgcactggccttctggtacggctccacacttgtcctggatgaaggagaatatacaccaggaacccttgtccagattttcctcagtgtcatagtaggagctttaaatcttggcaatgcctctccttgtttggaagcctttgcaactggacgtgcagcagccaccagcatttttgagacaatagacaggaaacccatcattgactgcatgtcagaagatggttacaagttggatcgaatcaagggtgaaattgaattccataatgtgaccttccattatccttccagaccagaggtgaagattctaaatgacctcaacatggtcattaaaccaggggaaatgacagctctggtaggacccagtggagctggaaaaagtacagcactgcaactcattcagcgattctatgacccctgtgaaggaatggtgaccgtggatggccatgacattcgctctcttaacattcagtggcttagagatcagattgggatagtggagcaagagccagttctgttctctaccaccattgcagaaaatattcgctatggcagagaagatgcaacaatggaagacatagtccaagctgccaaggaggccaatgcctacaacttcatcatggacctgccacagcaatttgacacccttgttggagaaggaggaggccagatgagtggtggccagaaacaaagggtagctatcgccagagccctcatccgaaatcccaagattctgcttttggacatggccacctcagctctggacaatgagagtgaagccatggtgcaagaagtgctgagtaagattcagcatgggcacacaatcatttcagttgctcatcgcttgtctacggtcagagctgcagataccatcattggttttgaacatggcactgcagtggaaagagggacccatgaagaattactggaaaggaaaggtgtttacttcactctagtgactttgcaaagccagggaaatcaagctcttaatgaagaggacataaaggatgcaactgaagatgacatgcttgcgaggacctttagcagagggagctaccaggatagtttaagggcttccatccggcaacgctccaagtctcagctttcttacctggtgcacgaacctccattagctgttgtagatcataagtctacctatgaagaagatagaaaggacaaggacattcctgtgcaggaagaagttgaacctgccccagttaggaggattctgaaattcagtgctccagaatggccctacatgctggtagggtctgtgggtgcagctgtgaacgggacagtcacacccttgtatgcctttttattcagccagattcttgggactttttcaattcctgataaagaggaacaaaggtcacagatcaatggtgtgtgcctactttttgtagcaatgggctgtgtatctcttttcacccaatttctacagggatatgcctttgctaaatctggggagctcctaacaaaaaggctacgtaaatttggtttcagggcaatgctggggcaagatattgcctggtttgatgacctcagaaatagccctggagcattgacaacaagacttgctacagatgcttcccaagttcaaggggctgccggctctcagatcgggatgatagtcaattccttcactaacgtcactgtggccatgatcattgccttctcctttagctggaagctgagcctggtcatcttgtgcttcttccccttcttggctttatcaggagccacacagaccaggatgttgacaggatttgcctctcgagataagcaggccctggagatggtgggacagattacaaatgaagccctcagtaacatccgcactgttgctggaattggaaaggagaggcggttcattgaagcacttgagactgagctggagaagcccttcaagacagccattcagaaagccaatatttacggattctgctttgcctttgcccagtgcatcatgtttattgcgaattctgcttcctacagatatggaggttacttaatctccaatgaggggctccatttcagctatgtgttcagggtgatctctgcagttgtactgagtgcaacagctcttggaagagccttctcttacaccccaagttatgcaaaagctaaaatatcagctgcacgcttttttcaactgctggaccgacaacccccaatcagtgtatacaatactgcaggtgaaaaatgggacaacttccaggggaagattgattttgttgattgtaaatttacatatccttctcgacctgactcgcaagttctgaatggtctctcagtgtcgattagtccagggcagacactggcgtttgttgggagcagtggatgtggcaaaagcactagcattcagctgttggaacgtttctatgatcctgatcaagggaaggtgatgatagatggtcatgacagcaaaaaagtaaatgtccagttcctccgctcaaacattggaattgtttcccaggaaccagtgttgtttgcctgtagcataatggacaatatcaagtatggagacaacaccaaagaaattcccatggaaagagtcatagcagctgcaaaacaggctcagctgcatgattttgtcatgtcactcccagagaaatatgaaactaacgttgggtcccaggggtctcaactctctagaggggagaaacaacgcattgctattgctcgggccattgtacgagatcctaaaatcttgctactagatgaagccacttctgccttagacacagaaagtgaaaagacggtgcaggttgctctagacaaagccagagagggtcggacctgcattgtcattgcccatcgcttgtccaccatccagaacgcggatatcattgctgtcatggcacagggggtggtgattgaaaaggggacccatgaagaactgatggcccaaaaaggagcctactacaaactagtcaccactggatcccccatcagttgacccaatgcaagaatctcagacacacatgacgcaccagttacaggggttgtttttaaagaaaaaaacaatcccagcaggagggattgctgggattgttttttctttaaagaagaatgttaatattttacttttacagtcattttcctacatcggaatccaagctaatttctaatggccttccataataattctgctttagatgtgtatacagaaaatgaaagaaactagggtccatatgagggaaaacccaatgtcaagtggcagctcagccaccactcagtgcttctctgtgcaggagccagtcctgattaatatgtgggaattagtgagacatcagggagtaagtgacactttgaactcctcaagggcagagaactgtctttcatttttgaaccctcggtgtacacagaggcgggtctataacaggcaatcaacaaacgtttcttgagctagaccaaggtcagatttgaaaagaacagaaggactgaagaccagctgtgtttcttaactaaatttgtctttcaagtgaaaccagcttccttcatctctaaggctaaggatagggaaagggtggatgctctcaggctgagggaggcagaaagggaaagtattagcatgagctttccagttagggctgttgatttatgctttaacttcagagtgagtgtaggggtggtgatgct

SEQ ID NO: 56768 - DNA, 1309 bp, Homo Sapiens
ggacaggtgccccgggagcttcccgctcgcgaagacccagacggctgcaggagcccgggcagcctcggggtcagcggcaccatgaacgtctcgggctgcccaggggccgggaacgcgagccaggcgggcggcgggggaggctggcaccccgaggcggtcatcgtgcccctgctcttcgcgctcatcttcctcgtgggcaccgtgggcaacacgctggtgctggcggtgctgctgcgcggcggccaggcggtcagcactaccaacctgttcatccttaacctgggcgtggccgacctgtgtttcatcctgtgctgcgtgcccttccaggccaccatctacaccctggacggctgggtgttcggctcgctgctgtgcaaggcggtgcacttcctcatcttcctcaccatgcacgccagcagcttcacgctggccgccgtctccctggacaggtatctggccatccgctacccgctgcactcccgcgagctgcgcacgcctcgaaacgcgctggcagccatcgggctcatctgggggctgtcgctgctcttctccgggccctacctgagctactaccgccagtcgcagctggccaacctgaccgtgtgccatcccgcgtggagcgcccctcgccgccgcgccatggacatctgcaccttcgtcttcagctacctgcttcctgtgctggttctcggcctgacctacgcgcgcaccttgcgctacctctggcgcgccgtcgacccggtggccgcgggctcgggtgcccggcgcgccaagcgcaaggtgacacgcatgatcctcatcgtggccgcgctcttctgcctctgctggatgccccaccacgcgctcatcctctgcgtgtggttcggccagttcccgctcacgcgcgccacttatgcgcttcgcatcctctcgcacctggtctcctacgccaactcctgcgtcaaccccatcgtttacgcgctggtctccaagcacttccgcaaaggcttccgcacgatctgcgcgggcctgctgggccgtgccccaggccgagcctcgggccgtgtgtgcgctgccgcgcggggcacccacagtggcagcgtgttggagcgcgagtccagcgacctgttgcacatgagcgaggcggcgggggcccttcgtccctgccccggcgcttcccagccatgcatcctcgagccctgtcctggcccgtcctggcagggcccaaaggcaggcgacagcatcctgacggttgatgtggcctgaaagcacttagcgggcgcgctgggatgtcacagagttggagtcattgttgggggaccgtgggccg

SEQ ID NO: 56769 - DNA, 4366 bp, Homo Sapiens
tgcattctttgccccaaaactctttcctttggttgtgctaagaggtgatgcccaaggtgcaccacctttcaagaactggatcatgaacaactttatcctcctggaagaacagctcatcaagaaatcccaacaaaagagaagaacttctccctcgaactttaaagtccgcttctttgtgttaaccaaagccagcctggcatactttgaagatcgtcatgggaagaagcgcacgctgaaggggtccattgagctctcccgaatcaaatgtgttgagattgtgaaaagtgacatcagcatcccatgccactataaatacccgtttcaggtggtgcatgacaactacctcctatatgtgtttgctccagatcgtgagagccggcagcgctgggtgctggcccttaaagaagaaacgaggaataataacagtttggtgcctaaatatcatcctaatttctggatggatgggaagtggaggtgctgttctcagctggagaagcttgcaacaggctgtgcccaatatgatccaaccaagaatgcttcaaagaagcctcttcctcctactcctgaagacaacaggcgaccactttgggaacctgaagaaactgtggtcattgccttatatgactaccaaaccaatgatcctcaggaactcgcactgcggcgcaacgaagagtactgcctgctggacagttctgagattcactggtggagagtccaggacaggaatgggcatgaaggatatgtaccaagcagttatctggtggaaaaatctccaaataatctggaaacctatgagtggtacaataagagtatcagccgagacaaagctgaaaaacttcttttggacacaggcaaagaaggagccttcatggtaagggattccaggactgcaggaacatacaccgtgtctgttttcaccaaggctgttgtaagtgagaacaatccctgtataaagcattatcacatcaaggaaacaaatgacaatcctaagcgatactatgtggctgaaaagtatgtgttcgattccatccctcttctcatcaactatcaccaacataatggaggaggcctggtgactcgactccggtatccagtttgttttgggaggcagaaagccccagttacagcagggctgagatacgggaaatgggtgatcgacccctcagagctcacttttgtgcaagagattggcagtgggcaatttgggttggtgcatctgggctactggctcaacaaggacaaggtggctatcaaaaccattcgggaaggggctatgtcagaagaggacttcatagaggaggctgaagtaatgatgaaactctctcatcccaaactggtgcagctgtatggggtgtgcctggagcaggcccccatctgcctggtgtttgagttcatggagcacggctgcctgtcagattatctacgcacccagcggggactttttgctgcagagaccctgctgggcatgtgtctggatgtgtgtgagggcatggcctacctggaagaggcatgtgtcatccacagagacttggctgccagaaattgtttggtgggagaaaaccaagtcatcaaggtgtctgactttgggatgacaaggttcgttctggatgatcagtacaccagttccacaggcaccaaattcccggtgaagtgggcatccccagaggttttctctttcagtcgctatagcagcaagtccgatgtgtggtcatttggtgtgctgatgtgggaagttttcagtgaaggcaaaatcccgtatgaaaaccgaagcaactcagaggtggtggaagacatcagtaccggatttcggttgtacaagccccggctggcctccacacacgtctaccagattatgaatcactgctggaaagagagaccagaagatcggccagccttctccagactgctgcgtcaactggctgaaattgcagaatcaggactttagtagagactgagtaccaggccacgggctgcagatcctgaatggaggaaggatatgtcctcattccatagagcattagaagctgccaccagcccaggaccctccagaggcagcctggcctgtggcatcagtccctgagtcaccatggaagcagcatcctgaccacagctggcagtcaagccacagctggagggtcagccaccaagctgggagctgagccagaacaggagtgatgtctctgcccttcctctagcctcttgtcacatgtggtgcacaaacctcaacctgacagctttcagacagcattcttgcacttcttagcaacagagagagacatgagtaagacccagattgctatttttattgttatttttaacatgaatctaaagtttatggttccagggactttttatttgacccaacaacacagtatcccaggatatggaggcaaggggaacaaagagcatgagtctttttccaagaaaactggtgagttaagtaagattagagtgagtgtgctctgttgctgtgatgctgtcagccacagcttcctgccgtagagaatgatagagcagctgctcacacaggaggccggatattctgagaagcagctttatgaggttttacagagtatgctgctacctctctccttgaagggagcatggcgagacccattggatggattggggtgaacagttcaggtcccatgcttggagcattgggtatctgatgtctgcaccagaacaagagaacctctgacggtggagaaccatgtggtgcaagaagagatcttaggtctcttcttttataccaagctcatcttttataccaagctgtgcaggtgactatgcctcctcttctgcacagaatgcttccaccagcatcctgagaagaaatgattacttctgaaaaacatccttttttccagcctctgggaatcagccccccctctctgcactatccgatcctcatcaacagagggcagcattgtgttggtcaatgttcccttggcgagcaattgaaacttgtttaggccctagggttgagcaattttaaggttgagactccaagtctcctaaaattctaggagagaaataaagagtctgtttttgctcaaaccatcaggatggaaacagtcaggcactgactggggtgcttccaagaggcatgagagtgcctactctggcttgagcacttctatatgcaaggtgaatatgtactgagctaggagacttccctgcaaaatctctgttcaccctgggttcacatccccatgaggtaatattattattcccattttacaaataatgtaactgaggctttaaaaagccaagacatctgcccaaagtgatggaactagaaagtctagagctggtattctagcccaaatctgtctgaccgcaatacacagattctttattcctattcgacactggcttctactgaaaatgaaacggattgcagagggaataaatacaaagatggaaagccagtaaagaagtcagtatagaaccactagcgaatagtgttgctctggcacagaccactgtggttgatggcatggccctccaacttggaataggattttccttttcctattctgtatccttaccttggtcatgttaatgactttggagttattcagttaatgaccctttaattctcacaaccaaccagtcatgttgcttgaagccatttatagacgagcttcaaagcaactttaaaagattcttctgtagaagtatgagttcttcctttaattatcattccaactttcagctgtagtcttcttgaacacttcatgaggagggacattccctgatataagagaggatggtgttgcaattggctctttctaaatcatgtgacgttttgactggcttgagattcagatgcataatttttaattataattattgtgaagtggagagcctcaagataaaactctgtcattcagaagatgattttactcagcttatccaaaattatctctgtttactttttagaattttgtacattatcttttgggatccttaattagagatgatttctggaacattcagtctagaaagaaaacattggaattgactgatctctgtggtttggtttagaaaattcccctgtgcatggtattacctttttcaagctcagattcatctaatcctcaactgtacatgtgtacattcttcacctcctggtgccctatcccgcaaaatgggcttcctgcctggtttttctcttctcacattttttaaatggtcccctgtgtttgtagagaactcccttatacagagttttggttctagttttatttcgtagattttgcattttgtaccttttgagactatgtatttatatttggatcagatgcatatttattaatgtacagtcactgctagtgttcaaaataaaaatgttacaaat

SEQ ID NO: 56770 - DNA, 2229 bp, Homo Sapiens
ggagtaacagtgtcgccgccgccttcctcctcctcctctcgccgctaccgccgtcgccgccgccgcagccgccgccggtccgcgcggcctcgggtggccggagctcagcctgcgcgcgccgcgccctgtgtctccgggtggggcagaagactcgccccttgaacctcccgcggggactctccgtggtgtggcggccctggggctctttcttaatagccccggactgagtcccctccagtcgaggaccctctcctagtccactgacgagcggtggacacctgccgctgtatctcccccaaaccgagtccttgccctgctgcctcctcatacccacacggcggcagagaccttcaccatagcgttcgctcaactccagaaccttccgacctccgctagttcctgcgggcctttgcccgcttcccggtgcaccctccccgggagacacctcagacccccgacagcctgggcaggctcggtgcctgcgggtgcgttcctgatcacccctcccctcttccctccccctcatcctccattcccttgttttcaccctctgtcctctgcccgtcactccccttgtcacctcttggagccccctcctaaccagcggccagtgggtttcccataccccaggatgtgagcctctttaacctgtaatgctgtggctagcccttggcccctttcctgccatggagaaccaggtgctggtaattcgcatcaagatcccaaatagtggcgcggtggactggacagtgcactccgggccgcagttactcttcagggatgtgctggatgtgataggccaggttctgcctgaagcaacaactacagcatttgaatatgaagatgaagatggtgatcgaattacagtgagaagtgatgaggaaatgaaggcaatgctgtcatattattattccacagtaatggaacagcaagtaaatggacagttaatagagcctctgcagatatttccaagagcctgcaagcctcctggggaacggaacatacatggcctgaaggtgaatactcgggccggaccctctcaacacagcagcccagcagtctcagattcacttccaagcaatagcttaaagaagtcttctgctgaactgaaaaaaatactagccaatggccagatgaatgaacaagacatacgatatcgggacactcttggtcatggcaacggaggcacagtctacaaagcatatcatgtcccgagtgggaaaatattagctgtaaaggtcatactactagatattacactggaacttcagaagcaaattatgtctgaattggaaattctttataagtgcgattcatcatatatcattggattttatggagcattttttgtagaaaacaggatttcaatatgtacagaattcatggatgggggatctttggatgtatataggaaaatgccagaacatgtccttggaagaattgcagtagcagttgttaaaggccttacttatttgtggagtttaaagattttacatagagacgtgaagccctccaatatgctagtaaacacaagaggacaggttaagctgtgtgattttggagttagcactcagctggtgaattctatagccaagacgtatgttggaacaaatgcttatatggcgcctgaaaggatttcaggggagcagtatggaattcattctgatgtctggagcttaggaatctcttttatggagattcagaaaaaccagggatctttaatgcctctccagcttctgcagtgcattgttgatgaggattcgcccgtccttccagttggagagttctcggagccatttgtacatttcatcactcagtgtatgcgaaaacagccaaaagaaaggccagcacctgaagaattgatgggccacccgttcatcgtgcagttcaatgatggaaatgccgccgtggtgtccatgtgggtgtgccgggcgctggaggagaggcggagcctggcttccctgccctcgccttcacctctgtcagcaggtggccttgcctggggagccccatgtgtggcccaccccaccaggccatccccataccttctggtttgaaggcgctgacactggcagagaggtaaagggtggggcattgagaatggaggctcccagggtccctgcccacttctgttttcctaatgtttttctctataaagggtcaggcccgtcagcatcactgatgggaataaaagtattaatgctttgtgacaaaaaaaaaaaaaaaaaa

SEQ ID NO: 56771 - DNA, 2127 bp, Homo Sapiens
gcagagcggcggcttctctcgcgaggacggacgccattatcgcatctccccgacaaacaccacgagaattccgcagcccacacggtgaccaaaagccagccccactgtgagttgaactctttcgtgttgaccggccactctccgtgctctggatgatgtcggaacacgacctggccgatgtggttcagattgcagtggaagacctgagccctgaccacccagttgttttggagaatcatgtagtgacagatgaagacgaacctgctttgaaacgccagcgactagaaatcaattgccaggatccatctataaagtcattcctgtattccatcaaccagacaatctgcttgcggttggatagcattgaagccaaattgcaagccctggaggctacttgtaaatccttagaagaaaagctggatctggtcacgaacaagcagcacagccccatccaggtccccatggtggccggctcccctctcggggcaacccagacgtgcaacaaagtgcgatgcgctgtgcctgggcgtcggcagaacaccattgtggtgaaggtgccgggccaagaagacagccaccacgaggacggggagagcggctcggaggccagcgactctgtgtccagctgtgggcaggcgggcagtcagagcatcgggagcaacgtcacgctcatcaccctgaactcggaagaggactaccccaatggcacctggctgggcgacgagaacaaccccgagatgcgggtacgctgcgccatcatcccctccgacatgctgcacatcagcaccaactgccgcacggccgagaagatggcgctaacgctgctggactacctcttccaccgcgaggtgcaggctgtgtccaacctctcggggcagggcaagcacgggaagaagcagctggacccgctcaccatctacggcatccggtgtcaccttttctataaatttggcatcacagaatccgactggtaccgaatcaagcagagcatcgactccaagtgccgcacggcgtggcggcgcaagcagcggggccagagcctggcggtcaagagcttctcgcggagaacgcccaactcgtcctcctactgcccttcagagccgatgatgagcaccccacctcctgccagcgagctcccgcagccacagccgcagccgcaggccctgcactacgcgctggccaacgcacagcaggtgcagatccaccagatcggagaagacggacaggtgcaagtaggacacctccacatcgcccaggtgccgcagggggagcaagtccagatcacgcaggacagcgagggcaacctccagatccatcacgtggggcaggacggtcaggtgctgcagggtgcacagctgatcgccgtggcctcctcggaccccgcggcggcgggcgtggatgggtcgccactccagggcagcgacatccaggttcagtacgtgcagctggcgccagtgagtgaccacacggccggggcacagacggccgaagccctgcagcccacgctacagccggagatgcagctcgagcacggggccatccagattcagtgagcggtgcccatggcaccaggagcccctcgccggctccgcctacggcccggcccccacgcgccctgctctcacggcctcggcacaggcagcggctgcacgtgttctgctgaagtgcgtctgaaggccgctgcctccgcggggaacagcatcctatgaactgaaagagcagccgccgccgcccccagccggagacccctttcgtttgagtcctgctgttggtgtcggagcacgaggggaggcacggtgcggagagcgtcgcatatgcgcgggaaatcaagaactatgatatttttctgtttaaacagctttttttaatttgctatggtgtttataacaaaaaagaaaatttgaaaaaaaaaatcccaggggagtagcaggagccctttgctgtgtgctctgtccagtgtcatgagacgggagccctttgctgtgtgctctgtccagtgtcatgaggcaggtgtttgcaaagccagctctcggttccgatggggtattgctgacctacttttctaggggaaatgctcttaaacactgtaattatgcatttctaatgaaataaaatgtatttatgacc

SEQ ID NO: 56772 - DNA, 3633 bp, Homo Sapiens
gctgcctgggcaacagctctggctctggatgtaaaagccccctgggagggtttcagggctgcctaaggctcatcaccattggtgacaaagcggtggatcccatcttagtacagcagggggcgctggggagtttcagggacctccagatagactcctgcggcatcacagacaggtgcttgcccagctactgtgagcatgggggcgagtgttcccagtcgtgggacaccttctcctgtgattgtctgggcacaggctatacgggcgagacctgccattcctctctctacgagcagtcttgtgaagcccacaagcaccgagggaacccatccgggctttactatattgatgcagatggaagtggccccctgggaccatttcttgtgtactgcaatatgacagcagactccgcgtggacggtggtgcggcacggtggccccgacgcggtgaccctccgaggtgcccccagtgggcacccgcgctcggctgtgtccttcgcgtacgcagcgggcgcggggcagctgcgggccgcggtgaacctggcggagcgctgagggcagcggctggctctgctctgcgggacagcgcggcgcccggactcacaagatggaaccccactgagctggtgggttggaagaaccaatgaaacacacacttcctggggaggttctctgcctgatgctcaaaagtgtacttgtggattagaggggaactgcattgattctcagtattactgcaactgtgatgctggccggaatgaatggactagtgacacaatagtcctttcccaaaaggagcacctcccagtcactcagattgtgatgacagacgcaggccaaccacattccgaagcagattatacactggggccactgctctgccgcggagataagtcattctggaattcagcttccttcaacactgagacttcataccttcatttccctgctttccacggagaactcactgctgacgtgtgcttcttttttaagaccacagtttcctccggggtgtttatggagaacctggggatcacagacttcatcaggattgagctgcgggctcccacagaagtgaccttttccttcgatgtggggaatggaccttgtgaggtcacggtgcagtcacccactccctttaatgacaatcagtggcaccacgtgagggcagagagaaatgttaaaggagcgtctcttcaagttgatcagcttcctcagaagatgcagcctgcccctgctgatgggcacgttcgtttacagctcaacagccagctcttcattggtggaacggccaccagacagagaggctttctaggatgcattcggtctctgcagttgaacggggtggccctggatcttgaagaaagagccacagtgatgccaggagtggagccagggtgtgcaggacactgcagcacctatggacacttgtgtcgcaatggagggagatgcagagagaaacgcaggggggtcacctgtgactgtgccttctcagcctatgatggaccgttctgctccaatgagatttccgcatatttcgcaactggctcctcaatgacataccattttcaagaacattacactttaagtgaaaactccagctctctcgtttcttcattacacagagatgtaacattgaccagagaaatgatcacactgagcttccgaaccacacgaactccgagcttattgctgtatgtgagctctttctatgaggaatacctttcagttatcctcgccaacaatggaagtttgcagattaggtacaagctagatagacatcaaaatcctgatgcatttacctttgattttaaaaacatggctgatgggcaacttcaccaagtgaagattaacagagaagaagccgtggtcatggtagaggtaatcccacaaatgcaaaagtcaaactaactaatattattattttgagaacaaataatctaatgaaaaaatttgataataaatattaatagaagagcaacccattcagtgctgctcttccataagtcaagaagaggctaaatatggccaggatctgggagagaggaggtggttgtttattctgtattgctttgttttgtttgtttagcaatgcaattccgtcaaaggtattattaatattttactatttaaaatatcaaaatatctttatttgttttactttactcaataggggaatgttctctagtttatcatagtgactactggtggaatctattcattgatattgcagtgggaacttgtcttattccgattataaaagaacaaatactttagcaacttaaaaacacggtttaaaagcacacaacatagttattaaaatgggaataagtaagaaaatagacctgagtcaccacagaggaagtaaattacacattgtcattggcattggaaggaaaatatactgtatagagaacagcagtgcttggttttatgtttcatattttctccacagaatgagtacgtatttaagtttaaaacagccagttccatctttttcatggattctgccaattatagatccttccattatgaagaagagtaaagccagcaagtgggtacatcgtggatagggtggtagctgatggcatcataggaattgcttataaaatagcttccccttctaaatgattaattatttgaaggtggcttcttgagcttttgtagtggtacttaaaagtgatttattttcatctttcctttcctcatcttcctttgcttccttatcattaaaattgtactttgtgttgatgtttgcttctcatgggacatctaataggttaaccagagcgcaaagaaacaagtcatcttgtcctcagggacagaattcaacgccgtcaaatctctcatattgggaaaggttttaggtaagtaggagaaagagctttttcccaaaaaatctaagtgtcatgtcacaaactctggaagcattcatcatgctgaaagaagctccttgtcttacttgaataataatttcacagtgagtgacaatcaaggtgcaaactgtactcttgcctgagtgtacatataatcatgagtaagtgctgcctgtgagatgtgcaagggcgttcctggaaaaatacctccacacttaacctctcacttggcaatcatgcataatgaatcacggtatttttctaacccttcttgaaaagtgaaatgttatcaaagctgacacgaagttcacagattatgtatgtattaatcaacatcaactccggagaccatcattcaatgataaaactacatttgagttgaacacaagagaaaaaactggtaatcttattacagcagatgaatacagttttatttctctctcaagccctgctttgcctgttgtttccatcctttttgactttagtatctaacaggaatggggaggcatattcataaatatctgttacgcaaggtagaaagttacagtaattgtctatcatattgtctatcataacctgttgtaaaagcacagttagctttacatttaataaaggaactgaggaaagtaatcttttttaaaaaaaacccatcttatgtaactcaattaagaaaatgaactatactttaatattaggatcaaaaagttgaataatatttattatatacatctttgtttccttccaaataaaggagaacatgg

SEQ ID NO: 56773 - DNA, 1710 bp, Homo Sapiens
agacgcttcagagatcctctggaggcctgggggagcttttgagtactttatttcagttggtccctgagctcggtgagtggggcgggtagagccaccaggggaatcaacagtggtttctcgtgcccctcagggtcaggagcagtctgatcaaaaggagggcatccactgtccggggccattcccacagctcccggatgctgggtctggaggctgcgcccttcccctgcaggagctcagcccagtgggcagtctgaagatggccaattacacgctggcaccagaggatgaatatgatgtcctcatagaaggtgaactggagagcgatgaggcagagcaatgtgacaagtatgacgcccaggcactctcagcccagctggtgccatcactctgctctgctgtgtttgtgatcggtgtcctggacaatctcctggttgtgcttatcctggtaaaatataaaggactcaaacgcgtggaaaatatctatcttctaaacttggcagtttctaacttgtgtttcttgcttaccctgcccttctgggctcatgctgggggcgatcccatgtgtaaaattctcattggactgtacttcgtgggcctgtacagtgagacatttttcaattgccttctgactgtgcaaaggtacctagtgtttttgcacaagggcaactttttctcagccaggaggagggtgccctgtggcatcattacaagtgtcctggcatgggtaacagccattctggccactttgcctgaatacgtggtttataaacctcagatggaagaccagaaatacaagtgtgcatttagcagaactcccttcctgccagctgatgagacattctggaagcattttctgactttaaaaatgaacatttcggttcttgtcctccccctatttatttttacatttctctatgtgcaaatgagaaaaacactaaggttcagggagcagaggtatagccttttcaagcttgtttttgccataatggtagtcttccttctgatgtgggcgccctacaatattgcatttttcctgtccactttcaaagaacacttctccctgagtgactgcaagagcagctacaatctggacaaaagtgttcacatcactaaactcatcgccaccacccactgctgcatcaaccctctcctgtatgcgtttcttgatgggacatttagcaaatacctctgccgctgtttccatctgcgtagtaacaccccacttcaacccagggggcagtctgcacaaggcacatcgagggaagaacctgaccattccaccgaagtgtaaactagcatccaccaaatgcaagaagaataaacatggattttcatctttctgcattatttcatgtaaattttctacacatttgtatacaaaatcggatacaggaagaaaagggagaggtgagctaacatttgctaagcactgaatttgtctcaggcaccgtgcaaggctctttacaaacgtgagctccttcgcctcctaccacttgtccatagtgtggataggactagtctcatttctctgagaagaaaactaaggcgcggaaatttgtctaagatcacataactaggaagtggcagaactgattctccagccctggtagcatttgctcagagcctacgcttggtccagaacatcaaactccaaaccctggggacaaacgacatgaaataaatgtattttaaaacatctaaaaaaaaaaa

SEQ ID NO: 56774 - DNA, 2796 bp, Homo Sapiens
tccctccttttctttccaagtcacaaaattctcccctcccctaccccggagtttacggccctcctcctgtttccgatttcagcccggaaccggaagtgtagtgggcggggcccgtcggcggaaaacgcagcggagccagagccggacacggctgtggccgctgcctctacccccgccacggatcgccgggtagtaggactgcgcggctccaggctgagggtcggtccggaggcgggtgggcgcgggtctcacccggattgtccgggtggcaccgttcccggccccaccgggcgccgcgagggatcatgtctacagcctctgccgcctcctcctcctcctcgtcttcggccggtgagatgatcgaagccccttcccaggtcctcaactttgaagagatcgactacaaggagatcgaggtggaagaggttgttggaagaggagcctttggagttgtttgcaaagctaagtggagagcaaaagatgttgctattaaacaaatagaaagtgaatctgagaggaaagcgtttattgtagagcttcggcagttatcccgtgtgaaccatcctaatattgtaaagctttatggagcctgcttgaatccagtgtgtcttgtgatggaatatgctgaagggggctctttatataatgtgctgcatggtgctgaaccattgccatattatactgctgcccacgcaatgagttggtgtttacagtgttcccaaggagtggcttatcttcacagcatgcaacccaaagcgctaattcacagggacctgaaaccaccaaacttactgctggttgcaggggggacagttctaaaaatttgtgattttggtacagcctgtgacattcagacacacatgaccaataacaaggggagtgctgcttggatggcacctgaagtttttgaaggtagtaattacagtgaaaaatgtgacgtcttcagctggggtattattctttgggaagtgataacgcgtcggaaaccctttgatgagattggtggcccagctttccgaatcatgtgggctgttcataatggtactcgaccaccactgataaaaaatttacctaagcccattgagagcctgatgactcgttgttggtctaaagatccttcccagcgcccttcaatggaggaaattgtgaaaataatgactcacttgatgcggtactttccaggagcagatgagccattacagtatccttgtcagtattcagatgaaggacagagcaactctgccaccagtacaggctcattcatggacattgcttctacaaatacgagtaacaaaagtgacactaatatggagcaagttcctgccacaaatgatactattaagcgcttagaatcaaaattgttgaaaaatcaggcaaagcaacagagtgaatctggacgtttaagcttgggagcctcccgtgggagcagtgtggagagcttgcccccaacctctgagggcaagaggatgagtgctgacatgtctgaaatagaagctaggatcgccgcaaccacaggcaacggacagccaagacgtagatccatccaagacttgactgtaactggaacagaacctggtcaggtgagcagtaggtcatccagtcccagtgtcagaatgattactacctcaggaccaacctcagaaaagccaactcgaagtcatccatggacccctgatgattccacagataccaatggatcagataactccatcccaatggcttatcttacactggatcaccaactacaggcaagaactagttgcagaactggaccaggatgaaaaggaccagcaaaatacatctcgcctggtacaggaacataaaaagcttttagatgaaaacaaaagcctttctacttactaccagcaatgcaaaaaacaactagaggtcatcagaagtcagcagcagaaacgacaaggcacttcatgattctctgggaccgttacattttgaaatatgcaaagaaagactttttttttaaggaaaggaaaaccttataatgacgattcatgagtgttagctttttggcgtgttctgaatgccaactgcctatatttgctgcatttttttcattgtttattttccttttctcatggtggacatacaattttactgtttcattgcataacatggtagcatctgtgacttgaatgagcagcactttgcaacttcaaaacagatgcagtgaactgtggctgtatatgcatgctcattgtgtgaaggctagcctaacagaacaggaggtatcaaactagctgctatgtgcaaacagcgtccattttttcatattagaggtggaacctcaagaatgactttattcttgtatctcatctcaaaatattaataatttttttcccaaaagatggtatataccaagttaaagacagggtattataaatttagagtgattggtggtatattacggaaatacggaacctttagggatagttccgtgtaagggctttgatgccagcatccttggatcagtactgaactcagttccatccgtaaaatatgtaaaggtaagtggcagctgctctatttaatgaaagcagttttaccggattttgttagactaaaatttgattgtgatacattgaacaaaatggaactcatttttttttaaggagtaaagatttttaattctgtgattgtgtgtatgtgtgttgaaactgtaaagcttttatgactctaatattaatctcttaaatgaaattaaaaggcaaaagaacatgattgagcttaaatgatcatttcttcctgcagtgattcttggattgttttctcatgtatttg

SEQ ID NO: 56775 - DNA, 2147 bp, Homo Sapiens
attctcgccgcgcccgggcggacgatccagcgaacagccccgcttctaacccgagatgctgctgccggcgcccgcgctccgccgcgccctgctgtcccgcccctggaccggggccggcctgcggtggaagcacacctcctccctgaaggtggccaacgagcccgtcttagccttcacgcagggcagccctgagcgagatgccctgcaaaaggccttgaaggacctgaagggccggatggaagccatcccatgcgtggtgggggatgaggaggtgtggacgtcggacgtgcagtaccaagtgtcgccttttaaccatggacataaggtggccaagttctgttatgcagacaagagcctgctcaacaaagccattgaggctgccctggctgcccggaaagagtgggacctgaagcctattgcagaccgggcccagatcttcctgaaggcggcagacatgctgagtgggccgcgcagggctgagatcctcgccaagaccatggtgggacagggtaagaccgtgatccaagcggagattgacgctgcagcggaactcatcgacttcttccggttcaatgccaagtatgcggtggagctggaggggcagcagcccatcagcgtgcccccgagcaccaacagcacggtgtaccggggtctggagggcttcgtggcggccatctcgccctttaacttcactgcaatcggcggcaacctggcgggggcaccggccctgatgggcaacgtggtcctatggaagcccagtgacactgccatgctggccagctatgctgtctaccgcatccttcgggaggctggcctgccccccaacatcatccagtttgtgccagctgatgggcccctatttggggacactgtcaccagctcagagcacctctgtggcatcaacttcacaggcagtgtgcccaccttcaaacacctgtggaagcaggtggcccagaacctggaccggttccacaccttcccacgcctggctggagagtgcggcggaaagaacttccacttcgtgcaccgctcggccgacgtggagagcgtggtgagcgggaccctccgctcagccttcgagtacggtggccagaagtgttccgcctgctcgcgtctctacgtgccgcactcgctgtggccgcagatcaaagggcggctgctggaggagcacagtcggatcaaagtgggcgaccctgcagaggattttgggaccttcttctctgcagtgattgatgccaagtcctttgcccgtatcaagaagtggctggagcacgcgcgctcctcgcccagcctcaccatcctggctgggggcaagtgtgatgactccgtgggctactttgtggagccctgcatcgtggagagcaaggaccctcaggagcccatcatgaaggaggagatcttcgggcctgtactgtctgtgtacgtctacccggacgacaagtacaaggagacgctgcagctggttgacagcaccaccagctatggcctcacgggggcagtgttctcccaggataaggacgtcgtgcaggaggccacaaaggtgctgaggaatgctgccggcaacttctacatcaacgacaagtccactggctcgatagtgggccagcagccctttgggggggcccgagcctctggaaccaatgacaagccagggggcccacactacatcctgcgctggacgtcgccgcaggtcatcaaggagacacataagcccctgggggactggagctacgcgtacatgcagtgagcccctctcgggctccaccgtccagctgtctgtccgtccagatgcctcctgcttggattctgagtggtcagagatctgtaaagcatgactttcaaggatggttcttaggggactgtgaaagtgttgggtcttcctccaggatgcctgcatgggaccccacccggagctggtgtggccattccccaagtgccactggcccatggatgggggtgggtgctggtgccagctgggctgggtgtgggttctgtgtccttccaggatatgtgtcatttcccatgaggggccggggcaggtggctgggtgggggcacaggctggagtattcttagttctactggttctacactgtgaggtggcaatgggatttgctcagatgccacccaataaaatgcctgttactt

SEQ ID NO: 56776 - DNA, 1073 bp, Homo Sapiens
ttcccgtctccctccacaccttgcctcctccaggcccaaccccattccaccagcaccccgccccaggcgcactggctaggactggaaggcaaggactaaggtgaaagctgactgcccgcaccgccccaggcgcactgggtaggactgaaaggcagggactaaggtgacagctgactctgccggggcggagtgcgtgtcctcccaccgtgctggcgctgaactgactgtccgctgccaagggaagtgacagccgcagccgggctctcagccagcggccaggcgccccgcggaccatgctctccagtacgcagaacgcggggcgcttgatacacagagtaattactttaggctataagagacctttggaaagagaggatctttttgaactaaaggaaagtgattccttctgcactgcgtgtcccatctttgaaaaacaatggagaaaggaagttttaaggaatcaagagaggcaaaaagtaaaggtatcttgttataaagaggcacatatcaagaaaccatctctactctatgcattgtggaacacctttaaatccatcctgattcaagttgccttattcaaagtgtttgctgatattttgtccttcactagcccactcataatgaagcaaattatcattttctgtgaacacagctcagattttggctggaatggctatggctatgcagtggcacttcttgttgtagtctttttgcaaactctgattcttcagcaatatcaacgttttaacatgctcacctcagcaaaagttaagacagctgtaaatggactgatctacaaaaaggccttacttttatcaaatgtttctcgacaaaagttttccactggggaaattattaacttgatgtcagcaactcatggacttgacagcaaacctcaatctcctctggtctgccccttttcaaatcctaatggccgtatatctcctttggcaagagctgggtccagcagtgttagcaggggtggcagtccttgtgtttgttataccaataaatgctttagctgcaactaaaataaaaaagttaaaggtaagaaaaaaaaaaaaaaaaaaaaa

SEQ ID NO: 56777 - DNA, 1879 bp, Homo Sapiens
ataagttagcgccgctctccgcctcggcagtgccagccgccagtggtcgcacttggagggtctcgccgccagtggaaggagccaccgcccccgcccgaccatggccgaggagctggtcttagagaggtgtgatctggagctggagaccaatggccgagaccaccacacggccgacctgtgccgggagaagctggtggtgcgacggggccagcccttctggctgaccctgcactttgagggccgcaactacgaggccagtgtagacagtctcaccttcagtgtcgtgaccggcccagcccctagccaggaggccgggaccaaggcccgttttccactaagagatgctgtggaggagggtgactggacagccaccgtggtggaccagcaagactgcaccctctcgctgcagctcaccaccccggccaacgcccccatcggcctgtatcgcctcagcctggaggcctccactggctaccagggatccagctttgtgctgggccacttcattttgctcttcaacgcctggtgcccagcggatgctgtgtacctggactcggaagaggagcggcaggagtatgtcctcacccagcagggctttatctaccagggctcggccaagttcatcaagaacataccttggaattttgggcagtttgaagatgggatcctagacatctgcctgatccttctagatgtcaaccccaagttcctgaagaacgccggccgtgactgctcccgccgcagcagccccgtctacgtgggccgggtggtgagtggcatggtcaactgcaacgatgaccagggtgtgctgctgggacgctgggacaacaactacggggacggcgtcagccccatgtcctggatcggcagcgtggacatcctgcggcgctggaagaaccacggctgccagcgcgtcaagtatggccagtgctgggtcttcgccgccgtggcctgcacagtgctgaggtgcctgggcatccctacccgcgtcgtgaccaactacaactcggcccatgaccagaacagcaaccttctcatcgagtacttccgcaatgagtttggggagatccagggtgacaagagcgagatgatctggaacttccactgctgggtggagtcgtggatgaccaggccggacctgcagccggggtacgagggctggcaggccctggacccaacgccccaggagaagagcgaagggacgtactgctgtggcccagttccagttcgtgccatcaaggagggcgacctgagcaccaagtacgatgcgccctttgtctttgcggaggtcaatgccgacgtggtagactggatccagcaggacgatgggtctgtgcacaaatccatcaaccgttccctgatcgttgggctgaagatcagcactaagagcgtgggccgagacgagcgggaggatatcacccacacctacaaatacccagaggggtcctcagaggagagggaggccttcacaagggcgaaccacctgaacaaactggccgagaaggaggagacagggatggccatgcggatccgtgtgggccagagcatgaacatgggcagtgactttgacgtctttgcccacatcaccaacaacaccgctgaggagtacgtctgccgcctcctgctctgtgcccgcaccgtcagctacaatgggatcttggggcccgagtgtggcaccaagtacctgctcaacctcaacctggagcctttctctggtaaagccctgtgttcctggagcatttgttgaccgccaactgacaacatgctaggtagtgacctaaccacttagcatgtgtgatttcaccccacagacacttacatggcgctgactctggggcaggccctgtcctaagcactttataaatatcaacccacttaa

SEQ ID NO: 56778 - DNA, 1841 bp, Homo Sapiens; identical to SEQ ID NO: 31754

SEQ ID NO: 56779 - DNA, 2516 bp, Homo Sapiens
gttcctggtgtccccacttcgcctccctcctgctgcccccaagacatgcaggggccctgggtgctgctgctgctgggcctgaggctacagctctccctgggcgtcatcccagctgaggaggagaacccggccttctggaaccgccaggcagctgaggccctggatgctgccaagaagctgcagcccatccagaaggtcgccaagaacctcatcctcttcctgggcgatgggttgggggtgcccacggtgacagccaccaggatcctaaaggggcagaagaatggcaaactggggcctgagacgcccctggccatggaccgcttcccatacctggctctgtccaagacatacaatgtggacagacaggtgccagacagcgcagccacagccacggcctacctgtgcggggtcaaggccaacttccagaccatcggcttgagtgcagccgcccgctttaaccagtgcaacacgacacgcggcaatgaggtcatctccgtgatgaaccgggccaagcaagcaggaaagtcagtaggagtggtgaccaccacacgggtgcagcacgcctcgccagccggcacctacgcacacacagtgaaccgcaactggtactcagatgctgacatgcctgcctcagcccgccaggaggggtgccaggacatcgccactcagctcatctccaacatggacattgacgtgatccttggcggaggccgcaagtacatgtttcccatggggaccccagaccctgagtacccagctgatgccagccagaatggaatcaggctggacgggaagaacctggtgcaggaatggctggcaaagcaccagggtgcctggtatgtgtggaaccgcactgagctcatgcaggcgtccctggaccagtctgtgacccatctcatgggcctctttgagcccggagacacgaaatatgagatcctccgagaccccacactggacccctccctgatggagatgacagaggctgccctgcgcctgctgagcaggaacccccgcggcttctacctctttgtggagggcggccgcatcgaccatggtcatcatgagggtgtggcttaccaggcagtcactgaggcggtcatgttcgacgacgccattgagagggcgggccagctcaccagcgaggaggacacgctgaccctcgtcaccgctgaccactcccatgtcttctcctttggtggctacaccttgcgagggagctccatcttcgggttggcccccagcaaggctcaggacagcaaagcctacacgtccatcctgtacggcaatggcccgggctacgtgttcaactcaggcgtgcgaccagacgtgaatgagagcgagagcgggagccccgattaccagcagcaggcggcggtgcccctgtcgtccgagacccacggaggcgaagacgtggcggtgtttgcgcgcggcccgcaggcgcacctggtgcatggtgtgcaggagcagagcttcgtagcgcatgtcatggccttcgctgcctgtctggagccctacacggcctgcgacctggcgctccccgcctgcaccaccgacgccgcgcacccagttgccgcgtcgctgccactgctggccgggaccctgctgctgctgggggcgtccgctgctccctgagtgccccactccggagttatcctgctccccacctccgggcgtcctgccctgttccccgtcctgagccgccacttccagcgaacacacacaggtgtcctgccgttggaccttcacctcctagagataaaccagcctcagctggcgcagcggggcccttcttccctccgcatccccttcagggagcaggagcccagggcgccctgggagctgagcctgggacttccaggacctcccctcaggttgttctctgattcttcctcccaaccccagagactgcagatttgtgccatgcggctgcctgcaccccagacaataaagggaccaaaaccacccaacccccaccctgcctctatcctaaggaagaccaagcaggcctggacccagagacgtcccccatcgtgggacacgacacacccagaccgcgtgccccaccgtcttagcttcaatcctggcagcacctggtagacccaaggacttgggtggatcaggacacctgaagaagagaagcttccggcaaccctgcaacccacccaaggaggctactggatcggggattcccaggggggctttgacacagtcctctgctgtctccccactaggatcattccacacccctgcacctgaccaagggaccaatgaggcagaggcttgccccaagtcacagccactcagatgcttcctgccccccagtgcccattccaggtcaccagatccaaggagcgcttgaggagctctgggtacagggcagcaacccagagcccatgggccctcccgggacatctggatgctgggcatagatttctcaacaaggaagactcccctgcctcctcaaggtctccattctcctaggagacaaagcaataataaaaggtgttagacaatgt

SEQ ID NO: 56780 - DNA, 886 bp, Homo Sapiens
gctcgtccgctccctcccccgcgccgtgcacgtcttggttcgggccgggcataaaaggcttcgcggcccagggctcacttggcgctgagaacgcgggtccacgcgtgtgatcgtccgtgcgtctagcctttgcccacgcagctttcagtcatggcctccggtaacgcgcgcatcggaaagccagcccctgacttcaaggccacagcggtggttgatggcgccttcaaagaggtgaagctgtcggactacaaagggatcaacaccccccggaaagagggaggcttgggccccctgaacatccccctgcttgctgacgtgaccagacgcttgtctgaggattacggcgtgctgaaaacagatgagggcattgcctacaggggcctctttatcatcgatggcaagggtgtccttcgccagatcactgttaatgatttgcctgtgggacgctccgtggatgaggctctgcggctggtccaggccttccagtacacagacgagcatggggaagtttgtcccgctggctggaagcctggcagtgacacgattaagcccaacgtggatgacagcaaggaatatttctccaaacacaattaggctggctaacggatagtgagcttgtgcccctgcctaggtgcctgtgctgggtgtccacctgtgcccccacctgggtgccctatgctgacccaggaaaggccagacctgcccctccaaactccacagtatgggaccctggagggctaggccaaggccttctcatgcctccacctagaagctgaatagtgacgccctcccccaagcccacccagccgcacacaggcctagaggtaaccaataaagtattagggaaaggtgtgaaaaaaaaaaaaaaaaaaaaaaaaaaaaaaaa

SEQ ID NO: 56781 - DNA, 7026 bp, Homo Sapiens; identical to SEQ ID NO: 30939

SEQ ID NO: 56782 - DNA, 10123 bp, Homo Sapiens
cggcggagccccggcggggcgtttggtttcggtttggccctgactgggattagtgttgacgatcgaaatgggagtccccaagttttacagatggatctcagagcggtatccctgtctcagcgaagtggtgaaagagcatcagattcctgaatttgacaacttgtacctggatatgaatggaattatacatcagtgctcccatcctaatggtgatgatgttcactttagaatttcagatgataaaatctttactgatatttttcactacctggaggtgttgtttcgcattattaaacccaggaaagtgttctttatggctgtagatggtgtggctcctcgagcaaaaatgaaccagcagcgtgggaggcgttttaggtcagcaaaggaggcagaagacaaaattaaaaaggcaatagagaagggagaaactcttcctacagaggccagatttgattccaactgtatcacaccaggaactgaatttatggccaggttacatgaacatctgaagtattttgtaaatatgaaaatttccacagacaagtcatggcaaggagttaccatctacttctcaggccatgagactcctggagaaggagagcataaaatcatggaatttatcagatccgagaaagcaaagccagatcatgatccaaacaccagacactgtctttatggtttagatgctgacttgattatgcttggattaacaagtcatgaggcacatttttctctcttaagagaagaagttcgatttggtggcaaaaaaacacaacgggtatgtgctccagaagaaactacatttcaccttctacacttgtctttaatgagagagtatattgactatgagttttcagtattaaaagaaaagatcacatttaaatatgatattgaaaggataatagatgattggattttgatggggtttcttgttggtaatgattttatccctcatctacctcatttacatattaatcatgatgcactgcctcttctttatggaacatatgttaccatcctgccagaacttgggggttatattaatgaaagtgggcacctcaacttacctcgatttgagaaataccttgtgaaactatcagattttgatcgggagcacttcagtgaagtttttgtggacctaaaatggtttgaaagcaaagttggtaacaagtacctcaatgaagcagcaggtgtcgcagcagaagaagccaggaactacaaggaaaagaaaaagttaaagggccaggaaaattctctgtgttggactgctttagacaaaaatgaaggcgaaatgataacttctaaggataatttagaagatgagactgaagatgatgacctatttgaaactgagtttagacaatataaaagaacatattacatgacgaagatgggggttgacgtagtatctgatgactttctggctgatcaagctgcatgttatgttcaggcaatacagtggattttgcactattactatcatggagttcagtcctggagctggtattatccttatcattatgcacctttcctgtctgatatacacaacatcagtacactcaaaatccattttgaactaggaaaaccttttaagccatttgaacagcttcttgctgtacttccagcagccagcaaaaatttacttcctgcatgctaccagcatttgatgaccaatgaagactcaccaattatagaatattacccacctgattttaaaactgacctaaatgggaaacaacaggaatgggaagctgtggtgttaatcccttttattgatgagaagcgattattggaagccatggagacatgtaaccactccctcaaaaaggaagagaggaaaagaaaccaacatagtgagtgcctaatgtgctggtatgatagagacacagagtttatctatccttctccatggccagaaaagttccctgccatagaacgatgttgtacaaggtataaaataatatccttagatgcttggcgtgtagacataaacaaaaacaaaataaccagaattgaccagaaagcattatatttctgtggatttcctactctgaaacacatcagacacaaattttttttgaagaaaagtggtgttcaagtattccagcaaagcagtcgtggagaaaacatgatgttggaaatcttagtggatgcagaatcagatgaacttaccgtagaaaatgtagcttcatcagtgcttggaaaatctgtctttgttaattggcctcacattgaggaagctagagtcgtggctgtatcagatggagaaactaagttttacttggaagaacctccaggaacacagaagctttattcaggaagaactgccccaccatctaaagtggttcatcttggagataaagaacaatctaactgggcaaaagaagtacaaggaatttcagaacactacctgagaagaaaaggaataataataaatgaaacatctgcagttgtgtatgctcagttactcacaggtcgtaaatatcaaataaatcaaaatggtgaagttcgtctagagaaacagtggtcaaaacaagttgttccttttgtttatcaaactattgtcaaggacatccgagctttcgactcccgtttctccaatatcaaaacattggatgatttgtttcctctgagaagtatggtctttatgctgggaactccctattatggctgcactggagaagttcaggattcaggtgatgtgattacagaaggtaggattcgtgtgattttcagcattccatgtgaacccaatcttgatgctttaatacagaaccagcataaatattctataaagtacaacccaggatatgtgttggccagtcgccttggagtgagtggataccttgtttcaaggtttacaggaagtatttttattggaagaggatctaggagaaaccctcatggagaccataaagcaaatgtgggtttaaatctcaaattcaacaagaaaaatgaggaggtacctggatatactaagaaagttggaagtgaatggatgtattcatctgcagcagaacaacttctggcagagtacttagagagagctccagaactatttagttatatagccaaaaatagccaagaggatgtgttctatgaagatgacatttggcctggagaaaatgagaatggtgctgaaaaagttcaagaaattattacttggctaaaaggacatcctgtcagtactttatctcgttcttcttgtgatttacaaattctggatgcagctattgttgagaaaattgaggaagaagtcgaaaagtgcaagcaaagaaagaataataagaaggtgcgagtaacagtgaaaccccatttgctatacagacctttagaacagcaacatggagtcattcctgatcgggatgcagaattttgtctttttgaccgtgttgtaaatgtgagagaaaacttctcagttccagttggccttcgaggcaccatcataggaataaaaggagctaatagagaagccgatgtactatttgaagtattatttgatgaagaatttcctggagggttaacaataagatgctcacctggtagaggttatcgactgccaacaagtgccttggtgaacctttctcatgggagtcgctctgaaactggaaatcagaagttgacagccatcgtaaaaccacaaccagctgtacatcaacatagctcaagttcatcagtttcctctgggcatttgggagccctcaaccattcccctcaatcactttttgttcctactcaagtacctactaaagatgatgatgaattctgcaacatttggcagtccttacagggatctggaaagatgcaatactttcagccaactatacaagagaagggtgcagttctacctcaagaaataagccaagtaaatcaacatcataaatctggctttaatgacaacagtgttaaatatcagcaaagaaaacatgaccctcacagaaaatttaaagaagagtgtaagagtcctaaagctgagtgttggtcccaaaaaatgtccaataagcagcctaactctggaattgagaactttttagcatctttgaatatctccaaagaaaatgaagtacagtcatctcatcatggggagcctccaagtgaagagcatttgtcaccacagtcatttgccatgggaacacggatgcttaaagaaattctaaaaattgatggctctaacactgtggaccataagaatgaaatcaaacagattgctaatgaaatccctgtttcctctaacagaagagatgaatatggattaccctctcagcctaaacaaaataagaaattagcatcttatatgaacaagcctcacagtgctaatgagtaccataatgttcagtctatggacaatatgtgttggcctgcccccagccagatccctcctgtatccacaccagtaactgaactttctcgaatttgttcccttgttggaatgccacaacctgatttctccttttttaggatgccacagacaatgaccgtttgccaagtaaaattatctaatggcttactggtacatgggccacagtgccactctgaaaatgaagccaaagagaaagctgcactttttgctttacaacagttgggctccttaggcatgaatttccctttgccttcacaagtatttgcaaattatccttcagctgtaccacctggaaccattcctccagcctttcccccacctactggctgggatcactatggaagcaactatgcattgggggcagctaatataatgccttcgtcgtctcatctctttggctcaatgccatggggaccatcggtgccagttcctgggaagcccttccatcatactttatattctgggaccatgcccatggctgggggaataccagggggtgtgcacaatcagtttatacctctgcaggttactaaaaaaagggttgcaaacaaaaagaactttgagaataaggaagcccagagttctcaagccactccagttcagactagccagccagattcttccaacattgtcaaagtaagtccacgggagagctcatcagcttctttgaagtcctctccgattgctcaacctgcatcttcttttcaagttgaaactgcctctcaaggccatagtatatctcaccataagtcaacaccaatctcttcttcaagaagaaaatcaagaaaactggctgttaattttggtgtttctaaaccttctgagtaaatttggctcttagaattaagttaatttcttctctttccatctacctttttataaatacatatctatgtctcataaaaattagaatgtactattttaaaataatatgtgtaaattgaaatttttttcatttttaagttatcaggcacttttcatgctgtttaaaagactgtgtatcaaattgtgcactttaagtatgtgcagtttgttgtatgtcaattatacctcaataaatctgtaataaaaaactaaattaaaccttgcattaaaataatatcacagtatcagtggactaaacattaaaatgtaccactctaatcattggcctcatgattgaagcatcctgaactatgaattagacatcagttagcaataataagcattttttacactatcattgaggaataattacatggagcatgaaatttgggcctccagtataacttactgaatgtggattttatttctctttttaatgatgtaagaaaattgtcaggagaatggctcttatttatgtgtgttttaacttatgctttgttgcctctgagggtctttagacctgctgtgaaaggatcacatttgttgtggtgctgccagttttgctttattctaaattttgtaccaaagcaactttagaataatcagaatatttcatctaactgcttagaactataaatagcattctaaatttgagtaaatacaattttttaggttactcaagaaccagcattagtaatttctagtaaaattgtttcaaaatctacagggtacaatgattacaaattaatcttctaacaaaataaaatatgaaatgttagtcatgttaattaataaactgtattattttgtatagctttttatttgcttacctgacattttatgagagcttcatagttggtcggtatgtagtgcttcttgggactgaagaaattctaattgttgtttaagttccaaggtgtgctacaatataggaggcacagtcatcagtttgtgacatacattatttactgcctatttcattctgattctatatttttagctttatgctgaactgttcaatgatgctgggattctctctttgcatgtcatatgtgaatgtgtggttcaagctgtaactgttgaaattattttagaatttatgacgatttctcagcagggcctatgtttatatatatatatatatttattctttagtttttgtgatatgcttatatttttaaggaagtaagttatagcatacttttttaaaagtaggaaccacaatctttatatggagcagcttgttatatctgattttcatgtaactcattggaaactctgccatgactcttaaagtagtcttacttgttttttaaaatgctggtattaaactaaatggactcctttcactaactgctgatttcagagtttaaatgttagcaggatatttgtgtattagcagtgccttcagtataagagagaaatattcattatctgtcatttatcatagtcgtataagtttccatgattttattttctgttattttcataagttcagatgtttatcagttcccaacattgcttctttatctgtagtgggatcttgagtaatgaggctcaagtaaatcctcaatgtgtataattattgcctcataaactctctctttgtttttaaaggaaacatctattatggtaatacaaagaaaagttaaattgtgacagtaatgttatattaacctcttcctactttaaagtgtgaaatgtttcacctcagctgtacaaactccagcattgagaatttgcctcactcattactcctgtgtgacagttatataaatagcatgcagctcacatctgttttagagcatagaagaagcggcacctgccatcttctgaaaactccaaagggaaatttcagtagacatagtgcactaaacccataaggatacttgaccaatatttgagcacagcaagctgacagttctatacagataggcagtgaaagggttttattttccagccaggcgcagtggctcaaatcccagcacttcgggaggctaaggcaggcggatcacttgaggtccggagttccagacaagcctggccaacatgatgaagccctgtctctactaaaaatacaaaaattagccgggcgtgatggcacatgcctttagtcccagctactcgggaggctgaggcatgagaatcatttgaacccgcgaggcagagtctgcagtgagccgagattgcaccactgcactccagcctggagagcagagcaagactctgtctcaaaaaaaagaaaaaagttttattatccttactttttttttaacattattattctaaaggtcaaaactgagaagagattaagataggagagagctccataatggctggatagtggtcaggcattctctattcttttccccctgtagacccattctaaatgtgggcctgaggtcaatgggagatgtgccctccctatggaggatgtaagaagcagaggccatttctgccccatgttgaggaaacaatctgttgatagacctggaatttagagtacatctgaaaagcagttggacttcaagaaatttaaaattctctctttgagatggggtggactaagaccacccccaaagtttaaaaatatgctcattcaacttgaatcttctgaggactttttgtgaaaatggtggactgtttagggcataggacagattccccaaattgctttatgcttccacataactagagcacttcaatctatttaagcctttgtctcctaactgaaacattatttctaaatatttctattcaataagttttttcttttttgagcaacttaagtgaattttgaagattgctccttccagtctcgttccttttcacattttcctgcattacctaataattacctcagcgttagaatttgaatgtattaattgatttaaacatcatgtagactaaagtcttaaacatctaagactcagttgtagttgcagaaaaaaattaaagtcacctctactgaaccttggtttcaatttaagatttttcttgcttttcaaaggggtaactaataaagattgaagggtttttttcccgattggtggaggaatgaagaactattgatgcaagtttttttattgtttctttctatgatcaggtacctgctttcattttagactgctacttccaaactaagctagattcttggttttaatgagaggaggcagagagagggaggcagatggaagaagaaaaacagttaaataagacatacccagtcactgcatttttggactataccgtatctttctagcacaaggaaatagataaactgtaaggtcttttttactcactttttatttatgtgttctatttgtgttagtcataactgtttatagtggttgtctaatttttacttttattatatgagatagagctgtgcagatcttcactcaagttctgtcacgcttcttcccattatttagagcacagttttttaaagcaactgtacaatttctcagccttatgagcttgctgtatttcttggtatcatgttgcttccaaattttgtttttactgtagaagacaattaatttattgtagagaagtggctgtgaaagtcgttctctgtctttaaaaatcaattgcagaagttcatttgtcatttttctagagataaattatagtactcaaactggcagtgctcagtatatacattttgtaagctttgtcagtgaaaccatcagttttgcaggagcttcctttcctagtcaagataaagcttaaaattccagaaattaatgtcgttcggactgactttattcatatttccatcaaacttctccaatacagtaagagatagtgttgaaccagcatcaagtctccagaaacatggcagagcagacaggccgttaagtttcacagacatcatagatccttttcttaaagaagaaaaacatgtataaaatagttttagtagtccaaaatgtcaactatctgtagctgcttttgtgtgtgtgtcagtgaacaaataataatgccttgctcaatcaatgcattcagccatctcaagtgcaatttgtgaaggagactatggtttccaaaagatacatttttttacaaagttaaacctgtaaaaagtctttttttttttccctccagccgtacaccaactgcacttggttgtttcagcagttggtatactattaaattgtccaggccaaataggtttctgtagctgttttagtaatttgaagccaaattctcatgctgtttctcattaaaaagaatgagaatttggtccatagttagctttaagttctctcttcctttctttcccttacagttaagggtttggtgggggatggggaggttgttttcgttttttggatttttttgtcttttggctttaagtatcatattttcttttgcctgtatccaactgcttctttgagtattttcatctagtttaatgtgagtaatagatgctgtgctgtcattgaagtgttcaacattttgttcatttaaacaaaagtgtaattcatacatatatagatacatatcttaattgatttctcaactattttataagtaactggaatttttcattagatcttatacagagaagtattttattaaaaattcaaaagggaagacttttatgtgctcattttgtaatttttgattttaaatatctttacattgtctgccaattaaagtgttttaaacttgcattggaatggactccgaatgtatttttgtggtgttacgttatccgtagatttctagcatgaagttagcctcacgatgctgtgcaaaggattttaaaatatgagagtcactgaaagagtttaaacatctgttcatgttaaatgctctatggattttaattaaagacttgagaatgattttaaaaaaaaaaaaaaaaaaagaaaaaaaaaaaaaaaaaaa

SEQ ID NO: 56783 - DNA, 1183 bp, Homo Sapiens
gccgggagcgccgctccagcgaggcgcgggctgtggggccgccgcgtgcctggccccgctcgcccgtgccggccgctcgcccgccatgcctggcttcgactacaagttcctggagaagcccaagcgacggctgctgtgcccactgtgcgggaagcccatgcgcgagcctgtgcaggtttccacctgcggccaccgtttctgcgatacctgcctgcaggagttcctcagtgaaggagtcttcaagtgccctgaggaccagcttcctctggactatgccaagatctacccagacccggagctggaagtacaagtattgggcctgcctatccgctgcatccacagtgaggagggctgccgctggagtgggccactacgtcatctacagggccacctgaatacctgcagcttcaatgtcattccctgccctaatcgctgccccatgaagctgagccgccgtgatctacctgcacacttgcagcatgactgccccaagcggcgcctcaagtgcgagttttgtggctgtgacttcagtggggaggcctatgagagccatgagagttctctgggctttggttatcccaagttcatctcccaccaggacattcgaaagcgaaactatgtgcgggatgatgcagtcttcatccgtgctgctgttgaactgccccggaagatcctcagctgagtgcaggtggggttcgaggggaaaggacgatggggcatgacctcagtcaggcactggctgaacttggagagggggccggacccccgtcagctgcttctgctgcctaggttctgttaccccatcctccctcccccagccaccaccctcaggtgcctccaattggtgcttcagccctggcccctgtggggaacaggtcttggggtcatgaagggctggaaacaagtgaccccagggcctgtctcccttcttgggtagggcagacatgccttggtgccggtcacactctacacggactgaggtgcctgctcaggtgctatgtcccaagagccataagggggtgggaattggggagggagaaagggtagttcaaagagtctgtcttgagatctgattttttccccctttacctagctgtgccccctctggttatttatttccttagtgccaggagggcacagcaggggagccctgatttttaataaatccggaattgtatttatt

SEQ ID NO: 56784 - DNA, 3662 bp, Homo Sapiens
atctgctggcatttcctgcagccaggcccgcgccgccagtggagcccccgcgcgcccggccggcccggagcaccgagctcgcggcacgaagcccccgagcgcccacagcatgaaggaggaggccttcctccggcgccgcttctccctgtgtccaccttcctccacccctcagaaagtcgacccccggaagctcacccggaacttgctcctcagcggagacaatgagctctacccactcagcccagggaaggacatggagcccaacggcccgtcgctgcccagggatgaagggcccccgaccccaagctctgccacgaaggtgccaccggcagagtacaggctgtgcaacgggtcagacaaggaatgtgtgtcccccaccgccagggtcaccaagaaggagactctcaaggcgcagaaggagaactaccggcaggagaagaagcgcgccacacggcagctgctcagcgctctgacagaccccagcgtggtcatcatggctgacagcctgaagggccccaaaggtgagagcgtgggctccatcacacagcccctgcccagcagctacctgatcttcagggccgcctccgagtcagatggtcgctgctggctggacgccctggagctggccctgcgctgctctagcctactgagactgggcacctgcaagccgggccgagacggggagccagggacctcgccagacgcatcaccctcatcgctctgtgggctgccagcctcagccaccgtccacccagaccaagacctgttcccactgaacgggtcttccctggagaacgatgcattctcagacaagtcggagagagagaaccctgaggagtcagataccgagacccaggaccatagccggaagacggagagtggcagcgaccagtcagagacccctggggccccggtgcggagagggaccacctatgtggagcaggtccaggaggagctgggggagctgggcgaggcgtcccaggtggagacagtgtcagaggagaacaagagtctgatgtggaccctgctgaagcagctacggccaggcatggacctgtcccgcgtggtgctacccacgttcgtactggagccgcgctccttcctgaacaagctctccgactactactaccacgcagacctgctctccagggctgcggtggaggaggatgcctacagccgcatgaagctggtgctgcggtggtacctgtctggcttctacaagaagcccaagggaatcaagaagccgtacaaccccatcctgggggagaccttccgctgctgctggttccacccgcagactgacagccgcacattctacatagcagagcaggtgtcccaccacccgcccgtgtctgccttccacgtcagcaaccggaaggacggcttctgcatcagtggcagcatcacagccaagtccaggttttatgggaactcgctgtcggcgctgctggacggcaaagccacgctcaccttcctgaaccgagccgaggattacacccttaccatgccctacgcccactgcaaaggaatcctgtatggcacgatgaccctggagctgggtgggaaggtcaccatcgagtgtgcgaagaacaacttccaggcccagctggaattcaaactcaagcccttcttcgggggtagcaccagcatcaaccagatctcgggaaagatcacgtcgggagaggaagtcctggcgagcctcagtggccactgggacagggacgtgtttatcaaggaggaagggagcggaagcagtgcgcttttctggaccccgagcggggaggtccgcagacagaggctgaggcagcacacggtgccgctggaggagcagacggagctggagtccgagaggctctggcagcacgtcaccagggccatcagcaagggcgaccagcacagggccacacaggagaagtttgcactggaggaggcacagcggcagcgggcccgtgagcggcaggagagcctcatgccctggaagccgcagctgttccacctggaccccatcacccaggagtggcactaccgatacgaggaccacagcccctgggaccccctgaaggacatcgcccagtttgagcaagacgggatcctgcggaccttgcagcaggaggccgtggcccgccagaccaccttcctgggcagcccagggcccaggcacgagaggtctggcccagaccagcggcttcgcaaggccagcgaccagccctccggccacagccaggccacggagagcagcggatccacgcctgagtcctgcccagagctctcagacgaggagcaggatggtgactttgtccctggcggtgagagcccatgccctcggtgcaggaaggaggcgcggcggctgcaggccctgcacgaggccatcctctccatccgagaggcccagcaggagctgcacaggcacctctcggccatgctgagctccacggcacgggcagcacaggcaccgaccccaggcctcctgcagagcccccgatcctggttcctgctctgcgtgttcctggcgtgtcagctgttcattaaccacatcctcaaataggagccctgggggcagagctcctggccagtcccgagccctccctcccaggcacccagcactttaagcctgctccatggaggcagagaggcccggcaagcacagccactgtgacggggagtccaggcgcaggagggacccggggccacaaggcgctgcgggcccaggtgtgctgggcccctctcaggggcactggcctctctgcagggccttccgcccagcgctggccttaatgctaaagccaaatgcagcttctgctgtgcgacgcactcctggccatcttgccgtgtcaccccctgtccggcctccacttgccatgggggatggatggatttagggtgggagggcctgtgggggccctggacagtcacaccccagcagcagtgagtgggcaggtttggaggagcagccagggagccccgagtggcccaggagtccccccacacacagatgcataggcctgccttccggagaccctgtccacattgccgggaccaccctggtggggccactggtgggtgccagggacaggttagggccactctggggaaggcattttggttttttattccacgctgtgctgtttggatgggagccccacagaggcaggtcctggaaccaccccacccccacacctggacgctcgctctggtgggggcacacgcaggtggaggtggttgtgggtgcaggtgtgtgcaggggtgtggggggcgcaggggtgtggcttagctggccccgcacccaggccggggaggctcaagttcgccactttactcagaccgatgcacagtcttcccattttacacttttttaataaacataattgcaatattttaggtgggctgcgagctgcagtcagccttcacgtctggcctcagtccccgtgtcagtgccgctctgcgtgtgcgtgtgcgcgtgtgtgagcctctacacatatatatacgtacagagccttaaaccacatcgtggcggtgccgtctgagctgtagcgggtggctttgtttccagtttttgtacccgtgtccttgtctcccctcctcccccatctggggatgtgtctgtgttccacaccttgaaataaacagacacatacgtgttctcttaaaaaaaaaaaaaaaaa

SEQ ID NO: 56785 - DNA, 4359 bp, Homo Sapiens
aacgcctcggggaaagggaagcggacgggcatctggaatcgctgcctctggctttctgttttctactaacaggatttggtcactggttcttcatcttttgtctgttgcacgcatcccgccctccccacttgcttccccactccttggatccagccctgtgggcattcacgtcagttctctgaccccgccgtgagccccgctccgggtccccgggcgggcttggcacggaggcggtaactatggagaatatggcggaggaggagctgctgcccctggagaaggaggaggtggaggtggcccaggtccaggtcccgaccccggcccgggactcggctggggtcccagctccggccccggattcggctctggactcggctccgactccggcctcggctccagccccagcccctgccctggcccaggctccggccctgtccccgtccctagcctctgcccctgaggaggctaaaagcaagagacacatctcaattcaaaggcagcttgctgatctagagaatttagcttttgtaactgatggaaattttgactctgccagctcattgaactcagataatcttgatgcaggcaacagacaggcttgtccattgtgccctaaggaaaaattcagagcttgtaatagccataagcttcgtcgtcacctccagaatttacactggaaagtctcagttgaatttgaaggttacaggatgtgcatctgtcacttaccttgtcgaccagtgaaaccaaacattattggagaacagataaccagtaaaatgggagcccattatcattgtatcatttgttcagcaacaatcaccagaagaactgatatgctaggacatgttaggcgccacatgaataaaggagagactaaatctagttatattgcagcttccactgctaaaccacctaaggaaattttgaaagaggcagacacggatgtacaagtttgtcccaactattctatacctcagaaaacagattcctattttaaccccaaaatgaaactaaatcggcagctaatattctgtacattggctgctttggctgaggaacgaaaacctttggaatgtctagatgcttttggagccactgggataatgggattacagtgggcaaaacatcttggaaatgcagtcaaagttacaatcaatgacttgaatgaaaattctgtgacactgattcaggaaaactgccatttaaacaaattgaaagtggtggtggacagtaaggaaaaggaaaagagtgatgatattcttgaagaaggagagaaaaatcttggtaatattaaggtgaccaaaatggatgccaatgtactgatgcatttgagatcttttgattttagacatctagacccttttggaacatcagtgaattatctagattctgcattcagaaatataagaaaccttggcatagtgtcagtgacttctacagatatcagttctttatatgccaaggcacagcatgttgcccggcgtcactacggatgtaacattgtccgaactgaatattacaaggaactagcagccagaattgttgtagctgcagtggcaagagctgcagcccgatgcaacaaaggcatagaagtactgtttgcagtggctctggaacattttgtgttggtagttgtgagagttttgaggggacctacttcagcagatgaaacagccaagaagattcaatacctgatccattgtcagtggtgtgaagagagaatttttcagaaggatggtaatatggtagaagaaaacccatatagacagctgccttgtaactgtcatggaagcatgcctggaaagacagcaatagaacttggacctctgtggtcaagttcccttttcaatactggattcctcaaaagaatgctatttgaatctcttcaccatggtttggatgacattcagaccctaataaagacattaatctttgaatcagagtgtacgcctcaaagtcagttttcaattcatgcatcttcaaatgtcaacaagcaagaagaaaatggtgtatttattaaaactacagatgacaccacaacagataattacattgcacaaggaaagagaaaaagtaatgaaatgatcacaaatttaggcaagaagcaaaagactgatgtcagtactgaacatcctcccttttattacaacattcacagacacagcattaaaggaatgaatatgccaaagttaaaaaagtttttgtgctatttatctcaagcaggctttcgagtaagccgaactcattttgacccaatgggtgtacgcacagatgcacctctgatgcagtttaaatctatccttttaaagtacagcacccccacctacactggaggacagtcagaaagccatgtccagtcagcatctgaagatacagtaactgaaagagttgaaatgtcagtgaatgacaaagcagaagcaagtggctgcagaagatggtaaacgtagagaagaattggttctcaggtgtctgtatagatggcctaatagttctctataccaactgtagttctttttctgttctttcaattcagtagagtaaaaataaaaaacagtgtcattttcattcagaaactgagcagtttctaacttagctggtttgggagctttgctttccaagtttttttttgttttaaggcaaacttaaaattttaatggaaacatttcatatgaagccaagtctcactgagatcaccctactgcttaataattcagaaaattttcacatgcaaagtgtttggaattttatgtatgttatgaaagccatcttttacaattcttaatcacatctctgcctaaactgattcatgatgtttatgttttcctgtttgtagtgtacaaaatgaagctgaaggctcacatgttaaaatgaccctgaatagaataggaagaacaatgttcttacaggtcataatgtatttcacaattaaaaaactaaaatatgtacccatttttaagaaatcatacttctctccacattgatcttttcatttcttactagcttttaagaaattaaatacttgcctgagatagaaatactttatttttgtaactttaaggtctaaatgactaaacttcaaagtaagattttgtcagaataaattgagaccattaatctaatataatacttgttcatgagcactgaaatcctgaagaggagagatttggttataaattaaaaaggttgggtgatcttaagtgcctcagttaatgcacgtacagtattcatttggttggttgtactacctctcagaagtaaaatttgtcaccttatggaatgagagtttttgggtttgggggttgtttttttgttgttgcttggtttggtatttttggttttgtgtgtatttgtataaattttctgtataattagcccaggctgatgtaactataaaaattagttgaaaaaaaaaatattgtttccttaatggaattctcacttcatttgaatataagattttggatgaaaggatttggtataaagtttgggtttttgtctcaaggatttgatccatatttatccctaaatatttcttaagggatgtaactttttataaccattaagtggggggaagggggtggagggggtggtaataattataactgaaaggtttaaatatactacctaagaaaaaagtacttctgtgacatatacaaaaaaatctagtggataggcattagatgaatagagaatattaattttgcagaaatgaaggaaaatctcttcgtgctagtacagcgtattcccaagagagtttattttcctttctccaattaatgtggtcataaatttcggtaaaatcaagaaataggtgaagtgcaagctagtttctataatgaccattaaaaaaattctgctgtgtaattcttgccagttaaaattataacttgcaaatgagcagaataaatgaggtttttttcaattaaaaattactataaatccaggaggcaaactattttagcactcagattatctgatttaatacatattattgaatatcagtctcaaattttgctaaatgcttatcagcatgaaatatgttgatcagtgatgagttgggcttaatgcaaagatcctaatttaataaagaaacctgtaaattactgttacctaaaatatatgtgtatattaatttcacatataaaggtagatttttcaaagaaaaatttggtaggcggtagtttagaactctgatcaggtactacatcaaccaaaagaggaaatactttaaaaattccttttagcaacctgagcaatcttattctcgtaacaatagtagtaatttgggacattgcaaatgtttatcatgttgtaaagtagcatcagttgtatcctttcattaaaacttgataaacaaaa

SEQ ID NO: 56786 - DNA, 1187 bp, Homo Sapiens
agatgggtggaggcactgggccacctcagagggccagtgtcttgctgaggggccggagcagtcctgtgcctgcagcctccggagccatgggaacagggctgcgaagtcagtccttgcgagagccccgaccctcctatggaaagctgcaggagccctgggggaggccccaggagggccaactccgcagggcgctaagcctcagacaggggcaagagaagtccaggtcccagggcctcgagagaggcacagaagggccagatgccactgcccaggagcgggtgccggggagcctgggggacacagagcagctgatccaagcccagcgaagaggcagccggtggtggctgaggcggtaccaacaggtaagaagaaggtgggagagctttgtcgccatcttccccagcgtgactctgagtcagccggcctccccgtagcccacactgggcaccatcagctaaagatgctggaagccatcgtggcccccttgctgtgcctggaccagcccaccgtgtctgctgacctacctcttcacagctctctggactttggctgggtggccctaggaggcttctgccaccagctcactggagtcgccacgtggctgccactcttagctctggcccttccactccagcactagctctctttgaagatcccagcagggtcaaaaagaagggggctcagctgtctgccctctgggcttgggtaggggccttggactatgattctatgaaggtttagaagaagcctgcccggaatgggggctgtggacgctcctgccccacacgaccagctgtcaacttccaggacggagcttgatgaagccagacccatggccgagaggctcacggacgttgcctggtcactgggccatgacccaactgcccttcttgtcagttgctgatggtgggccagggcgcaggtctccctcccagatggtgagccctctggggcaaggaccacagctgggtggccctcctggctgagcactctgtgctgaaaacctttgaacctcacggtgtcctgatgaaggaagcagaggaagtcttcctccctgtgtgacagagggggaaactgaggcccagagtggggaagggatttcttggttttgacatctccgaccccaccccaccccatccagtgtccagcactggagtcgaacacagtaataaagatgctgagaaaaa

SEQ ID NO: 56787 - DNA, 1629 bp, Homo Sapiens
gatgaactgttttcagcccgggtcaccccagccctggggtggaggcccattgaggatggccgagcaggggcgggcatccaggcaggtccagcagtcctggcgggctgaggagaaggaggtcagtgctcagggagacatccgcagagggacctggcaggcagagctccagaagggagggaactgcacagacagaaagctccagaaggctgcctgagggcctctgaggcctccggagtcaggcgccatggatgtggaaggtggactcttcagcatggatgggaccctagggggctgtggacccccggcccctgggactcacaggtgggagacaggagttccaaccgccagggggagagtcctggaggatcctgggctgttggcagccacccagcagggcccgtcctgggagtggggctggactcttcctgcaggaaaggctgggctggacctgctctgagaggcttcagaaccagccacacgaagaccaaagtgaagagcaaggagctgaactccacgcagaacacagcgcagcgtcctttaaaggaaggccaaaaacaacccaacaaaaatgccaggtgatcaaagcggtcacagcacaatgtccacatccaacgagaaattgctactacgtccagacgcagggaaaggtggccgtgggaacgtgagtcagcagcaacaggcccagaagggcagccacggtggacttgtcagacgtggaccctgaaatgacaatcacagcatgatttcaggcaggagcctgaaatggtacagctttggacatcggtttggcaaattcttttagagagaaacacacaccttccctaggacccagcaactccactcctaataaccaagtgaaatggaaggagttgtcctcagcaaaacgtgtgtgcggaagttcacagtcactttctcggtgataaccaagagctggaaaccactgcaacacccaccagcaggtgaacggattaacacactgggctagggccacacaatgagatgctccgtggcaacacaaaatgaaccgtggacacacactgcacggcggatgaatatgcagacatcaggccacgtgaagggagccaggccccgaggcgccacgctttgtgattcagggtggtccctctgcgcccaagacccggctgcctcctcctcttcctggctgcagggagtgcttgtgtctgaagaacgccaggctggtgtccccagagggcggctggaggggctcagaaaccattttcaccttctgtctcctccatgtctgcactgtttgggaaagaaagcacgcagccaaagagcgcaaagaggctcagaggaggcccgggtgccctggagagacgctgcgtcctgacgacacagcatccctgtcccgcagcggagatttcccagatgaaggattccccggcgggagacagggccctgcacacaggtcctctgccacgctgctcaccatgcctgtgtgttatctccccatgaaaagtcacctaggccgagcatggtggctcacgcctgtaatcccagcactttgggaggtggaggcgtgcggatcatctgagatcaggagtttgagaccatcctgagtaacatggtgaaaccccgtctctaggaagaatacaaaaattaactggg

SEQ ID NO: 56788 - DNA, 1791 bp, Homo Sapiens
agtgagaccccatctcaatttaataaataaataaggaagaaagagggagacagtagctgctcaaatcatgggtgggaaagctgggcctgggagcgtttagctggtggggtcttggcgaaggcgggggacgggcagaaccttgggttcatcatctctgggaaccctttgtgcacccatcacctagcaacaggatgcagccttccctcggccctggaaggccaggtcacaaaggccatcagggcttgtccgggagccggtatcccctaagactgccctgtgcctctcgcggcgatcccggcccagcggctgggcgttagggccaccgctcatgtgcgtcatctgcttcgtgaaggcgctggtgcgcgtgttcaagatctacctgaccgccagctacacctacccattccgcggctggcccgtggccttccgctgggatgacgtgcgcgccgtgggccggagcagcagccaccgggcgctgacctgcgcggcagccgcggcgggcgtgtggttgctgcgggacgagacgctgggcggggatgcgctggggcggcctccacgtggggcgcgcagccaggcgcagtgcctcttgcagcagctccgcgagctgcccggccagctcgctagctacgcgctggcccactcgctgggccgctggctcgtgtaccccggctccgtgtccctgatgacgcgcgcgctgctgccgctgctgcagcagggccaagagcgcctcgtggagcgctaccacggccggcgcgccaagctggtggcctgtgacggcaacgagatcgacactatgttcatggaccgccgccagcacccgggcagccacgtgcacgggccgcgcctcgtcatctgctgcgaaggcaacgcgggcttctacgagatgggctgtctgtctgcaccgctcgaggccggctactccgtgctgggctggaaccaccccggcttcggcagcagcactggcgtgcccttccctcagcacgacgccaacgccatggacgtggtggtcgagtacgcactgcaccgcctgcacttcccgcccgcgcacctggtggtctacggctggtctgttggcggcttcacggccacctgggccaccatgacctacccggagctgggtgcactggtgctggacgccaccttcgacgaccttgtgccgctggcgctgaaggtcatgccccacagttggaaggggctggtggtgcgcaccgtgcgcgagcacttcaacctcaacgtggccgagcagctgtgctgctacccggggccggtgctgctgctccgacgcacgcaggatgacgtggtcagcacttcgggccgcctgcgccccctgtcacctggtgacgtggagggcaaccggggcaatgagctgctgctgcgcctgctggagcaccgctaccccgtcgtgatggcgcgagagggccgcgccgtcgtcacccgctggctgcgcgctggcagcttggcgcaggaggccgccttctatgcacgctaccgcgtggacgaggactggtgcctggcgctgctgcgctcctaccgtgcacgctgcgaagaggagctggagggcgaggaggccctggggccacacggacccgccttcccatggctggtgggccagggcctgagctcgcggcggcgccggcgcctcgcactgttcctggctcggaagcacctcaagaacgtggaggcgactcacttcagccctctggagcctgaggagtttcagttgccctggcggctgtaacctatatgccccagtgggggatcacgcacttgaactccaaaaaaaaaaaaaaa

SEQ ID NO: 56789 - DNA, 856 bp, Homo Sapiens
atgccgaagccgacgctgctgctgcgcgggggctgggagcgcgagcgcagccccggggactcggagctgggccgccagttccgggactggtgcttgcgcacctacggcgactcggccaaaaccaagacggtgacacgcagcaaataccagcggatcgccgaggtcctgcagggcggcggcgggactggcgcgggcagcggccccgcagccggcgagaaaggcaagttccagttctgggtgcgctccaagggcttccgcctgggcagcggccgggaacccaagatgggccaagtggtgtatgtgccggtcaagacgggctcgggggcagatggcctgtcggagccagagggcatctctctgaagcgggtcgctgtggtggaagatttctttgacatcatctactcgatgcatgtggagagctcagcggagccaggcaaagcccccaagcacgctgggcagaagaaaacctaccgagcgatcgcagagacctatgccttcctcccgagagaggccgtgacccggttcctgatgagctgtacggagtgtcagaagaggatgcactttaactccaatggcctggaacccaaagaaaacgagcctccatctccactggtctctgggattattgattacaacatgcccctcacctccacctacctgaagcagatgaagcttcgagtgatgaattcccaggagcagccatcctcactgtctccggcacctggcttcgtaaacactgttatcaccgtgctcatctgtgcccatgaagaatgaagcacaaaaccgcacaaacagccggaagcacagccccctggttttgtttcatacagaatggcactaaatccaggtcaccact

SEQ ID NO: 56790 - DNA, 9035 bp, Homo Sapiens; identical to SEQ ID NO: 25087

SEQ ID NO: 56791 - DNA, 7289 bp, Homo Sapiens
agaggtcctatcgctcccagcggtttccgcagccacctccaccacctccgcagcaaaacgctagccggactggagggccctcgccggcgtcgtgctgacgtcacgcgcgtgctgacgtcgcccgcggccgcggcctctgaagcgggctggggatcggggggcgccgagtttgactagtttgggggcggctgggcgcttggcgttcctcccgccgcccgctgcgccccgcaagccgcgcccctggcgggctaagtgagtcccgcccgctcccgcggggacccgcactggaggctgggcggctctcggcgaaagttggccgctcacagactggcaggcgggcgggcggccgcagccatggagccccgcagcatggagtacttctgcgcccaggtgcagcagaaggacgtcggcggccggctgcaggtcggccaggagctcctgctctaccttggcgcccccggcgccatctcggacctggaggaggacctgggccgcctaggcaagacagtcgacgcgctcaccggctgggtgggttcgagcaactaccgggtatcattaatgggattggaaattttaagtgcctttgtggacagattatcaacacgctttaaatcctatgtagcaatggttattgtagctttaatagacagaatgggagatgccaaagacaaggttcgagatgaagctcagactctgatattgaagttaatggatcaagtagcaccacctatgtacatttgggagcagttggcttctggttttaaacacaagaattttcgatctcgagaaggcgtgtgtctgtgtcttattgaaaccttaaacatttttggggctcagccactagtcatcagcaaattgataccacatttgtgtatcctgtttggagactccaacagtcaggtgagagatgctgcaatattggctatagtggagatttatagacatgtgggagaaaaagtgaggatggatctttataagagaggaattccccctgctagattagaaatgatatttgccaaatttgatgaagtgcaaagttcaggcggtatgattttgagtgtctgcaaagataaaagcttcgatgatgaagaatcagtggatggaaataggccatcatcagctgcatcagccttcaaggttcctgcacctaaaacatccggaaatcctgccaacagtgcaaggaagcctggttcagcaggtggccctaaggttggaggtgcttctaaggaaggaggtgctggagcagttgatgaagatgattttataaaagcttttacagatgtcccttctattcagatttattctagtcgagaactcgaagaaacattaaataaaatcagggaaattttgtcagatgataaacatgactgggatcagcgtgccaatgcactgaagaaaattcgatcactgcttgttgctggagctgcacagtatgattgcttttttcaacatttacgattgttggatggagcacttaaactttcagctaaggatcttagatcccaggtggttagagaagcttgtattactgtagcccacctttcaacagttttgggaaacaagtttgatcatggcgctgaagccattgtacctacactttttaatctcgtccccaatagtgcaaaagtcatggcaacttctggatgtgcagcaatcagatttatcattcggcatactcatgtacccagacttatacctttaataacaagcaattgcacatcaaaatcagttcccgtgaggagacgttcatttgaatttttagatttattgttgcaagagtggcagactcattcattggaaagacatgcagccgtcttggttgaaactattaaaaagggaattcatgatgctgacgctgaggccagagtggaggcaagaaagacatacatgggtcttagaaaccactttcctggtgaagctgaaacattatataattcccttgagccatcttatcagaagagtcttcaaacttacttaaagagttctggcagtgtagcatctcttccacaatcagacaggtcctcatccagctcacaggaaagtctcaatcgccctttttcttccaaatggtctacagcaaatccatcaactgtggctggaagagtatcagcaggcagcagcaaagccagttcccttccaggaagcctgcagcgttcacgaagtgacattgatgtgaatgctgctgcaggtgccaaggcacatcatgctgctggacagtctgtgcgaagcgggcgcttaggtgcaggtgccctgaatgcaggttcctatgcgtcactagaggatacttctgacaagctggatggaacagcatctgaagatggccgggtgagagcaaaactttcagcaccacttgctggcatgggaaatgccaaggcagattctagaggaagaagtcgaacaaaaatggtgtctcaatcacagcctggtagccggtctgggtctccaggaagagttctgaccacaacagccctgtccactgtgagctctggtgttcaaagagtcctggtcaattcagcctcagcacaaaaaagaagcaagataccacggagccagggctgtagcagagaggctagtccatctaggctttcagtggcccgaagcagtcgtattcctcgaccaagtgtgagtcaaggatgcagccgggaagctagtcgggagagcagcagagacacaagtcctgttcgctcttttcagcccctcggtccaggttatgggatcagccaatcaagtcgactgtcgtcttctgttagtgccatgcgagtcctgaacacaggttctgatgtggaggaggcggtggcagatgccttgaaaaaaccagctcgaagaagatatgaatcatatggaatgcattcagatgatgacgccaacagcgatgcatctagtgcttgttcagaacgctcctatagttctcgaaatggtagtattcctacatatatgaggcagacggaagatgtggcagaagtcctcaatagatgtgctagttccaattggtcagaaaggaaagaaggcctcctaggtctgcagaacttattaaaaaatcagagaacactaagtcgagttgaactgaaaagattatgtgaaattttcacaagaatgtttgctgaccctcatggcaagagagtattcagcatgtttttggagactctagtggatttcatacaagtccacaaagatgatcttcaagattggttgtttgtactgctgacacaactactaaaaaaaatgggtgctgatttgcttggatctgttcaggcaaaagttcagaaagcccttgatgttacaagagagtcttttccaaatgatcttcagttcaatattctaatgagatttacagttgatcagacccagacaccaagcttaaaggtgaaggttgctatccttaaatacatagaaactctggccaaacagatggatccaggagattttataaattccagtgaaactcgcctagcagtgtctcgggtcatcacttggacaacagaacccaaaagttctgatgttcggaaggcagcacagtcagtgctgatttcattatttgaactcaataccccagagtttacaatgttattaggagctttaccaaaaacttttcaggatggtgctaccaagcttcttcataatcaccttcgaaacactggcaatggaacccagagttccatggggagtcctttgacaagaccaacaccacgatcaccagctaactggtccagtcctcttacttctcctaccaatacatcacagaatactttatctccaagtgcatttgattatgacacagaaaatatgaactctgaagatatttatagctctcttagaggtgtcactgaagcaatccagaatttcagcttccgtagccaagaagatatgaatgagccattgaaaagggattctaaaaaagatgatggcgattcaatgtgtggtggtcctgggatgtctgacccaagagcaggaggtgatgctactgactcaagtcaaacagctcttgataataaagcttcattgctccattcaatgcctactcactcctctccacgctctcgagactataatccatataactattcagatagcatcagtcccttcaacaagtctgccctcaaggaagccatgtttgatgatgatgctgaccagtttcctgacgatctttccctagatcattctgacctagttgcagagttgttgaaggagctgtctaaccataatgagcgtgtagaagaaagaaaaattgccctctatgaacttatgaaactgacacaggaagaatcttttagtgtttgggatgaacacttcaaaacaatattgcttttattgcttgaaacgcttggagataaagagcctacaatcagggctttggcattaaaggttttaagagaaatcctaaggcatcaaccagcaagatttaaaaactatgcagaattgactgtcatgaaaacattggaagcacataaagatcctcataaggaggtggtgagatctgctgaggaagcggcatcagtgttggccacttcaattagtccagagcagtgcatcaaagtgctttgtcctatcattcaaactgcagactacccaattaatctggctgcaatcaaaatgcaaacaaaagtgatagagagagtgtccaaggaaaccctaaacctgcttttgccagagattatgccaggtctaatacagggttatgataattcagagagcagtgttcggaaagcttgtgtcttctgcctggtggctgttcatgcggtaattggtgatgaactaaaaccacatctcagtcaacttactggcagtaaaatgaagctactgaatctttacatcaaacgtgcacaaacaggttctggaggagctgatcccactactgatgtttctggacaaagttagtgaagctcatcacagcgaaccaggtctctcaaaagaaaggacagatagaccaccctcatcaatgaaaggaagttctcaaacacatcctttggaacttactattgtttcccagttttagttttttgtttcgtttcgttttgtattttctgtaacagaggactatcctcagtctgcatgtaacttttatgatagttattccaaattcaagaagaagcagtattaacatcaattgatcgacacaaagtaatttttaatttaattcatcatttcacatgtttgtactttgtcttcccattaacctttgccagtgttatgattgtataaatttttttaaatgctggttaaacaggaatgcttaaagctttaaaagtttaacagtctaaaacatttttgcttttattcaactgcagaataatatttttattgctactttgagttttgtttcgtatcatgtcctatgctagaaatatttaaatgatgtgaaacaaagcaggactaatttgaactacagctggactccgtttgtgtgatggtgatacatgtcattagttgcaacttctttggggtgatctatagtttgaaaactaaaacctcaaagacagatgttacagaatcagccagttctgtaaaactgatattgtctattggttattgatcttgccatctttatttaaaaccatgtcccttctatgatcccttaagaaagctgcaccaaatcatctgcctgttttttcttgatacttactgaaatagaaggttttattgcagggtttattttggtttgtttatatctttgttgtgaatgatgcttttttgtatttattaatatcaaattcacttatgaataaacttgataatggaaacggacaaaaaaaatcaagtgcgtgtgtgtccttgaccgtcttctgtttctcacgtaataaacaaattatcgagacatgggagtgaccagcaccttttctttaaatggtggaacctggtttccttttaccatgaaattgtcttacttgaaaatattgatcctgatgagagagaagatggtgccaaggctgtctttgtataatgggctcaaattctctacctcttcagggctaatacttttaactgagctgctgcctatagtgtcttttggaaaactacttaaagggtgattttctgttactttttagcaaatttttttaatcacctcttgctacacccattcttttcatgtgcagccgactcaaaaattaccagttttggtgaaaggctaaattagataatttggaaccaggatactaatgatttctcatctttacttttttttaatcctaatataaagtgaatttgattgaaaaggcaaatagctattagggaagcagtttgccattgttgcagagttatctgtactttgtttaactgaaaaaaatgtagaaatatatgtaaagaatttaagacaagagtactgaatggatgatttgtcataggctttcccctttctttctgttctagcagcaggaaaagtttctctatatcctctccctctacctgtaacaattttgttttctactgttaattacattgtgtatttatagttctatgcttactgttgtgcatatactggcaataaaactgtacataacattacttgaaaaagttaataatgtatatcagtttttctgtctcactgtgtaacaagtcactcagttttattttaactttagacggtcttgtatcagtggtggtctcttgaattttgtaagttcatctgaggagaaaagatttttcaggtgtagctaccacaatcaaaggtatatagctacatacgcatgtatatattacagcttatctgtaagaagaaaatgcattttaaacacaactcttctcagtagcattttatgacctttggatatgtttgtaatcatttcgaatcaaaatattgatttaattttgacctctggtttaagatactgctttaactactgttgacaaccaagtagagtgacttaagctgaacagtaactaactggaaaattagataagcacctggcatctaatggcaggcaggcactcaagaaatgaattaactacataatggaaaagtatggtttaatgtgtccaaatgaaagctagtagatgtaaacatggaaaaattgtgtttacaattttataatctcagttgataagactataagaaagctgattatttaaatcactatatacaatacacccttaatttgttcattccagaaacatactgagatgtcagctacttaaaaatggtcacaaaaagctactgtttatatttttcctcctgctattctctcccaaattaattattaataagtgttgttcatttactgcactgctgagaactaattaaaattatatattccagattgtaaaaaaaaaaaaaaaaaaaaaaaaaaaaaaaa

SEQ ID NO: 56792 - DNA, 3407 bp, Homo Sapiens
atggcatgggatggatcctttcgaatgcatttgagcagcggtctccaaccacagggccacagagctggaggtgagcagcaggtacccaaccttctgcgtgtcaccaatcacccgctacccccgcctccccgcccccgggagcgcctcccaggccaaggctccgagggccccgcgcatctccaagaccggacaggggtcctcactcgcaacacctgcggctggcagagggaaaataccaagggtgtgggggagggagagagtgtctctcagccgcctcagatggtccttcgggctcaatggggacgcgcagagcttcggcggagatggagcggggagggccctttctgcaccaaagatcagatctgggtgcttgacttccaggacagtactgttaatatgccttcaaaagggccccctcctttcccaggagtccctctcatgagcacccccatgggaggccctgtaccaccacccattcgatatggaccaccacctcagctctgcggaccttttgggcctcggccacttcctccaccctttggccctggtatgcgtccaccactaggcttaagagaatttgcaccaggcgttccaccaggaagacgggacctgcctctccaccctcggggatttttacctggacacgcaccatttagacctttaggttcacttggcccaagagagtactttattcctggtacccgattaccacccccaacccatggtccccaggaatacccaccaccacctgctgtaagagacttactgccgtcaggctctagagatgagcctccacctgcctctcagagcactagccaggactgttcacaggctttaaaacagagcccataaaactatgacctctgaggtttcattggaaagaaagtgtactgtgcattatccattacagtaaaggatttcattggcttcaaaatccaaaagtttattttaaaaggtttgttgttagaactaagctgccttggcagtgtgcatttttgagccaaacaattcaaaaatgtcatttcttccctaaataaaaatcaccttttaagctagagcgtccttacaactttgaaatgtgcaataaagaatacctgtgttttagctaatgtagcatatgtaattgcaaaatgatttagaatgtcatgaaaaatatgaacatttcctgtggaaatgctttaagaacatgtatttccattatcctatttttagtgtacaccagctgaatacggagcaatggtgtttataagcgtttttttaaactatctggtcacaaagactgttacgctaaaaatgtttactaaaagatcactaaactatctcccctcttgctgaagttctttgtagtaatagctcataaaaatttgtttattaatatttcccaagtgtctgttgactcattggactgttatgaggcttgtgccatttggggaacatgtaaactcaggctcccagaactgaagatggtggctggtggcacacttccggctgctcctccgtcacctgtgaactctacaagtgacgtctttttatttcaaagaagtttatttcccacttgtatagcattcacatgctttctttacgatcctcattgtctatttgagaatggttttctgagagtgagtttacattagtagcaagagttgtttgacctgatgttccattgtttttaccattcctgtagaaaaagggtgcacaacagaaaaatgaaaatgatgtgtcatggccgtaaaagtatagaaatctttaaaaattttaaaatgtacagtcccttatctatctttcccattccttgccactgatttttgaggaatataataaaaagattggaagagtataatgccatgagaaagaatgatttaggactgtgagggttataacatgccctaggtcagcaaccaagggttgaaatcagttctgttttagggggaaatggggggggcgacagatattattccaaaattaatattaattaatatttaaacgttggtgtttttatttaaaaatcagtaactaaccatctggaattgcaccatacttaaagtcttatccattactacactgtctttaaaacaatgtttctttaaatactctacaacgtttctaagaacgaacttcagacattttaattacagtaataatagcactccttttaaggagtttcagatccacactaaaactaaaatcataaaaggctgatacttttgtttgctgctaggctatattcttccattctttgaagtcctatgatgtaatatttttgaaacctagtgtatgtcttgtcactgttgtgatatttaatcgattaagaataccttgtaaaaaggagcaaaagcttcaatgtgaaacaattttctctctttatactaaacaactgaagatagatagtttagaaagataaggacctttgaaagaagacaactctgtcaaagttcataaggaatataaaaattcttcaggaaaagagaattcaatctatatgtcctcccgtttaatatcaagaatagaagaaattaagaggaaaactccacagaagagcataggccacttttagccatgtaaaaataagattaagtcacaaatacaacttttgaatttacctgtcaatatctctttaggacacaaaacaatgctgaagttaatataatttctaattttaaatgtcatttaagtgtagattatgccatctaggaaggtaagtaggaaaggtaaattaaatctatttttaaaattcaaaatattagagtatttttcccctctaaagccttttttggtgattattctgtatctgacataattgagaaactggtaagctgtaaagattccagtgtagcttctctgagaagttgtgagccagtccataactgcttcctcacatccatctgattgcaccatttctgcagcaaaccccaaagcagggtgccaatatgcagatggcatagggagtatcatccctcagccaaatcacttttccatctctaaagtttcatctattttggaagtcatctccaactaattgtgtctggatttagttgctaaaattgtcttatttatgaagcagcaatattcagcctgaaagcatttctgccatagttgttgtagttatatcgccaatggctgatttttttcattggaaagtaaatttaagtaattcgtgggatgtggtatattctgtgtcaacttcaagataatcactcattttctcgttatattcaggtctgaattaaagttaagttaatcacacagtgttcaatttaagcttctttaatgttgatgaaaggtatttgtagttcatataaactatacttatgtgaaggatagcagatgcttcatataaattatcattttgatatacatatcttatggtttatgagaaaagagaaaaaataatacatcggttttgctac

SEQ ID NO: 56793 - DNA, 3239 bp, Homo Sapiens; identical to SEQ ID NO: 25864

SEQ ID NO: 56794 - DNA, 5239 bp, Homo Sapiens
actgccgtgccggacccccgagccggagccgagcgcgccgaggccggggccatggagaaagcgcggccgctgtgggccaactcgctacagttcgtgttcgcctgcatctcgtacgccgtgggcctgggcaacgtgtggcgattcccgtacctgtgccagatgtacggcggaggtagtttcctggtcccctacatcatcatgcttatcgtggagggaatgccgctcttgtacctggaactggctgtggggcagcgcatgcggcagggcagcatcggcgcctggaggaccatcagcccgtacctcagtggtgtcggggtcgccagcgtggtggtctctttcttcctctccatgtactacaacgtcatcaacgcctgggccttctggtacctcttccactccttccaggatcccctgccgtggtctgtctgcccactgaatggtaaccacacgggctacgatgaggagtgtgagaaggcgtcctccacacagtacttctggtacaggaaaaccctcaatatctcgccgtccctccaggagaacgggggtgtgcagtgggagccggcgctgtgcctcctcctggcctggctggtggtgtacctgtgcatcctgcgtggcaccgagtccactggcaagatagagcagctggccaaccccaaggcctggatcaatgcagccacccagatcttcttctcacttggcctgggcttcggcagcctgatcgccttcgccagctacaatgagccatccaacaactgccagaagcacgccatcatcgtgtccctcatcaacagcttcacctccatatttgccagcattgtcaccttctccatctatggcttcaaggccaccttcaattatgaaaactgcttgaagaaggtgagtctgctgctgaccaacacttttgaccttgaagatggctttttgacagccagcaacctggagcaggtgaagggctacctcgcatctgcctacccaagcaaatacagcgagatgttcccgcaaatcaaaaactgcagcttggaatcggagctagacacggccgtccagggcactggcctggcattcatcgtctacacagaggccattaaaaacatggaggtgtcccagctgtggtcggtgctctacttcttcatgctgctgatgctgggcattgggagcatgctggggaacacagcggccatcctcacccctctgacagacagcaagatcatctccagccacctgcccaaggaggccatctcaggtctggtgtgccttgtcaactgtgccattggcatggtgttcacgatggaggctgggaactactggtttgacatattcaacgactacgcggccacactgtccctgctgctcatcgtgctggtggagacgattgccgtgtgctacgtgtacgggctgaggagatttgaaagtgaccttaaggccatgaccggccgagctgtgagctggtactggaaggtgatgtgggctggcgtaagcccactgctgattgtcagcctctttgtcttctacctgagcgactacatcctcacggggaccctgaagtatcaagcctgggacgcctcccagggccagctcgtgaccaaagattacccggcctatgcactggctgtcatcgggctgcttgtggcctcctccaccatgtgcatccccctggcggccctggggacttttgttcagcgtcgcctcaagaggggagacgcagaccccgtggcctgagatgtgggcttcccagccgctcacggttttacagatactatttacaggcggaaactcctcggctgctttttcaaatgcttaagccaggagtgctcagcccatcaacttcctgagtgtctaaagaagatgaggaaggtgtgcaggaagaaaactcccttgggagaacgcacaccctcccgtggtggctgttcctccctgtcacctgcctcctcatcatggaagggggtgggctatgaaagccggtctcaaagataactgcatccttcattccaggaaagccctagaattagggcacattgcaaactgaaatatgactataattcttatgggaccaaatttaagcaatttttgtttttggctgaagagacaccaaaatattagaggacaaatatttttagatccatttaaggagttttgaagtgcctaagatgacctatttgtcagtggtgcaaaattaattctcttcttttttgagttgtagtgaatatgcaatttctgtgttccccttccaccctttaaatcttaggatgacaagttataaagaaagaagatctttgtctgggacccccaaagggatcctttctctaaggtctctgacagtgggtccaggaccagacctctctacaaaaaattgccccaactacagtttgcaaccccaaaccacattagaagtctgtgcagacatccctccgtggtgtgtgtcttggtgcattggaaaaggagtcaggagccactgtgaggtgagaatgaaagtggatctcagctgggcacggtggctcacgcctgtaatcctagcaccttgggggtcaaggtgggtggatcacttgaggtcaggagtttgaggccagcctggccaacatggcgaaaccccatttctactaaaaatacaaaaaaattagctgggagtggtggcataggcctgtaattccagctactctggctgctgaggcacaagaatcatttgaacctaggaggtggcggttgctgtgagccaagatcatgccactccactccagtctgggcgacagagcaagactctgactcaaaaaaaaaaaaaagtggctctgactttcccataggcttaatattacatttggacatcgtggccaactctatcaagaccacaaataccacttacaattaattttaaattattcatctgtacatagttttctaaaatgtatataattcaaacagagcatcttgtaactgaagacacaccatatctatgatatcgcattagtccatgtggggaaaagaaagatcagattgttactgtgtctgtgtagaaaaggaagacataagaaactccattttgatctgtactaagaaaaattgtttctgctttgagatgttgttagcctataactttagccccaactctgtgctcacagaaacatgcgctgtaatgaatcaaagtttaatggatttagggctgtgcaggatgtgccttgttaacaatatgtttgcaggctgtatgcttggtagaagtcatcgccattctccattctcgattaaccagggacacaatgcacagcagaaagctgcagggacctctgcccaagaaagcctgggtattgtccaaggtttcccccccactgagacagcctgagatatggcctcatgggaagggaaagacctgactgtcccccagcccgacacctgtaaagggtcggtgctgaggaggaatagtgaaggagggaggcctctttgcagttgagataagaggaaggcttctgtctcctgcttgtccctggtaatggaatgtctcggtgtaaagctgaccattcccattcgttctattctgagataggagaaaaccgccctgtggctggaggtgagatatgctggcagcaatactgctctgttactccttgctacactgagatgtttgggtaaagagaaacataaatctagcctacgtgcacatctgggcacagtacctttccttgaacttattcgtgatacagattcctttgctcacatgtttccctgctgaccttcttcccacctgttgccctgctacactcccctcgctaagacagtaaaaataatgatcaataaatactgagggaactcagaggccagcgccggtgcgggtcctccacatgctgagcgccggtcctgggcccactgttctttctctatactttgtctctgtgtcttatttcttttctcaaaaaaatttttctttttttaactgcaataaagtaggtcgttacccctaaagtgagcgagtcccttcctgctctaacgtccagtgcttccttgagatcatggaattctggagagtttctgtggatatatttgcacagatatctttgaagacacaaacactcacctgggacgttggccggagatgtctttttatttttgtgctgtaaaattctcttacagcaaaaataggctttagaaaggtcttctactgtcttcagcaaccatctcatcttccagcttcacctgattgtccagttatcatacatttgactttcaaatgtatgaaccagcatgtaccccatggatttaatcttatctaccccgtggattcaatcttcttatcagaaggttcttttatgtcaaaaaacctgctgtcaaggcttgaagagccggcacactcaatggcaaacacagcaccgagtctgctctgaatcctggaggatctggccctcctctcaacccccactcacagtcaccgtcttacaactcagggccacctgggatcagtcatcagtcagggtgcgtaagccttgaataccaggtagcctcaggagtgaaaagataaatgtcctagatcattaccttattcagtgtccccaccttgcagcgcattccaaccacctgggagcatttaaaactccagatgcccacaccacaccctggggccacccatcagaccttctggaagcaagacctgggcctccatggccccaaaaactccctaggtgatccgatgtgcagccaaatctgagaggccccatttaaaaaagaaagaacatgggtggtacattgaggagtatttacattttataaaatgacttaaaaatttgaaggcatttttgagcatttccaattatatggaagagttacttctacggaatagtttttgctcatggaactcaaacagatgaagcaccactgttacagaataatgtgctccagatgaaaatgtctcgtttctgtgaatttcatgaagagcagaacatttctcaagaatcctcttgagccagtaatcaatcctgtctcaaaaaatgttctttgccatttcctagatactgcacaaaagtggccatgtcgacatttgtccacccaccctccaataagctggagcgacaaagggacattccatccctgtacccttagtggtagccatgacacgatggccagatcatggactccggaaagctttctgtttttactggaaacatagcaaaccttgatttagctccaagaaattgagtagggaaatatttgttttttagcaattgtcatagtaaataaaactctaagcaagtgtgtgtac

SEQ ID NO: 56795 - DNA, 814 bp, Homo Sapiens
gcaggtaggtggacggagagatagcagcgacgaggacaggccaaacagtgacagccacgtagaggatctggcagacaaagagacaaggtgagaaggagactttggaagtgacccaccatggggctcagcatctttttgctcctgtgtgttcttgggctcagccaggcagccacaccgaagattttcaatggcactgagtgtgggcgtaactcacagccgtggcaggtggggctgtttgagggcaccagcctgcgctgcgggggtgtccttattgaccacaggtgggtcctcacagcggctcactgcagcggcagacccattcccggatctgctccagtgcctcaacctctccatcgtctcccatgccacctgccatggtgtgtatcccgggagaatcacgagcaacatggtgtgtgcaggcggcgtcccggggcaggatgcctgccagggtgattctgggggccccctggtgtgtgggggagtccttcaaggtctggtgtcctgggggtctgtggggccctgtggacaagatggcatccctggagtctacacctatatttgcaagtatgtggactggatccggatgatcatgaggaacaactgacctgtttcctccacctccacccccaccccttaacttgggtacccctctggccctcagagcaccaatatctcctccatcacttcccctagctccactcttgttggcctgggaacttcttggaactttaactcctgccagcccttctaagacccacgagcggggtgagagaagtgtgcaatagtctggaataaatataaatgaaggaggggc

SEQ ID NO: 56796 - DNA, 8645 bp, Homo Sapiens; identical to SEQ ID NO: 31176

SEQ ID NO: 56797 - DNA, 2624 bp, Homo Sapiens
agaggtgggggcgggggccttaccccaccctggcaccggcaggcgcgggcggatggggggatgtcgcctagagccccccggccggcccacaaactcccgtcccccttccggctctgcctggacgtccctgcgggccccgggggaaagcacccaacttctcccgcctcggcttctagcagaaacgtgacggggctggactttgatcgccgagggctctctgctcttcagagtctgcttggaacgggataagagggatggtgccatccagggaagctctgctgggaccaggcacaactgccattaggtgccccaagaaattacagaaccaaaattacaagggccatggattgtcaaagggaaaagagcgagagcagagagcatcgatccggttcaagaccaccctcatgaacacactcatggacgtccttcgccacaggccaggatgggtggaagtgaaggacgaaggggagtgggatttctactggtgtgacgtcagctggctccgggagaacttcgaccacacctacatggatgaacatgtgcggatcagtcacttccggaaccactatgagctgacccggaagaactacatggtgaagaacctgaagcggttccggaagcagctggagcgtgaggcaggaaagctggaggcagccaagtgtgacttcttccccaaaacctttgagatgccttgcgagtaccacctgtttgtagaggagtttcgcaaaaacccaggaatcacctggatcatgaagcctgtagcccggtctcaagggaaaggcatcttcctcttccgtaggctgaaggacatcgtggactggaggaaggacacaagaagctctgacgaccagaaagatgatattcccgtggagaactatgtggctcagcgttacattgaaaatccttacctgataggaggccgcaagtttgacctgcgtgtctatgtgctggtgatgtcggtgtttgctgaatgcctgctgtggtctgggcacaggagacaggatgttcacctcaccaacgtggctgtgcaaaaaacatctcccgactaccacccaaagaagggctgcaagtggacgctgcagcgcttccggcagtacctggcgtccaaacacgggcccgaggcagtggagacactcttcagggacatcgacaacatctttgtcaaaagcctgcagagtgtgcagaaggtgatcatcagtgacaagcactgcttcgagctgtacggctatgacatcctcatcgaccaggacctcaagccgtggctcctggaggtcaatgcgtccccatcactgacagccagcagccaggaagactatgagctcaagacctgcctcctggaagacaccctgcatgttgtggacatggaagcgaggctcacgggaagggagaagcgagtcgggggctttgacctcatgtggaatgatggccctgttagcagagaggagggggctcctgacctgtcgggaatgggaaactttgtgaccaacacacatctcggctgcgtcaacgatcggaagaaacaactgaggcagctcttctgctcccttcaagttcagaagaaagcttccagttgatccccagctgccaggaggaaatcagccttagcaggccttgtgtttgagattgggagctgagccagaaaccggaaaaccctgggctcatgggcaggacagcttcgggagttgagtgtcaagcccgaagggaagacttttggaaggaaaatactggcaaatccaagaagtgaaccagccgactttaggaaagccagaagccaggctactctagaccttctgccttcagagcatgaggacttctcccactcatccctgtacctgaggcacaccaacccagacaggtccaggcatggactccaggttccctatttccagaaggaatgcgattagctttttttggcccagcacccaccctgccagggaggaaggggcaattttccagtgatgaaattgtgaatcaggcagtcacactggacaacatctagcaaggtgaattctgcaactccctactttatttacattttaaaataagcaatatattcatacggtttaaaatccaaagtttacaaaagggtatagggtgacatctccttccctcccacctgtgccccccaaccctgcaggtgctgttctgagggaatcacactgtgcttgcacaaaaattattagcttataagacaccagccttccccttgctttcctcacttgatgtatcttggagcttgttccttattcttgattatagttgtatggtattgcactatctggagctaacacctgtgacccacactcatgttttaaaagtttctgcattagtcaaaaatatttaaaaggagattcaactttacaacccatatgtctagcttctcttgaaaacacgtaagaactggccatgacagcctgtgtttctatgtaactatgagccagagccaaggagcggggggaccaggagaggtgtgcccctgccatgctgccatttgttatcacccgcctgtcaaatcacaggtttatttcaaggcaagaaccatgttcataggttgtattctaaatggagtggcgtgcccttactgaaggactagatgaggcaaataaagactagttgctgctatt

SEQ ID NO: 56798 - DNA, 5061 bp, Homo Sapiens; identical to SEQ ID NO: 31423

SEQ ID NO: 56799 - DNA, 4448 bp, Homo Sapiens; identical to SEQ ID NO: 25003

SEQ ID NO: 56800 - DNA, 12395 bp, Homo Sapiens
cgctgcaagtcccggggccctgcctccatcgtcctaggggttccgcgggcaggagcaacccagaagcaccggtgaggccagcgcgtcctcgcagccatgagcagtgagcaggataaatcggccagcaaagaaaaatccaagaaaccagtaagatttctaccacagctgtctatggagaaattagccagcaaagaaaagttcaaggcaccagcaagagctttaccacagctgtctatggtgagtacaaagccccactggcagcaggcagctccatcattccatttgagtgtaaagcaggatgatgagagtccagaaccatttagtgttaaaaatgaacagtcccatgctgaatacatggaacgttttggaaaaaagggcaaattaccccaccaagttgatgatagttatgttggaccatctacttccaaatcaaagggcaaatctccacataaagaacgagaaaactttagaagtactcttgttaatgtcattatgcaacaagatgctgacttagactcagctgtccctgatggaagcacaattccaaaaccgaccgcttctgctatagagaaagacatcttgagatattactattatattcaccatggaattgatacagaccatgtagccccaatggaagattcttggctagaacacgtactggatttagttccacaacatctgaaagtcttcactgacagcatagttacattatctgatgaaatgagagaggattatcttcttagtgtaaggaaatccatagttgattttgttttaaaagatcctcgagagaaaggagatgataagaagacagatgaacttccagcccatcgtgctgaaatggaaattctgccaaaaccttggaggaaatcttttttagctgcaagcagttatattagggatcacttgaatgcaatgaaccccacaatgctggctgtactagatttgtggcacactaattttaaaaaattacgtttagttgatatcaaagaatttcataattgccaggatgcattagagctgtcaagttttcagaacattatcatgagacacatggactctgccaaagagactctacttaaaatgtggtttccagaagtgcagaatatttattaccaaggtaataaaaaaaagcaattgccaactggtgacagcagtgccaaattggaatcttttttcaactgtgctgctgcacttatgactttacagctgcaggacctcactttagtctccatgcaagatttcacggacttaattgcacaacccccagattctgttagagcttttgaacatccaggtttcatcatgaggctgattcttgataatgacaccattaagtttgaacctgagttgagtgactatatagatatctttctaaatgtttatgacgtcatgattaaagctgtcagttttgtgccaagagttgagacaaaattgtattccaagtgggaaagtaagtctaaaccaacaaccttgaagcccataattctgaatgaaattgtagatgctcacaaagaaaagatcaaggaagttattatgaaagagagtgtggcacctactgagcacctcagactctatgacaagtatgactttttaattaccagaaaagctgagcgagatgttgataacttcctcgcagaaaatcatagttatgaaaaaataatagatgaaatttgcaaataccagaaactaatagaggaaatacagtacacatccataaagactattcgtttaggaatgtttgaaatgcactgtgaggaattaatcagagctttggtgaagcgagcagatattatttgtgggaaacttctagctaaaatgttcagagatcatcaggaagtaaatacaagattatgcgatgaatttgagaggatagctgaaaaagctcttagcactcctccaaatacagcagaactaatggaaatgaaggcttacattcagaaagtggaggtaactgatatgattgaactagaacagagattagtggattccaaaaactgcctcgccttcctcatcgagtatgtcaacttttctccagcagacatgaggctaaataatagtgttttccagtggtatggaaggatgggagaaatttttgaagaacacaggaaaatcattaaagagaaaatagaacaatatcaagaaggtctgaagttacggtgtgaacggtttgtggaggaattggagagttatgctaagcaatcagaagaattttattcatttggagatcttcaggatgttcagcggtacctaaaaaaggctcaaatactgaatggaaagttggatttagctgcagataagattgagcagtttaatgctgaagaggaagcatttggttggctaccatctgtatatcctcaacgtaaaaaaatccaagatggcttgaacccttatcttcgtctttatgaaactgctgtcgaatttagcagcaactatagagcatggacagaagggccatatcataaagtgaatccagaccaagtagaagcagatattggaaattactggagaggattatataaactggagaaaacctttcatgattctccatatgcattggcaatgacaaaaaaagtaagatcaaaggtggaagatttcaagcagcacattcctctcattcaagtgatctgtaatcctggtttgcgccccaggcactgggaggccatgtctgccattgttggttaccctttgcagccatcagatgactccacagtctcctcttttttagacatgaatctggaaccatatatagaccgatttgaaggtattagtgaagcagctagcaaagaatattctcttgaaaaggcgatggagaagatgattactgagtgggatgcagtggaatttgtcatccattcttatagagaaactgggacatttattttggcatcagttgatgaaattcagatgttgttggatgaccatattattaaaacacaaactatgcgaggatctcctttcattaagccttatgaaaaacaaatgagagaatgggagggcaagctcctactgcttcaggagattctggatgaatggctcaaagtccaagccacgtggctgtatctggagcccattttcagctctccagacattatgtctcaaatgcctgaggaaggcagacgatttacagctgtggataagacatggagagatataatgagaagtgtcatgcaggataaacatgttctgacagttgtaaccattgacagaatgctggaaaggctgaaaaaatctaatgaacttttggagctcattcttaaaggacttaatgaatatttggaaaagaaacgcctctttttccccagattcttttttttgtccaatgatgaacttcttgagatactatctgagactaaagatcccactagggtgcaacctcacttgaagaaatgttttgaaggaatcgcaaaggtagaatttacggaaactttagacattactcacatgaagagcagcgaaggagaggttgtagaactcatagagattatttcaacagccaaagccagaggtcaagtggagaagtggttggttgaattagagagagttatgattaactccatccacaaggtaactggagatgcaacttttgcctatacaaaatatgaacgaattaactgggtaagggattggcctggacagactgttctctgtgtatcccaaatcttttggacaaaagaagtacaaacagctattccaatggggataaaggctcttgagcaatacttgaaaacatgtaacagacaaattgatgatattgtcactttggtgcgtggcaaattgtccatgcagaatcgcgtaactctgggagcacttgtggtactggatgtccatgctagagatgtcctctcatcacttgtaaaaaaaaatattagcgatgactctgactttgaatggttaagtcagcttaggtactactggcaagaaaatcatttagaaacaaaaatgatcaatgctggtttgcgatatggatatgaatatctgggtaattcccctaggctggttattacaccactcacggatagatgttacagaaccttatttggagcccttcatttgcaccttggaggagcacctgagggtccagctggcactgggaagactgaaactaccaaggatttggcaaaagctgtagccaaacaatgtgttgttttcaactgctctgatgggttggattatttggctttgggaaaattctttaagggactgttatcttgtggagcctgggcttgctttgatgagtttaacagaattgatttggaagtactctctgtggttgctcaacaaatccttactatccaaagaggtattaatgcaggtgctgatatactgatgtttgaaggaactgaactaaaacttgaccccacatgtgctgtctttataacaatgaaccctgggtatgctgggcgatcagaactgccagataacctgaaggctctctttcggacagtagcaatgatggtacctgactatgccatgattgctgaaatagtcctatactcctgtgggtttgtcactgctcgaccactgtctgtaaaaattgtggctacgtatcgcttgtgttcagagcagctgtcatctcaacatcactacgactatggaatgagagccgtgaagtcagttcttactgctgctgggaatctgaagctgaaatatccaaatgaaaatgaagaaattttgctgcttagatctatcattgatgtaaatctgccaaaatttttatcccatgatttaccactctttgagggaattacttcggatttgtttcctggggtaaaattaccaaaaccagattacaatgatttgctggcagctatcaaagacaattgtgcctccatgaatttgcaaatgactgcattcttttccgagaagattcttcaagtatatgaaatgatgattgtgcgtcatggttttatgattgttggagaaccatttggaggaaaaactagtgcatatcgtgtcttagctggagcactaaatgatatatgtgaaaaggggctaatggaagaaaacaaagttcaaataactgttttaaatcctaagtctgtcaccatgggccaactgtacggacagtttgattcagtgtcccatgaatggtctgatggggtccttgctgtcagttttagagcatttgcctcttcagtgactccagataggaaatggttaatttttgatggcccagtagatgcagtgtggattgagaatatgaacactgtgctggatgacaacaagaagctatgtctgatgagtggggagattattcagatgtcaccacaaatgaatctaatttttgagccaatggatttagaagttgcttcccctgccactgtttccagatgtggcatgatttacatggagcctcacatgttaggctggagaccactgatgttgtcctgggtgaatctgttacctgcgtcagtcagtgttattcaaaaggaattcataatgggcttatttgacagaatggtccctgtttcggttgaatttattagaaagcatacaaaggaattatctcctacttccgatacaaacttggtccggtccttaatgaatctaatagactgttttatggatgattttgctgatgaagtcaaactaaaggagagaaatgatcgagaaacttactctttgcttgagggcatttttctgttttcattgatctggtccgttggtgcttcttgtacagatgatgatcgattgaaatttaataagattcttcgagaactaatggaaagtccaatttcagatcgaactcgaaatacgtttaaattacagagtggtactgagcaaacatcctcaaaggcactaactgtcccatttcctgaaaaaggaacaatttatgattatcaatttgtcactgagggaataggaaaatgggaaccatggataaagaaattgaaagaagctcctccaattcctaaagatgtaatgtttaatgaaatcattgtgccaactctggacacaattcgatactctgcattaatggaattgctgaccacccatcaaaagccttcaatatttgtaggaccaacaggaactgggaaaagtgtttacattacgaattttcttttaaatcaactaaataaggaaatctacaaacctctgctaattaacttctcagcacaaactacagcagctcaaactcagaatattgtcatgtcaaaattggacaagagaagaaagggagtttttggtcctcctttgggcaagagaatggttgtctttgtagatgatgtcaatatgcctgctcgggaggtatatggggctcaacctcccattgagttacttagacagtggttagaccactggaactggtatgatctaaaagattgttccatgattaaactagtggacattcagatcatgtgtgctatgggacctccaggtggtggtcgaaatccagtaactcctcgatacatgcgacatttcaatattataacaatcaatgagtttagtgataaatccatgtatacaatcttctctagaatcttaacttggcatttagaaatctgttataaatttccagatgaatttctagatttgaccacacaaatcgtaaatggcacaatgactctgtataaagaagcaatgaagaatctcttgcctactccagctaaatctcactacttgttcaacctccgtgatttctcccgtgtcattcaaggtgtttgtttgtcaagaccagaaacaacagaaaccacagaagtgattaaacgtctttgggttcatgaggtccttcgagtgtattatgaccgccttctggacaatacagacagaagctggctcatcaactacattcaagaaattttgagaaactacatgtatgaagattttcatgagctttttcagcgtttggattttgataatgatggcatggtggaagcagatgacttacgcagcttaatgttttgtgatttccatgatcccaagagggaggataccaactacagagaaatcgcagatgtggataatcttcgaatgatagtagaaattcacctagaagaatacaacaatataagcaaaaaacccatgaaccttgtcttgtttcgatttgccatagagcacatcagcagaatttccaggatcctgaagcagcctcgcagccatgctctcctagtaggggttggagggagtggaaggcagtctgtcaccagattagctgcccacatggctgattattcagttttccaagttgaaatctctaaggggtatgatactactgaatggcatgaagatttaaaagtgatcttaaggaaatgtgcggaaggtgagatgcagggtgtcttcctgtttacagatactcaaattaaagaagagtcttttctggaagatgtcagtaatctgctaaatgctggggagattccaaatctctttgcattagatgagaagcaagagatatgtgataagatgcgtcagttagatcgccagcgggataaaaccaagcaaacagatggcagccccatagcccttttcaacatgtttattgatcattgccgcagccaactgcatgtggtccttgccatgagtcccattggagatgcatttcggaatcgtcttagaaagttccctgctcttgttaactgctgtaccattgactggtttcagtcatggcctgaagatgcactccaggcagttgcctcacgattcttggaagaaattgaaatgtcagaggaaatacgagatggctgtatcgacatgtgtaaaagcttccacacttctactatagatttatccaaatctttctttgttgaacttcaaagatacaattatgtgactcctacctcttacctcgaattaatctccaccttcaaactgttgttagaaaagaaaagaagtgaagtaatgaaaatgaaaaagagatatgaagtgggtttggagaaactggattctgcttcatctcaagtagccacaatgcagatggagttggaggcactacatcctcaattaaaagttgctagcaaagaggttgatgaaatgatgataatgattgagaaagagtctgtagaagttgccaaaactgaaaaaatagtgaaagctgatgaaacaatagcgaatgaacaagctatggcttccaaagccatcaaagatgagtgcgatgctgacctggcaggtgccttgccaatattagagtcagcactggccgcccttgatactcttactgcacaggatattacagtggtaaaatccatgaagagtcctcctgctggtgtcaagcttgttatggaagctatatgcatcttgaaaggaatcaaagctgacaaaatccctgacccaacaggttcagggaaaaaaattgaggatttctggggcccagctaagagacttcttggtgacatgaggtttctgcagtcacttcatgaatatgacaaggacaatattcctccagcttatatgaatatcataagaaaaaattatattccaaatccagattttgtaccagaaaaaatcagaaatgcttctacagcggccgaaggtctgtgcaaatgggtcatagcaatggattcatatgataaagtggcaaaaatagtagctcccaaaaagataaaactggctgcagctgaaggggagcttaaaattgccatggatggtcttagaaagaagcaggcagcccttaaggaagttcaggacaagctggccaggcttcaagacacacttgaattaaataaacaaaagaaggctgacctggaaaaccaggttgacctttgcagcaaaaaactagaacgagctgaacagttgattggaggccttggaggtgagaaaactcgatggagccacacagctctggagctaggtcagctgtacatcaacttgactggggatatcctcatttcctccggagtggttgcttacctcggagccttcacatccacctatagacagaatcaaactaaagagtggacaactttgtgcaaaggaagagatatcccctgctcagatgattgctctcttatgggtaccctgggagaagctgtgacaattcgaacttggaatattgctggattaccttctgactcattttccattgataatgggataatcataatgaatgcaagaaggtggcctctgatgatagatcctcaaagtcaggctaataaatggatcaagaacatggaaaaagccaatagtctttatgtgattaaacttagtgaacctgactatgtcaggactctggaaaattgcatccagtttggtactcctgtgttgctagaaaatgttggcgaagaactagatcctattttggaacctcttctactaaaacaaacctttaagcagggtgggagtacatgtatccggcttggggactccacaattgaatatgcacctgacttccgcttctatattactaccaagttaagaaatcctcattatcttcctgaaacatcagtaaaggtaacattattaaacttcatgataacccctgagggaatgcaagatcagcttctgggaattgtggtggcacaagaaaggccagaccttgaagaagaaaagcaagccttgatattacaaggagctgaaaataaaaggcagttaaaagaaatagaagacaagattttagaagttctttcatcttcggaaggcaatatattagaagatgaaactgctattaagatattatcttcctccaaggccttggctaatgagatttctcagaagcaggaagtagccgaagagacagagaaaaagattgacaccacccgcatgggctatcgtcctattgccatccattcttccatcctatttttttctcttgctgatttagccaacattgagcccatgtaccagtattcactgacctggtttattaaccttttcatcctgtctattgaaaattcagagaaatcagaaattttggcaaaaaggcttcagattctcaaggatcactttacttattcactgtatgttaatgtctgccggtcactctttgaaaaggataagctgctcttttccttttgtctaaccataaatctactgctgcatgagcgggcgattaataaagctgagtggagatttctgctaactggtggcattggactggataatccttatgccaacccttgtacatggcttcctcagaaatcctgggatgaaatatgtcgattagatgatttgcctgccttcaaaaccattcgtagagagtttatgcgcttaaaggatggatggaagaaagtatatgatagtttggaaccacaccatgaggttttccctgaagaatgggaagataaagcaaatgagtttcaaaggatgcttattattcgttgcttgaggccagacaaggttattccaatgttgcaggaatttataatcaacagattgggacgtgcattcattgaaccacccccctttgatttagccaaggcatttggagacagtaactgctgtgcaccactgattttcgtgctctctcctggagcagatcccatggctgcccttctaaaatttgctgatgaccagggatatgggggatcaaaacttagctctttatctcttggtcaaggccaagggcccattgctatgaagatgttagaaaaagctgtcaaggaaggaacatgggttgttcttcagaattgtcaccttgccacctcttggatgccaacccttgagaaagtctgtgaggagttaagcccagagtcaacacatccagatttccgaatgtggctaacgagttacccatctccaaatttccctgtgtcagtactgcagaatggagtgaaaatgaccaatgaagcaccaaaaggtttacgggctaatatcattcgatcatacctcatggacccgatctctgatccggagttctttggcagctgcaaaaagcctgaggaattcaagaaattgctttatggcctgtgtttctttcatgctttggtacaagaaagacggaaatttggacccctagggtggaatattccttatgagttcaatgagacagatctgagaatcagcgtacagcagctccacatgttcctgaaccagtatgaggaactgccgtatgaggctctgcggtacatgactggcgaatgcaattacggaggcagagtgaccgatgactgggaccggcgcacgctgcgcagcattctaaacaaattcttcaatcccgaattagttgaaaattcagactataagttcgactcaagtggcatctattttgttcctccttctggtgatcacaaaagctacatcgaatacacaaagactctgccactgaccccagcaccagaaatctttgggatgaatgccaatgcagatatcactaaggatcagtcagaaactcagctgctatttgataacattcttcttacacagtctcgttcagcaggtgctggtgcaaaatcatcagatgaagtagtgaatgaggtcgctagtgacatcttgggcaaacttccaaacaacttcgacatcgaggctgccatgaggaggtacccaacaacttatactcagagcatgaacactgtacttgtccaagagatgggacggttcaataagttactgaagaccataagagattcgtgcgtaaatattcaaaaagcaatcaaggggcttgcagtcatgtctacagatcttgaagaagtggttagcagcattttgaatgtcaaaattccagaaatgtggatgggtaaatcctacccaagccttaaaccacttggcagctatgtgaatgacttccttgcaagactaaaattcttgcagcaatggtatgaggttggtcctcctccagtcttctggctttctggcttcttcttcacacaagccttcctgaccggtgcccagcagaactacgccaggaaatacacaattcctattgatcttcttgggtttgactatgaagtgatggaagacaaagaatacaagcatcctcctgaggatggtgttttcattcacggattatttctggatggagcttcctggaatagaaagatcaagaaacttgcagaatcgcatcccaaaattctttatgatacagtgcctgtgatgtggctaaagccctgtaagagggcagatataccaaaacggccaagttatgttgctccattgtataagacaagtgagcggagaggagtattatccaccactggccattccacgaattttgtgattgccatgactcttccctctgaccaacccaaggaacactggattggacgaggtgtagcactgttatgtcaacttaattcataaccagaagacatcatttccttgttcctatttcttgttggctggctgagtagagaaagcatattattttactacttaaacctttttttttgtttgtttaaatacatttgactaaagttataattatgaatttacttatgagcaaatgcagctaaacttaatatgactcatacttaaatgtaaggaaatgttctgaaataaataaagactaaagaaaacacactggc

SEQ ID NO: 56801 - DNA, 1574 bp, Homo Sapiens
gttctcttcgcccggtccctgccgcgcacaggcctcggggtcggcgggagcacgatggcggccgctaggagactcatggcgctggccgccggcatctctccgcgcctgcagccgctgggtccccgcgctgctgggcgacagggtcgctcgcgcggcttctcttcaagctgcgcccaccccgaccacaccaaggaagccgccgaggccgagtcagggatggcccccggcgggcctggggaaggcgacggaagcttggtgaacgcttctagggacctattaaaagagttcccacagcccaaaaatcttctcaacagtgtgattggaagagccctcggcatctcacatgcaaaagacaaactagtctacgtgcacacaaatggaccgaagaaaaagaaagtcacactgcacataaaatggcccaagagcgtggaggtagaaggctatggcagcaagaagatcgatgctgagcggcaggctgcagctgcagcctgccagctgttcaagggttggggtctgctaggtccccggaatgagttgtttgacgcagccaaataccgagtgctagctgatcgctttggctcccctgccgacagctggtggcgtccggaacccaccatgccccctacttcctggcggcagctgaatccagagagtattcgaccagggggacctgggggcctatcccgctctttaggccgggaagaagaggaggacgaggaggaagagctagaagaagggaccatagatgttaccgacttcttgtccatgacccagcaggattcccacgctccactcagggactcaagggggagttcctttgagatgacagatgacgacagtgccattagggctctgacccagtttccacttcccaagaaccttctggccaaggtgattcagattgcaacgtcatcctccacagctaagaacctcatgcagttccatactgtgggcaccaagaccaagctgtctacactcaccctgctctggccctgccccatgacctttgttgccaaagggcgccgcaaagcagaggctgagaataaggcggcagccttggcctgcaagaaactgaagagcctgggcctggtggacaggaacaacgaaccgcttacacacggttacggagccgatggctgacgtatttcatggcagtcaagtccaatggcagcgtcttcgtccgggactcctctcaggtgcacccgctagctgtgctgctgctgaccgacggggacgtgcacatccgtgatgacgggcgccgggccaccatctcactgagcgacagtgacctgctgcggctggagggtgactcgcgtaccgtgcggctgctgaaggagctgcggcgggccctgggccgcatggtggagcggagcctgcgcagcgagctggctgcacttccccccagcgtacaggaggagcacgggcagctgcttgcgctactggcagagctgctgcgaggaccctgtggcagctttgatgtgcgcaagacagctgacgactgagccctgcttctgctggggctgtgtacagagtgcaaatgtttatttaaaataaagttctatttatcccttgtg

SEQ ID NO: 56802 - DNA, 5277 bp, Homo Sapiens; identical to SEQ ID NO: 27988

SEQ ID NO: 56803 - DNA, 8089 bp, Homo Sapiens
tttttttttttttaatccccgcaccaagcgcttaacctcattggggtggaggagaaggcggcggctctctggtccgcagcggcaacagtaacgaaaaacagggctaatggactgctgaattatgaagtatttcagacccagtagtagaacatcactctgccactcactcctttatctcctactagttatttaaattggacttttaatatcctaccagctgctcttcagacacacatggtgcattgttgccattccccagattgcatctttgaaacacaggctcttagtaaccttcagcgaacaaagaggcaacctcccagatacgtctgctgggagggagtcatcgtgactgccctctagcttttgctggatctggatttgaattccactatggagcctcgcatggagtcctgcctggcgcaggtgttgcagaaggatgtggggaaacgattgcaggttggccaagaactgatagactatttctcagacaaacagaagtctgctgaccttgagcatgaccagaccatgttagataaacttgtggatggacttgctacctcttgggtgaactctagcaattacaaggtggttctgctgggcatggacatcctgtccgccctggtgacccggctgcaggatcggttcaaggcgcagatcggcacagtgctgccaagtctaatagacagactaggagatgctaaagactctgtgagggagcaggaccaaactctgctgctaaagatcatggatcaagctgctaatccccagtacgtatgggacagaatgcttggaggcttcaaacacaagaatttccgtactcgagaaggcatctgtctctgccttatagcaacactcaatgcctctggagcacagactttaacactaagcaagattgtgccacatatatgcaacttacttggagatccaaacagccaggttcgagatgcagcaataaacagcttagtggaaatttacagacatgtaggagaacgtgtgagggcagatctcagtaaaaaaggattgccacagtcccggttgaatgtaatttttacaaaatttgatgaagtccagaaatctggaaacatgatacaatctgcaaatgataaaaatttcgacgatgaagattctgtggatggtaacagaccttcctctgctagttctacatcatccaaggctccaccaagttctcggagaaacgttggaatgggaaccacccgccggcttggttcatccacccttggatccaagtcttcagctgcaaaagaaggagctggtgctgttgatgaagaggattttattaaagcatttgatgatgtacctgtagtacagatttattccagccgagaccttgaggaatccataaacaaaattagggaaatattatctgatgacaagcatgattgggagcagagagtaaatgctctaaaaaagattagatctttacttttggctggtgctgctgagtatgataacttctttcaacatttgcgtcttttggatggagcctttaaactctctgctaaggacctgcggtctcaggtagtgcgggaggcttgtatcacgttggggcatctgtcatcagttctggggaataagtttgaccatggagctgaagccattatgccaactatctttaatttaattccaaacagtgccaaaattatggccacatctggtgttgtagctgttaggttaattattcggcacacacacatccctaggttaatacctgtcataacaagcaactgtacctctaagtctgtcgcagttagaaggcgctgttttgaatttttagatttgcttttacaagaatggcagacacattcactagaacgacacatatcagtattagctgaaacaataaagaagggaatacatgatgctgattccgaagcaagaatagaagccagaaaatgttactggggtttccacagtcacttcagcagagaagcagagcacttgtaccacaccttggagtcctcctaccagaaagccctgcagtcccacctgaagaactcagacagcatagtgtctctgcctcagtcagaccgctcatcttccagctctcaagagagtctaaatcgtccgctgtctgccaaaagaagtcctactggaagtaccacatctagagcttctacagttagtaccaaatctgtgtcaacgactgggtccctccagcgatctcgaagtgatattgatgtgaacgcagcagccagtgccaaatccaaagtctcctcatcttcgggcacgacgcctttcagctctgcagcagctttgcctccagggtcatacgcatccttaggtcggatccgcacaagacggcaaagctctgggagtgccaccaacgtcgcctctacacctgataaccggggccgcagtcgcgctaaagtggtttcacagtcccagcgatccagatctgctaatcctgctggtgctggcagccggtcaagttccccaggaaaattgttgggaagtggttatggtggacttactgggggctcctcacgaggcccacctgtgacaccgtcttcagaaaagcgaagcaagattcccaggagccagggatgtagccgggaaacaagtccaaaccgaataggattagcacggagcagccgtatccctcgacccagcatgagtcaggggtgcagccgcgataccagccgtgagagcagccgagatacaagccctgctcggggctttcctccacttgatcggtttgggcttggccagccaggaagaatacctggttctgtgaatgccatgagagttctgagcacaagtacagatcttgaagctgctgttgctgatgctttgaagaagcctgtgaggaggagatatgagccgtatgggatgtattctgacgatgatgccaacagtgatgcctcaagtgtttgctctgagcgctcatatggctccaggaatggtggcattccccattatctgcggcagactgaggatgtagcagaagttctcaaccactgtgctagttcaaactggtcagaaaggaaagaagggcttctgggcctgcagaacttactgaagagccaaagaacactgagtcgagttgaactgaaaaggttgtgtgagatcttcactcggatgtttgctgaccctcatagcaagagagttttcagtatgtttttggagactcttgtggattttataataattcataaggatgatttacaagactggctttttgttcttctcacacaattacttaagaaaatgggagcagatttacttggatctgtgcaagcaaaagttcaaaaggctctagatgtcacaagggactcctttccatttgatcaacaatttaacattttgatgagatttattgtggatcaaactcaaactccaaacctcaaggtcaaagttgcaatcctgaaatacattgagtctctggccagacagatggatccaacagattttgtaaactctagtgagacaaggcttgctgtttctagaatcataacctggacaacagaaccaaagagttcagacgtgagaaaggcagcacagattgtgctaatctctctgtttgaattgaatactcctgaatttaccatgttacttggtgccttgccaaaaacattccaggatggtgccaccaaactcctgcacaaccacctcaagaattccagtaacaccagtgtgggctctccaagcaatacgattggccggacgccctcccgacacaccagcagcaggaccagccccctgacctcacccaccaactgttcccatgggggtctgtctccaagtcggttatggggttggagtgccgacgggttagcgaagcacccacctcccttttctcagcctaactccatccccaccgctccctcccacaaggctctcaggcgctcttactctcccagcatgctggactatgatacagagaacctgaactctgaagaaatctatagttctctacgtggagttacagaagccattgaaaagtttagttttcgaagccaagaagatctgaatgagccaattaaacgagatggcaaaaaggagtgtgatattgtgtcccgcgatgggggcgctgcctcccctgccactgagggccgggggggtagtgaagtagaaggaggccggacagctctggataacaagacctcactactcaacacccagcctccgcgcgccttcccggggccgcgggcgcgagactacaacccgtacccctactcagatgccatcaacacctacgacaagaccgccctgaaagaggctgtgttcgatgacgacatggagcagcttcgagacgtgcccatcgaccattctgacctggtggctgaccttctgaaagagctgtccaaccacaatgagcgagtggaggaacggaagggagccctgctggagctgctcaagatcacgcgggaagacagccttggtgtctgggaggagcacttcaagaccattctgctcctgctgctggagacccttggagacaaagaccattcaattcgagcactggcgttaagagttttgagggaaattctgagaaatcaaccagcaagatttaaaaactacgccgagctgacgattatgaagactctggaagcccacaaagactcccataaggaggtggtgagagcggctgaggaggctgcgtccacactggccagttccatccacccggagcagtgcatcaaggtgctctgccccatcatccagacggccgactaccccatcaaccttgctgccatcaagatgcagaccaaagtcgtcgagaggatcgcaaaggagtcattgctgcagctccttgtcgacatcatcccaggcttgctgcagggttatgacaacaccgaaagtagtgtgcgtaaggccagcgtgttttgcttagtggcaatttattccgtaatcggagaagacctgaaacctcaccttgcacagctcacagggagcaagatgaagctactaaacttatacataaagagggcccagaccaccaacagcaacagcagctcctcctccgatgtctccacgcacagctaatggcagtacctgtctcttgtgtagacctagaagcaatcggtggtgcctctcagagacctttccccacccccttcatcggctgcccagtcagtacaaggaggcccacaaatatttattacaatcagtattttggtcccttccagcttttctgtagaatcttactggtattgaatgtaaaggaagcaaggcctgtattgcagtcttcatacaaaacaaaaggaataagaacagaaaagagccatactgaaacatgtcttgtacagcctgctgagatggcgaaaccctgtgtgtggggtgcagtttttaaaaatcagagcgctctagccactacttggtagaaagtagcattttttttttcagttaataacatatttgggggtggggtggggtgttactttgtgttcttcctccttagcctattttcttgtgcgtatggtctgtgtggggcccctttcacagctgacaccacgaaaggtgatatatctttaagttgtgttctgagacctactaaaaatgggaatcaagtcttggcaagaacagtctgaagatggccttttaacaaacgctgggaattttgcttgtcatatccagactggaggccgactgccctggctttcagcgtagaattgggagtgcaccctgacagtctccttccagctctccctaatcgactccaccgacaaggtccctaccccagagcttccatgcaaaggaattcttcaagtttaaatctggacacaaaaataagataaatgtatggcatcatttagggatgcctgagatggcagttcatgaagcacagaagataaagaagaagtctttcatctttactgctgagatccttgggaacactgttgtcatgggggctctgccaagaccctcatctctgggctacacggtgattcagattgagcaccaacttgtttcctcccctcaaagttctgcctaagccgttcagttctaacatggtctcagttaatctggtaaatggcatctttaccatcttagttctgacttctcagtttaatgtgggattaagagccaagaaaagcctagagagactggatatcacaattttttttaattttataaactgaagtagttccttgaatgtctgttgatgaaatagtcactgtttaaggaaaaaagtaattatgaggtgtagcagattgcagaaaaacaggattagaaacacacttaaaaagaacacacatttagagtctctcttcctcctcagcgaaccactaggcccccttttttaaaaacacctttagagcctaattactccaataaaagtaactagaggtttggagtctggttaaataaattctgagtaaaattcttaagccaaatggaaattcttaatgcaatcatgaggacttctattgtctcttactgttgtattagatcctataaattgaactgatttttccataaggaaaatgcttcttttgagattaattctaataacgtatttgctattgcagtgcagagcccactgcaactgctaggactgaaagcagaggctgggtgccagagcacgtgattcttaacatcatttccacagacccctctgccctgaccctctgcattggatgcaggaagctgggaaagactgatgttgatttggaaacatgggctgaaaatgaaggccccatagtgcataggaacagtaaagccagggtgctgacgtgtgtgtgtgtgtgtgtgtgtgtgtgtgtgtgtgtgtggtgttgtgtgtgtttgtgcgtgcaccctacacatgtgtggtacctcactgctgctgtttagggaacttgagggacgcgtttcaaggggttgggtattactgacgagctttggctcaaaatatagcaggaccaggtcttttgttgataagtactgtttgtttattaatatgtcattaatggtatttcttttttacactctacaagtgaattagggagtctcttgttgacccctttgttgcaggaatgtgcgtcgggctaggttatccatgagtttctttattcctaatgcagttagaaagacctttctccttgagctctttgactcccagaaggtaccccagtccccagtgtacttagaaaggatctcgaacattgctggacgtcctcatagtactcacaaagggctagccttgaatgtcactcgcccagtcttcagtctcctgacttagagatacaatcacgtcacaggtctcttggcctcaatctgaaaactgctgccgccgcgccgaggagactcgcatgccgccaccacctcactgggagggcgccgagcccaccgtcgccccctagaccctgacagctgcagctgccttgccttgccgccgcctccctgcagggcccctgttccaatgaaaaacagaacacaaaagagcagagcacctaagcctgtctctgcctccctgtctaccggactggccagggcccaagacccccgctgctccactgcggggctgggcgggctgactccctgcttcctccaagctgctgcctcccctgcagccagggtctgggcagggtgcagccggtcctcggggcacgcagcttccttcaagtacactgtgtgtgcttcccggacctgcggcgatgccacgggcctgccttttctatgcgcctcactagcttaccaccctgtgcaggtaatgcaactgactttgtctcatcagtctttttctttccctgccaccctttatttatcaagcgtaatgttacactttaaaggacagcaaataagaactttgtagaatcccaccaggactttgctaacaataatgtttggaaataaagaagtgctctgaaaaaatatcagccaccaaaatagttatgttggcactgtgttcacacgcatggtccccacacccccaggttgggtgggtttttttgttttttgggtttttttggggggggggctttttcatgttacatccatatctgtatttatatcttatttgtttcactttcaagtgtatcatggcaaatgtacagatttttttgttaataatgtgctaggatttgctaaaaaagaaaaaaaaaaaacccttttgagtttgccctagaataaatgagacttaatt

SEQ ID NO: 56804 - DNA, 3850 bp, Homo Sapiens
ctcccgggccgccgcgatcatgtcggaccaggcgcccaaagttcctgaggagatgttcagggaggtcaagtattacgcggtgggcgacatcgacccgcaggttattcagcttctcaaggctggaaaagcgaaggaagtttcctacaatgcactagcctcacacataatctcagaggatggggacaatccagaggtgggagaagctcgggaagtctttgacttacctgttgtaaagccttcttgggtgattctgtccgttcagtgtggaactcttctgccagtaaatggtttttctccagaatcatgtcagattttttttggaatcactgcctgcctttctcagggtgttgatacaagctggagctctttgttggagtcttccagagctctcccagggagaggtagggaagggagcttgtccagcagaagttgggaagcacagagatcatctgccttcttctgacccggtattgatgcaggctgaggcctctgttgtaatgtgctgggtgtcatctgaagacagaagtgccctgtgggctttggttacgttctatgggggagattgccagctaaccctcaataagaaatgcacgcatttgattgttccagagccaaagggggagaaatacgaatgtgctttaaagcgagcaagtattaaaattgtgactcctgactgggttctggattgcgtatcagagaaaaccaaaaaggacgaagcattttatcatcctcgtctgattatttatgaagaggaagaagaggaagaggaagaggaggaggaagtagaaaatgaggaacaagattctcagaatgagggtagtacagatgagaagtcaagccctgccagctctcaagaagggtctccttcaggtgaccagcagttttcacctaaatccaacactgaaaaatctaaaggggaattaatgtttgatgattcttcagattcatcaccggaaaaacaggagagaaatttaaactggaccccggccgaagtcccacagttagctgcagcaaaacgcaggctgcctcagggaaaggagcctgggttgattaacttgtgtgccaatgtcccacccgtcccaggtaacattttgccccctgaggtccggggtaatttaatggctgctggacaaaacctccaaagttctgaaagatcagaaatgatagctacctggagtccagctgtacggacactgaggaatattactaataatgctgacattcagcagatgaaccggccatcaaatgtagcacatatcttacagactctttcagcacctacgaaaaatttagaacagcaggtgaatcacagccagcagggacatacaaatgccaatgcagtgctgtttagccaagtgaaagtgactccagagacacacatgctacagcagcagcagcaggcccagcagcagcagcagcagcacccggttttacaccttcagccccagcagataatgcagctccagcagcagcagcagcagcagatctctcagcaaccttacccccagcagccgccgcatccattttcacagcaacagcagcagcagcagcaagcccatccgcatcagttttcacagcaacagctacagtttccacagcaacagttgcatcctccacagcagctgcatcgccctcagcagcagctccagccctttcagcagcagcatgccctgcagcagcagttccatcagctgcagcagcaccagctccagcagcagcagcttgcccagctccagcagcagcacagcctgctccagcagcagcagcaacagcagattcagcagcagcagctccagcgcatgcaccagcagcagcagcagcagcagatgcaaagtcagacagcgccacacttgagtcagacgtcacaggcgctgcagcatcaggttccacctcagcagcccccgcagcagcagcagcaacagcagccaccaccatcgcctcagcagcatcagctttttggacatgatccagcagtggagattccagaagaaggcttcttattgggatgtgtgtttgcaattgcggattatccagagcagatgtctgataagcaactgctggccacctggaaaaggataatccaggcacatggcggcactgttgaccccaccttcacgagtcgatgcacgcaccttctctgtgagagtcaagtcagcagcgcgtatgcacaggcaataagagaaagaaagagatgtgttactgcacactggttaaacacagtcttaaagaagaagaaaatggtaccgccgcaccgagcccttcacttcccagtggccttcccaccaggaggaaagccatgttcacagcatattatttctgtgactggatttgttgatagtgacagagatgacctaaaattaatggcttatttggcaggtgccaaatatacgggttatctatgccgcagcaacacagtcctcatctgtaaagaaccaactggtttaaagtatgaaaaagccaaagagtggaggataccctgtgtcaacgcccagtggcttggcgacattcttctgggaaactttgaggcactgaggcagattcagtatagtcgctacacggcattcagtctgcaggatccatttgcccctacccagcatttagttttaaatcttttagatgcttggagagttcccttaaaagtgtctgcagagttgttgatgagtataagactacctcccaaactgaaacagaatgaagtagctaatgtccagccttcttccaaaagagccagaattgaagacgtaccacctcccactaaaaagctaactccagaattgaccccttttgtgcttttcactggattcgagcctgtccaggttcaacagtatattaagaagctctacattcttggtggagaggttgcggagtctgcacagaagtgcacacacctcattgccagcaaagtgactcgcaccgtgaagttcctgacggcgatttctgtcgtgaagcacatagtgacgccagagtggctggaagaatgcttcaggtgtcagaagttcattgatgagcagaactacattctccgagatgctgaggcagaagtacttttctctttcagcttggaagaatccttaaaacgggcacacgtttctccactctttaaggcaaaatatttttacatcacacctggaatctgcccaagtctttccactatgaaggcaatcgtagagtgtgcaggaggaaaggtgttatccaagcagccatctttccggaagctcatggagcacaagcagaactcgagtttgtcggaaataattttaatatcctgtgaaaatgaccttcatttatgccgagaatattttgccagaggcatagatgttcacaatgcagagttcgttctgactggagtgctcactcaaacgctggactatgaatcatataagtttaactgatggcgtctaggctgccgtgcatgtcgactcctgcggtgcggggctggctgtctggctggcgaggagctgctgcgcttccttcacatgctcttgttttccagctgctttcctgggggatcagactgtgaagcaggaagacagatataataaatatactgcatctttttaagatgtgcaattttattctgaggaaacataaattatgttttgtattatatgactttaagagcccacattaggttttatgattcatttgccaggtttttaaatgttttcacaaaactgttacgggacttcaactagaaataaaatggtgtaaataaagaccttgctatctctaaattatggatgttaaagatttgaaatgttttgtactttgattatttttatttcttatactctgttttcttttatattgatatcttgcccacattttaaataaatgtacttttgaactt

SEQ ID NO: 56805 - DNA, 2965 bp, Homo Sapiens; identical to SEQ ID NO: 30892

SEQ ID NO: 56806 - DNA, 3521 bp, Homo Sapiens; identical to SEQ ID NO: 26366

SEQ ID NO: 56807 - DNA, 2148 bp, Homo Sapiens
ggtgaagccggtggccggtggccgggcgggaccaacaaagatggcggcggcccctgcggcgggagcgatctgggcaacggctgcggctaaagctgcagccgggcccacgggggggctgcacgggggtagtagggggtggccctgaactggggcctggccctggctggcctctcccgccgcctcactgggggacaggtccagcctgtggtgtccacaatgccccaggcctctgagcaccgcctgggccgtacccgagagccacctgttaatatccagccccgagtgggatccaagctaccatttgcccccagggcccgcagcaaggagcgcagaaacccagcctctgggccaaaccccatgttacgacctctgcctccccggccaggtctgcctgatgaacggctcaagaaactggagctgggacggggacggacctcaggccctcgtcccagaggcccccttcgagcagatcatggggttcccctgcctggctcaccacccccaacagtggctttgcctctcccatctcggaccaacttagcccgttccaagtctgtgagcagtggggacttgcgtccaatggggattgccttgggagggcaccgtggcaccggagagcttggggctgcactgagccgcttggccctccggcctgagccacccactttgagacgtagcacttctctccgccgcctagggggctttcctggaccccctaccctgttcagcatacggacagagccccctgcttcccatggctccttccacatgatatccgcccggtcctctgagcctttctactctgatgacaagatggctcatcacacactccttctgggctctggtcatgttggccttcgaaacctgggaaacacgtgcttcctgaatgctgtgctgcagtgtctgagcagcactcgacctcttcgggacttctgtctgagaagggacttccggcaagaggtgcctggaggaggccgagcccaagagctcactgaagcctttgcagatgtgattggtgccctctggcaccctgactcctgcgaagctgtgaatcctactcgattccgagctgtcttccagaaatatgttccctccttctctggatacagccagcaggatgcccaagagttcctgaagctcctcatggagcggctacaccttgaaatcaaccgccgaggccgccgggctccaccgatacttgccaatggtccagttccctctccaccccgccgaggaggggctctgctagaagaacctgagttaagtgatgatgaccgagccaacctaatgtggaaacgttacctggagcgagaggacagcaagattgtggacctgtttgtgggccagttgaaaagttgtctcaagtgccaggcctgtgggtatcgctccacgaccttcgaggttttttgtgacctgtccctgcccatccccaagaaaggatttgctgggggcaaggtgtctctgcgggattgtttcaaccttttcactaaggaagaagagctagagtcggagaatgccccagtgtgtgaccgatgtcggcagaaaactcgaagtaccaaaaagttgacagtacaaagattccctcgaatcctcggcttagatctgaatcgattttctgcctcccgaggctccatcaaaaaaagttcagtaggtgtagactttccactgcagcgactgagcctaggggactttgccagtgacaaagccggcagcgtccactatggccactacacagccctgtgccggtgccagactggttggcatgtctacaatgactctcgtgtctcccctgtcagtgaaaaccaggtggcatccagcgagggctacgtgctgttctaccaactgatgcaggagccaccccggtgcctgtgacacctctaagctctggcacctgtgaagccctttaaacacccttaagccccaggctccccgtttacctcagagacgtctatttttgtgtctttttaatcggggaggggggagggggtggttgtagctccattattttttttattaaaaaatacccttccacctggaggctcccttgtctcccagccccatgtacaaagctcaccaagcccctgcccatgtacagcccccagaccctctgcaatatcactttttgtgaataaatttattaagaaaaaa

SEQ ID NO: 56808 - DNA, 6255 bp, Homo Sapiens; identical to SEQ ID NO: 30121

SEQ ID NO: 56809 - DNA, 762 bp, Homo Sapiens
atgcccctgctgcccagcaccgtgggcctggcaggcctgctcttctgggctggccaggcagtgaacgccttgataatgcctaatgctaccccagccccggcccagcccgagagcacggctatgcggctcctgagtggcctggaggtgcccaggtaccgccggaagcgccacatctctgtgagagacatgaatgccttactggattatcacaaccacatccgggccagtgtgtacccacctgccgccaacatggaatacatggtctgggacaagcggctggccagggctgccgaagcctgggccacccagtgcatctgggcacatgggccttcacagctgatgagatacgtgggccagaacctctccatccattctggccagtaccggtccgtagtggatctcatgaagtcctggtctgaggagaagtggcattacttgtttccggccccaagggactgtaacccacactgcccctggcgctgcgatggccccacctgctcccattatacccagatggtgtgggcatcctccaatcggctgggctgtgccatccacacctgtagtagcatcagtgtctggggcaacacctggcatcgggcggcatacctggtctgcaactatgccattaagggcaactggattggcgagtccccgtacaagatgggaaagccgtgctcctcctgtccccccagttatcaaggcagctgcaatagcaacatgtgcttcaaggggctgaaatccaacaagttcacgtggttctga

SEQ ID NO: 56810 - DNA, 6794 bp, Homo Sapiens; identical to SEQ ID NO: 30092

SEQ ID NO: 56811 - DNA, 5458 bp, Homo Sapiens
ggcggcgcggctggtccccaggggtctgcgggcgactgcgcggctgaggcgcccgagtgcggtactggcggcgggcggcgggcagccatggcggaggccgcgtcgccgcacttgtcgctgccctcggggctgctggagctctgcgcgctgctgggcgccccccgggacagtctccgaagtctcgagcagaggtcctgtccattttcgtgcctccttttatcagtaaagaggacagtcaaacggccggtgccaactgcggcactctcggtaaaacccggatgcgctccttgagaaagaagagagagaagcccagaccagagcagtggaagggcctcccggggccccccagagcgccagagcctgaggatgtcgccgtcccgggcggcgtggacctcctcaccctgccgcagctgtgcttcccagggggtgtgtgcgtggccactgaacctaaggaggattgcgtccacttcctggtgctgaccgatgtctgcgggaataggacctatggcgtggtggcccagtactaccggcccctgcatgatgagtactgtttctacaatggcaaaacgcaccgggagtgtcctggctgcttcgtgcccttcgcggtgtgcgtggtctccaggtttccctattacaactccctcaaggactgcctttcctgtttattggctcttctgaagccctgtaaagattttgaagtggacagtcatataaaagatttcgctgcgaagctgtctttaatacccagcccgccacctggaccgctccatttggtatttaacatgaagtcgctccagattgtgttacctgcccgagcagaccccgaaagccccatcctggacctggaccttcacctgcccttgctgtgcttcaggcctgagaaggtgctacagatcctgacatgcatcctgacggaacagcggatcgtcttcttctcctcggactgggctctgctgacgctggtcactgagtgcttcatggcctacctgtatccgctgcagtggcagcaccccttcgtgcccatcctgtcggaccagatgctggatttcgtcatggcccccacgtccttcctgatgggctgccatctcgaccacttcgaagaagtcagcaaggaagccgacggtttagttctgataaatattgatcatgggagcatcacctactccaagtccacggacgataacgtggacattcctgatgtccccctcctggcagcccagacgtttattcagagggtgcagagcctccagctccaccatgagctgcacgccgcccacctcctctccagcacagacctgaaggagggccgagcccaccggcggtcctggcagcagaaactcaactgccagatacagcagaccaccctgcagctgctcgtgagcatcttcagggatgtaaagaatcatttaaactatgaacacagagtctttaatagtgaagaatttctcaaaaccagggctccaggggaccatcagttttataagcaggtcttagacacctacatgttccattcttttcttaaagcccggctcaataggaggatggacgcctttgctcagatggacctcgacacccagtcggaggaggacagaataaatggaatgcttctaagtccaaggagaccgaccgttgagaaaagagcctcccggaagtcctcgcacctgcatgtcacccacaggcgcatggtggtcagcatgcccaacctgcaggacattgccatgcctgagctggcacccaggaactcctcgctccggctgacggacaccgcaggctgtaggggcagcagcgcagttctgaatgtcacgccgaagtccccgtatacattcaagattcccgaaatccactttccgctggagagcaagtgcgtgcaggcataccatgcccactttgtctccatgctgagcgaggccatgtgctttctggcccccgataactctctgctcctggcccgctatttgtacctccgagggctcgtttatctgatgcagggacagctgctgaacgccctcttggacttccagaatctgtataaaacagacatacggatctttcccactgatttggtgaagaggacggtggaatccatgtctgcccctgagtgggagggggctgagcaggcgccggagctgatgaggctcatcagcgagatcctggacaagccgcacgaggcctcgaagctggacgaccacgtgaagaagttcaagctgcccaagaagcacatgcagctgggcgacttcatgaagcgggtccaggagtcagggatcgtgaaggacgccagcatcatacaccggctgttcgaggccttgactgtaggacaggagaaacaaatcgacccagaaacattcaaagatttctacaactgctggaaggagacggaagcagaagcccaggaggtcagtctgccgtggctggtgatggaacacctggataaaaacgagtgtgtgtgtaagttgtccagctccgtcaagacaaacctaggcgttggcaagatcgccatgacccagaagcgcctgttcctcctaaccgaaggaaggccaggctacttggagatttccaccttcagaaatatagaggaggtcaggagaaccactactacatttctacttcggagaatacccactttaaaaatcagagtggcgtccaagaaagaagtcttcgaagccaacctgaaaaccgagtgtgacctttggcacctgatggtgaaggagatgtgggctgggaagaagctggccgatgaccacaaggaccctcactacgtccagcaggcgctgaccaacgtcttgctgatggacgccgtcgtgggcacactgcagtcaccaggcgccatctacgctgcctccaagttatcctactttgataagatgagtaacgaaatgcccatgacgcttccggagacaaccctggaaacactgaagcataaaatcaacccctcggcgggggaggcgttcccacaagcggtggacgtgctgctctacactccagggcatcttgacccagccgaaaaagttgaagatgctcaccccaagttatggtgtgctctgagcgaaggcaaggtgaccgtgttcaatgcttcttcatggaccatccaccagcactcctttaaagtgggcactgcaaaagtgaactgcatggtgatggccgaccagaaccaggtgtgggttggctcggaagactccgtcatctacatcatcaacgtccacagcatgtcctgcaacaagcagctcacagcccactgctccagtgtcacggatttgattgtgcaggacggacaggaggcacccagcaacgtgtactcgtgcagcatggacggcatggtgctggtgtggaatgtgagcacactgcaggtgaccagccgcttccagctgccgcgaggtggcctgacgtccatcagactgcacggcggccgcctgtggtgctgcacaggtaacagcatcatggtcatgaaaatgaatggatccctccatcaagaattgaagattgaggagaacttcaaagacaccagtacctccttcctggccttccagctccttcctgaggaggagcagctgtgggcggcctgtgcaggacgcagcgaggtttacatctggagcctgaaggacctggcccagcccccgcagagggtgcccctcgaggactgctctgagatcaactgcatgatccgggtgaagaagcaggtctgggtgggcagccgagggctggggcagggaacacccaaggggaaaatctacgtgattgacgccgagaggaagaccgtggagaaggagctggtggcgcacatggacaccgtgaggacgctgtgctcggctgaggacagatacgtgctgagtgggtcgggcagggaggaggggaaagtcgccatttggaaaggcgaataaacgtggctgagtctgccaagtggaactgtgccctatgtgtggggactggctgccccctagagcctgccaggagcagaagcctggaggggtggcagggcagagcagcccaggctcagcatggagcccacttaccgtgtggccagccgcgagacccatggccacgcaccttctctcaggccttcgggccccctggttaaactgcaccaagggtgtttcctgttggggtgtgtctcaggcaggcagctgcgtcttgttggtgataacctctgctgggaggttactttgttgcctagaaagttctggaatccacaaccaggggctggcactggagccagcagcttggccgagtcacaggtgacccgtggccctcacgtctctggttttacctttccttacttcattcattcactcacccagtccttacgaatcaccgaggaacactgggctgagcacatgacagggagcctggagccccggggcctccagcgaggcctgagaagggtggttcgggtaaccactgtgggctctctcccatcacagaaggtggacagggcctacccaggtggaggggaccaccctgcgatcaggtgtttgcgacaggggttgggccagctgaggcaagctgtcttttttcccttttctttttaatagatgcaacatttttataataatcctagagaccttttttctaccaaagatcacagaccagaaaaagttccatctaaaatatcatgcccaggaaagcacatgggatcaaaagtaaaatagcatcatgtgtgatctcgtcttccagcgtgccgctcagttccccgaatccgtgtgcacacgtgtgatctcgtcttcagtgtgccgctcagttccctgaatccgtgtgcacactgcgtatgtgtacgcgcagcatgctatactgaactcaacaagatcttggctgtacataaatatttgtaaaagagaccctttgcacctttttactgtaatgttgagacttcattacttaaatgttctacggaaggttctggtgtggttgttggagccggagggagcgtgtcagcacgtgctgagggcatggggcctgccccctgggcacccatccacaagctgggccacggagctccagcttctcaggacaaagccccggggctggcgcatcctgagggtctctgggggtgtttgccaggctcctgggatgggccgctttcagaagccctgcagtgcctccagatggaaaggcgggcccggcctccggttgggtctgcattttggagagtccacaccacggaccaggttttcccccaaggcttggctttgtgtagctactaacttcttggggcattctgagagtgtgggcagagagaattatgtggcctcatcctcccccaaggctgtgcttgcagcccgggcaccttcccactttctagctctggagaggttggattttgcttttgtaaacacatgaatccttatgataaaagtctgtcagtcaaaaatacatttataaattatttaatgccagtcctcatgtaacctcaggtatcttcagcttgtggagaataaatctggtttaataaaaaaaaaaaaaaaaa

SEQ ID NO: 56812 - DNA, 5224 bp, Homo Sapiens
atcccggctgacgttggacgacaaagatggcggcagggaccagcagttactgggaagatctcaggaaacaggctcgacagctggaaaatgaacttgacctgaaactagtttccttcagcaaactatgtacaagttacagtcatagcagtacccgagatggaagacgcgacagttctgatacaacaccccttttaaatggatcaagccaagacagaatgtttgagacaatggcgattgagattgaacaacttttggcaaggcttacaggggtaaatgataaaatggcagaatataccaacagtgcaggtgtcccctccttgaatgcagccctgatgcatacattacagcggcatagagacatattgcaggattatacacatgaattccataaaaccaaagcaaactttatggcaatacgggaaagggagaatcttatgggatcagtacgaaaagatattgagtcatataaaagtgggtctggagtaaacaacagaagaactgagctatttttgaaagaacatgaccaccttcgaaactcagatcgtctgatagaagagacaataagcattgctatggcaacaaaagaaaatatgacttcacagagaggaatgttgaagtcaattcacagcaaaatgaacactttggccaatcgttttcctgctgtaaacagcctgatccagaggatcaacctgaggaagcggcgggactcgctcatcctagggggtgttattgggatctgtaccatcctgttgctgctgtatgcgttccattgatgggacatcttcagggactcttgacagccaccgctttcacaccctggtctggaataaggaaacatcggagggagaagttgactgtcttgataattagcctgaccagcaggatgaatgcaagactgacagtgatggactctgtgacatggtcaggttgagctgaagccacagtttctctgtgctgtgttttctaacacatttttctgtttttaattaaaaaaaaaaaaaaaaggttttcagttgcttttgtctccctaggaggcaggtaaaccaatcaaaaacagagttttctgtgtttccatgatagtgttgaagcctaatgacaagccaggtcttacagctgggctcttcagaaaaccaggtttctacatccaaagactgcttttcttttagctgccagattggattgtgaataaaaataattcttccctctccctctccctctccccacggtctccctctttccacggtctccctctgatgccgagccgaagctggactgtactgctgccatctcggctcactgcaacctccctgcctgattctcctgcctcagcctgccgagtgcctgcaattgcaggcgagcgccgccacgcctgactgcctcggcctcccgaggtgccgggattgcagacggagtctcgttcactcagtgctcaatggtgcccaggctggagtgcagtggcgtgatctcggctcactacaacctccacctcccagccacctgccttggcctcccaaagtgccgagattgcagcctctgcccggccgccaccccgtctggaaagtgaggagcgcctctgcccggccgccatcccatctaggaagtgaggagcgcctcttcccagccgccatcccatctaggaagtgaggagcgtctctgcccggccgcccatcgtctgagatgtggggagcgcctctgccccgccgccccgtctgggatgtgaggagctcctctgcccggccgcgaccccgtctgggaggtgaggagcgtctctgtctggccaccccgtctgagaagtgaggagacctccgcccggcagccgccctgtctgagaagtgaggagcccctccgcccggcagccaccccatctgggaagtgaggagcgtctacgcccgggcagctgccccgtccgggagggaggtgggggggtcagccccccgcccggccagccgccccgtccgggagggaggtgggggggatcagccccccgcccggccagccgccccgtccgggagggaggtggggggcgcctctgcccggccgcccctgcccggccgcccctactgggaagtgaggagcccctctgcctggccaccaccccatctgggaggtgtgcccagcagctcattgagaacgggccatgatgacaatggcggttttgtggaatagaaaaggcggaaaggtggggaaaagattgagaaattggatggttgccgtgtctgtgtagaaagaagtagacatgggagacttttcattttgttctgtactaagaaaaattcttctgccttgggatcctgttgatctatgaccttacccccaacctggtgctctctgaaacatgtgctgtgtccactcagggttaaatggattaagggtggtgcaagatgtgctttgttaaacagatgcttgaaggcagcatgctccttaagagtcatcaccactccctaatctcaagtacccagggacacaaacactgcggaaggcggcagggtcctctgcctaggaaaaccagagacctttgttcacttgttgatctgctgaccttccctccactattgtcctatgaccctgccaaatccccctctgcgagaaacacccaagaatgatcaattaaaaaaaaaataatataataataattcttgtcctcttattttacactcataatgagaaatcacaagttctttcttgatgatctgtgctatagatttctactctgtctcctcaactctgttgatatttggggaaaattctgtttttcatagattctttgagatgctgatggaccagcttcagcatgtttgaggttgtctgaaatggagatcactgtaaaactgtctttttcttttaaattacaagtacactggggttaactgtattgctggaaaaacatcaagaatgacagtcttatatttaaggcaccagtcattgtttccattttttttttaattcttcccttggattaatattttctactgaaaagaaatgaaatctcagttccactatgataaaagaaacgaatcaccagtgtctgtcagtgcccccactgctcctcctcataccagcattgacactggtagctgaggaaggggactgctcaatttctaatgtgatctattcaagaagccacatataaaaaggcattgagggctcactgtccagagaattgcttttgtaaatgctccacaacgtatgggcaaaagtttaaggactactgcctgatgtaccaggaatcctgagttctgtgaaaatctgttcattccaaatctgttaagcatttccaaacatccagagaatggtttcactgttgagggtgcatgtggcagaatctgtctctctctgcacctgtcttctgttaccatccctggacagtgacagattttaagccagccaccagaattcttttcgagttaaccatttcttagtttctgtaaattcatgacttgtcttactgaactacagcctggtttgtagacttccaacatctacactgctgctcttcaccattggaattcactgtggtatttatagtattggcttcagtccgagccacaggcaataaaaggatatcagctgtagttctcagctacatcatggtgtatagatgctgttattcaggcgaacttgctcatgggtggactaacacctggtttggtacagagactgagaagtttttcattctggtgtcaaagttttgttacattatgggtgtgaagggcatttgatatatttttcttaactatggggtttatttttctaaatgtgggttgattgactgttaattgattcagggtacccttaaaagaaaagaagttttcccattgtgaaccttaaatgatcagagaagtaagttcattgattaaattctctgttgggagaacaaaacttttctcccttgacactttattatctttgatttttcaaagggccttgattggtggttgtgtctcggttaaaatttatgggactttgctatgtagttggcatttataaaatctgaagtatcataaataaagttatttatttaattatactaccagtcttttttactggtctgattcttttgtgcattcattaaagctgattgtgtgagagtgaactgggacacaagctagtctagctcactgcagccaagcaaaccctgttgatggctgatgggcctttccattagggttttgcttatgtgaagtaatggaattatgttggttattttctttatgaaaataaaccagttcttccaaggaagttaaaaggcttggtatggatgttggtgtcagataggtctgactaacctctccgtgctgcagcctatactaaggtgacccagggccacatgtagacagctaggccagtgctttttcctcttagggtttctttgcagaaagaaacctccagcaagggaagagaggtgtgtgtccacaggaaggggctccgtggggatcccatgaagggatttgagctctttcagctccatgtcatttaacttttttgtttaaccaccttggctttctctccttttttgctgtcctccttacggaccagttaccagattcagaggctaacagttagttacttgttaatgctagtcacagccaggaggtcagaaggaattttctacttctggatccaaatgttacctcttaggggaagttatgccccctcaactattgtcttattataatgaatctttcctttttggtccttttaagtaaccactcaaaacttttcatttcactgaaaaaatatgaaaaaccatgacaatagggctgggtgcagtggctcacgcctgtaatcttagcactttgggagaccaaggcaggcggatcgtttgaggccaggagtttgagaccagcctgggcaatgtagcaagactctgtctctgcaaaaaaaattaaaagatacctgagagctcactttaatatcaaggtatttgcatccattcccaccctgttagctcttaagggaggagggaaatcaattccaaccatactttcctgtgatggaagatgtttcctcttgaaaaaatgccaatacagatttttaaaacctattgttttccaaatgcactttgtaagtttttgcttttaaaatagcttcttggaaccaattttattgtatttgtacttaatttttgttctcatctaaatgtgcattttctgactgtatagaagaagctttggtatgtaatttaataataaattagaaatctaaatgaaaaaaaaaaaaaaaa

SEQ ID NO: 56813 - DNA, 1420 bp, Homo Sapiens; identical to SEQ ID NO: 31522

SEQ ID NO: 56814 - DNA, 898 bp, Homo Sapiens
atggcagtcttattcctcctcctgttcctatgtggaactccccaggctgcagacaacatgcaggccatctatgtggccttgggggaggcagtagagctgccatgtccctcaccacctactctacatggggacgaacacctgtcatggttctgcagccctgcagcaggctccttcaccaccctggtagcccaagtccaagtgggcaggccagccccagaccctggaaaaccaggaagggaatccaggctcagactgctggggaactattctttgtggttggagggatccaaagaggaagatgccgggcggtactggtgcgctgtgctaggtcagcaccacaactaccagaactggagggtgtacgacgtcttggtgctcaaaggatcccagttatctgcaagggctgcagatggatccccctgcaatgtcctcctgtgctctgtggtccccagcagacgcatggactctgtgacctggcaggaagggaagggtcccgtgaggggccgtgttcagtccttctggggcagtgaggctgccctgctcttggtgtgtcctggggaggggctttctgagcccaggagccgaagaccaagaatcatccgctgcctcatgactcacaacaaaggggtcagctttagcctggcagcctccatcgatgcttctcctgccctctgtgccccttccacgggctgggacatgccttggattctgatgctgctgctcacaatgggccagggagttgtcatcctggccctcagcatcgtgctctggaggcagagggtccgtggggctccaggcagagatgcctcgattcctcagttcaaacccgaaatccaggtctatgagaacatccatttggcccgtcttggcccacctgcccacaagcccaggtgatttt

SEQ ID NO: 56815 - DNA, 5821 bp, Homo Sapiens; identical to SEQ ID NO: 31080

SEQ ID NO: 56816 - DNA, 5521 bp, Homo Sapiens
gagcgcacggcggcggcagaggcggcggcggccgggcctaggagcgactctcggtcgtgcagcggcggcgagcgctcgcgagcggctgcgggacgcgaggtttccggagctgagctcaatgtgcagcaatggatgacgacagcctggatgagcttgtggcccggagcccagggccggatggacacccacaggtcggccctgcggacccggcaggtgactttgaagaaagcagcgtgggcagcagtggggactctggggacgacagtgacagcgagcatggagatggcacagacggagaagacgagggggcgtctgaggaggaagacctggaagacagatctggttccgaggattctgaagacgacggggagacattgctggaggtagcgggtactcaggggaaactggaagccgctggctctttcaattctgatgatgatgcagagagctgcccaatctgtctcaacgcattcagagaccaggccgtggggacgccggagaactgtgcccattacttctgcctggactgcattgtcgaatggtccaagaatgccaattcctgtccagttgatcgaactctatttaagtgcatttgtattcgagctcaatttggtggtaaaatcttaaaaaagatcccagtggagaacaccaaagcgagcgaggaggaggaggacccgaccttctgtgaggtgtgcggcaggagcgaccgtgaggacaggcttttgctctgcgacggctgcgatgcggggtaccacatggaatgcttggacccccctctccaggaggtgccggtggacgagtggttctgcccggaatgtgctgcgcctggtgttgtccttgccgctgatgcgggtcccgtgagtgaggaggaggtctccctgctcttggctgatgtggtgcccaccaccagcaggcttcggcctcgagcaggtaggacccgggcgatagccaggacacggcagagtgagagagtgagagcaaccgtgaaccggaaccggatctccacggccaggagggtccagcacacaccagggcgcctcgggtcttccctgctggatgaagccatcgaggctgtggcgactggcctgagcactgccgtgtatcagcgccccctgacgccgcgcactcccgcccgacggaagaggaagacaagaagacggaagaaagtgccgggaagaaagaaaaccccgtccggaccatccgcaaaaagtaagagctcagcgacaagatctaagaaacgccaacatcgagtgaagaagagaagagggaagaaggtaaagagtgaagccaccactcgctctcgaatcgcgcggacgctgggcctgcgcaggcctgttcacagcagctgcatcccgtcagtgttgaagccagtggagccctctttggggctgctgagagcggatattggagctgcctctctgtctctgtttggagatccttatgagctggatcccttcgacagcagtgaagagctttctgcaaaccctctttcccctctgagtgccaagagacgggctctgtcccggtcagccctgcagtcccaccagcccgtggccaggcccgtctccgtggggctttccaggaggcgcctccctgccgcggtgccagagccagacttggaggaggagccagtgcctgacctgctgggcagcatcctgtcgggccagagcctcctgatgctgggcagcagtgatgtcatcatccaccgcgacggctccctcagcgccaagagggcggctccagtttcttttcagcgaaactcaggcagtctgtccagaggggaagaaggattcaagggctgcctgcagccccgagcactgccctccgggagcccggcccaaggcccgtcaggaaacaggccacagagcacagggctcagctgtcaaggcaggtcccgcacccccgcccgcaccgcgggggcgcctgtgaggctggacttgccagcagcccctggggcggttcaggctcggaacttgtcaaatgggagtgtgcctggcttcagacagagccacagcccctggttcaacggcaccaacaagcacaccttgccccttgcctctgccgcgtctaagatctcaagcagagattctaagcccccatgtcgcagtgtggtgccggggcctcccctgaagccagcgcccagaagaacagacatctctgagctacccaggataccaaagatcaggagagatgacggtggtggcagacgggatgcggccccggcccacgggcagagcattgagatccccagtgcctgcatcagccgactgactggcagggagggcaccgggcagccagggcgaggcacacgggcagagagcgaggccagcagcagggtgccccgggagcccggggtgcacacgggcagctcccggcccccagcccccagctcccatggcagtttggccccactgggaccatcaagagggaaaggggtcgggtcgacctttgagagcttccggatcaatattcctggaaacatggcacattccagccagctctccagccctggcttctgtaacacgttccggcctgtggacgataaggagcagaggaaggagaacccctcacccctcttctccatcaagaagacgaagcagctgcggagcgaggtctacgacccatccgaccccaccggctccgactccagcgcccctggcagcagccccgagaggtctggccccggcctcctgccctctgagatcacacgaaccatctccatcaacagcccgaaggcccagacggtgcaggctgtgcgctgcgtcacctcctacacggtggagagcatctttggtacagagcccgaaccccctctcggaccgtcctccgccatgtccaagctccggggtgcagtggctgccgagggggcctctgacacggagcgagaggagcccacagagagccagggcctggctgcccggctgcggaggccatcccccccagagccctgggatgaggaggatggggcgtcttgcagcaccttctttggctctgaggagcggacggtgacctgtgtgactgtcgtggagccggaagccccacccagcccggacgtgctgcaggctgccacccacagagtcgtggagctcaggcccccttcccggtcccgctccacatccagctcccgcagcaggaagaaggccaagaggaagagggtgtccagggagcacggacggacgcgctctgggacgcgctctgaatccagggacaggagctcgaggtcagcgtcaccatcagtgggtgaggagcgccccaggaggcagcggtccaaggccaagagccggcggtcctccagtgaccgctccagcagccgagagcgagctaagaggaagaaagccaaggacaagagcagggagcacaggcggggcccctggggccacagccggaggacgtcccggtcgcggtcggggagccctggcagctcttcctatgagcactatgagagtaggaagaagaagaaaaggagatcagcgtccagacctcggggaagggagtgctcccccaccagcagcctggagaggctctgcaggcacaagcatcagcgggaacgcagccacgagcggccagacaggaaggagagtgtggcgtggccccgagaccggaggaagcggaggtcccggtccccaagctcggagcacagggcacgggagcacaggcggcctcggtcccgtgagaagtggccgcagacccggtcccattccccagagaggaagggggctgtgagggaggcttccccagcgccccttgcacagggggagccagggcgggaagacctccccaccaggttgccagccttgggggaagcacatgtctcgccggaggtggctacggccgacaaggcccccctgcaggctccccctgtcctggaggtggcagctgagtgtgagccggacgacctggacctggattatggcgactccgtggaggccggacacgtctttgatgatttctcaagcgacgccgttttcatccagctcgatgacatgagctcgccaccttctcccgaaagcacagactcttccccggagcgagacttcccactgaagcctgcgttgcccccagccagcctggccgtggccgccatccagagggaggtgtcattgatgcacgatgaagacccttcgcagcccccacccctgccagagggcacccaggagccacatttgctcaggccggacgcggctgagaaggctgaggcacccagttccccggatgtggcgcctgcggggaaggaagacagcccctctgcgagtgggagggtacaggaggcagcccggcctgaggaggtggtttcgcagacccccctgctgcggtccagagccctggtgaagcgggtcacctggaacctgcaggagtcggagagcagcgcccccgccgaggacagagccccccgggcaccacttcacaggccacagaagccccgagaaggagcctgggacatggaggatgtggcccccacaggggtcaggcaggcgttctccgagctgccctttcccagtcacgtgcttccggaacccgggttcccagacacagacccctctcaggtttacagccccggcctgccgcctgccccggcccagccctcaagcatcccaccctgcgcactggtcagccagcccacggtccagttcatccttcaggggagcctgccgctagtgggctgtggggcagcacagaccctggccccagtgcccgctgccctgaccccagcctcagagccagccagtcaagccactgcagccagcaactcggaggagaagaccccggcccccaggctagctgcggagaaaaccaagaaggaggagtacatgaagaagctgcacatgcaggagcgtgctgtggaggaggtgaagctggccatcaagcccttctaccagaagagggaggtgaccaaggaggagtacaaggacatcctgcgcaaggccgtgcagaagatctgccacagcaagagtggagagatcaaccccgtgaaggtggccaacctggtgaaggcgtacgtggacaagtacaggcacatgcgcaggcacaagaaaccagaggccggggaggagccgcccacgcagggggccgagggctgaggccaggcaatcacgggctatgcccggggagctgtcgggagtggcgggaatcggggccatgcccggggagctgtcgggagtggcgggaatcggggccatgcccggggagctgtcgggagtggcgggaaatggggggcatcaccatgcctgccgtcgggttcctgcgctgacacctggtctgtgcacctgtgttgctcacagttgaaaactggacacttttgtatgtatattatagagacactgtttccattctaatttatcaaaaatggattatctttagaaacctcttgattgacttactacttggaagataaagcacttggtgatcaagaggggctcctggtggggtggcgcgtccttgataaatctctaggtggcctcccgccaacagctgctgtgtacctttggctctgaattaggaatatctttactttctcttttcc

SEQ ID NO: 56817 - DNA, 5827 bp, Homo Sapiens
ggcgcgggtgcgggcgccccagccggccgcgatcgcgggatttctgcgccaggagatgaggggcggtagagccctggaatggagatgtccttgacgcctgggcagaggctgcagctgcaggaccctgtggccactggagataagtaatggtgccatttgaacacctactggaaacggggcaggaacagtgagtgaccccaggcgagcacaggcaggtgccaggagccaggatgcaaggatgacgcctccggaggccctggcctcactcccacctgggcgctaggagccatcccggggctccagccaggagccctgctgcccaggggcatggccaaacctttcttccgactccagaagtttctccgccgaacacagttcctgctgttcttcctcacggctgcctacctgatgaccggcagcctgctgctgctgcagcgggtccgcgtggctctcccacagggcccccgggcacccggccccctgcagaccttgccagtggccgccgtggcgctgggcgtgggcttgctggacagcagagccctgcacgaccctcgagtcagcccagagctgctgctgggtgtggacatgctgcagagccccctgacccggccccggcccggcccccgctggctccggagccgcaactcggagctgcgtcagttgcgtcgccgctggttccaccacttcatgagtgactcccagggaccgcccgccctgggccccgaggctgccaggcccgccatccacagccgaggcacctacattggatgcttcagtgacgatggccacgagaggactctgaaaggagctgtgttttatgacttgagaaagatgactgtctcccactgccaggatgcgtgtgctgagcggtcctatgtctacgccggcttggaggccggggcggagtgttactgcgggaaccggctgccagcggtgagcgtggggctggaagagtgtaaccatgagtgcaaaggcgagaagggctctgtgtgcggggctgtggaccggctctccgtgtaccgtgtggacgagctgcagccgggctccaggaagcggcggaccgccacctaccgcggatgcttccgactgccagagaacatcacacatgccttccccagctccctgatacaggccaatgtgaccgtggggacttgctcgggcttttgttcccagaaagagttccccttggccattctcaggggctgggaatgctactgtgcttaccctaccccccggttcaacctgcgggatgccatggacagctcagtatgtggccaggaccctgaggcacagaggctggcagaatactgtgaggtctaccagacacctgtgcaagacactcgttgtacagacaggaggttcctgcctaacaaatccaaagtgtttgtggctttgtcaagcttcccaggagccgggaacacatgggcacggcacctcattgagcatgccactggcttctatacagggagctactactttgatggaaccctctacaacaaagggttcaagggcgaaaaggaccactggcggagccgacgcaccatctgtgtcaaaacccacgagagtggcaggagggagattgagatgtttgattcagccatcctgctaatccggaacccatacaggtccctggtggcagaattcaacagaaaatgtgccgggcacctgggatatgcagctgaccgcaactggaagagcaaagagtggccggactttgtcaacagctacgcctcgtggtggtcctcgcacgtcctggactggctcaagtacgggaagcggctgctggtggtgcactacgaggagctgcggcgcagcctggtgcccacgttacgggagatggtggccttcctcaacgtgtctgtgagcgaggagcggctgctctgcgtggagaacaacaaggagggcagcttccggcggcgcggccggcgctcccacgaccctgagcccttcaccccggagatgaaagacttgatcaatggctacatccggacggtggaccaagccctgcgtgaccacaactggacggggctgcccagggagtatgtgcccagatgataggcctggcccacgccgccgcccccgctgagtgacgcaatcgcaccacggggctgcgctccccactctgatgctcaggcccgtggcctcactgggacgaacggtgggtggggggctcaccctggtgctgcctcccgcacaaggagacctggacacaacagacacacatcacaaggcgaacacaaatggacacacatacctggccacgaacccacacctcctcagacactcagacaccactccaggctcatagccccgtcttgatgcagagaagccacccacgtggggtgtgccaggcacccccagatacaaatgcagccacgcacagacgtaacacacaggtgccaggccgtgtgctcctggaggctggctggctgtctctctcacacagatacacgtgcgctccctgggatccgggaggccctgggcttcctgtgtgtagccctggcatagacttgctcgtcagggtgttcgactctgggatgctgggccgggcagacatttatgctctgagcagcaaggaccattgggatggaggtgggcacaaagactgctgcttccagggtgtgcggccctggccgtgtgtctgacatcccataaatgtgtgtgtggtgtgactacgggcaccacaaactccgcagccttgcctctcttttctctgtggctgggctggctgcaccatgggcagggttgaggactgccccccaccccgcccaagccaatgcagacactgacctcaagaccagccacaccaagtctgtgcactgcccaccacccccttcaacccctcctacaccatgctccggggcctggggcctccttgcctggcttcttcctccagctatcctcagggaagctggagattcaagtcatgccccagaagcaaggtgtaagcatgggggcgtggggaagagggcaggagctgaagttccaggggagcccaggacccctggggacctgtacactagcaggatgggtcttgggagttggcatggggagattgtaagggctgtatctccgcgattactggtactggtgctccacccataggggccctgttctctctggggtcccacactggggtcatgagagctagttagtactcagcctgacccctaggtctggtcctgccagcctgggatgggggtcaatgtatgctacacatcttgggctcacaagtgaggctgtggaggccaggaggttcaagtatggagggtaggagtgcaacccaggagcaacgctcaaggtggccgagatgcagggaggattgtggcgatccggttgcacactggcctctgtggaggtcagggaggtgggaaggtgggtgggcctgaactcaggcagcccttcagtggcttcttcaggcctaggataaccctggccaggccccatggtcctgctctgggtcagctgtcagggagacctcccttcagcctgagccaagctgcattgggaggagaaggcagggtgagggatctgggagagcaggacgttgagatatcctgaccctctgcttcctagcctgatgatggggaacccagagccacccgctatgagcacaggccgggggtggaaggcccagtagagctgcccttccccagatggaagcttcctccaaccttcagtttggccagtgggtgggtttgggcatctgtgcccctggtggcctccaaatccttcctgggattcccccaaacccacactgatgcgaagctgttcttgaccctcccatagcatcaactcagttcagctcaaagctagaaacaccaaggtctttgaaaatgtttattggctcaggatagcttcggcatccaatctgcgaaggcccctgatggagctatttcttcctagtatcaggagcaattgagacccctcaggagtttccacactgctgtggacgggatagccagggcagacctgcatcccagagcaagcctagatccttgaaagcaatgtcaggcgtggcagtggggaagccatggaggctgggaagggcaaagtgtggagagaggagtgaccgggactggagccagggtctggggagagcaacagcaccaggcttttcctggtagttggattggtacattcactgctgccaggtacccagagatgtcatctctctccaggtagagcatcaccagctcctgtggccttgtagatgactctgtacctcagtgaagagtgcaggcaagtagagtgatggggtcagtgtccatccagtttacgctgagtcagtccatacagcaagacacctggcacttggcaggtactcctggatgttgatgagcaaggaagagcaacggccctgtcagctggcagtggtcctcacagccttcatcccaggtctgcctacgtgggagatctcatcagaaacaggaacggggatctgtctgtgcttgcaggaaagtccatttgtttttctccaagttaggtctcatctacagctcttagcttctcagtaaagaggatactctcccaaccagccaaggaataaaagctgatctgtatgtagggcagaagtgtggcaaatgcatcaggaaccggttagaacagaacagagaaaccctgactgtctacagattccaactttaatagcaagcctgtggagttacacaaacctgtgttaaaacatgtaatttttatggatttcatctcccgttgtggatcaatttggaaaaaccaaaatatgtaattttaaaaaactaaaacacatcctggtagtcccagtgatgtgtaaatgagagagaagaatagacaggcttccaaaccctgggaagaaagctgcttaattatgtgaacatcttataatgaagtctcttgcagctaaaattagattttgagtgcatgaatctgtgataatgtttgcatatcagaatgcattctccccttaaaagtagcagtagccacttggttcttagggggccccaagaggagaggagaagtgctgaggttgatgttacgactgcaagaattcttgggacacaggtttgttttctgctgacttgctcggaaacccattggaggtatctgaaatgtgatgactccaaaggggttcatttcactatagggagaaattgattcgtctgacttcctatttatcaccactcaatattgggtgagttggtctgaacaaggtggggataaagtagagtggaaataatgtagagtcgtcagactgaaaggccaggttgtagtcccagctcttatctgccatcttggacaaagcttttcccatctccagtctcagtttcccatccataaaatgggggaagtggtaggtcttgctgattgcatccacattcattcctccatttcctttcccagcaaccccccatttctgtttgggaattcatatgatctgccagagcctctccaggggtggaatacatgtcctggactaagccaatgacaccttccatctttccagctatggtgactgggttaggtatgatcttgtgagttaagacaatgaagccagagggaatttcaagacttatgggaatgctgggtagaagctgttttaattcccctgttgaatgtgaaaaaggtagtagtattcctgggtctttatgatgaccaccttgggccttgggatcatgaccaggaatcacgtgaagctgacaccactgaagggagagttgagaggcagaaagagatcaagtccttggtgaaattgtttaagtacaggatcaagccttgcttgagattggccttacctctggactttttttgttatatgagctaataaattctgtttattgtttaaaaaaaa

SEQ ID NO: 56818 - DNA, 2369 bp, Homo Sapiens
gatctcagttttatcatgaatgacttctccattgtgattcttgatttccttcatgggttaatttagaggttatgtatgtatgtctgtgtgtgtctgttgctaaggtcaccatggctgaccgggctgctgccgaaagggcctgcaaggatcccaatcccatcattgatggcagaaaggccaacgtgaacctggcatacttaggagcaaaaccaaggatcatgcaaccaggttttgcctttggtgttcaacaacttcatccagcccttatacaaagacctttcgggatacctgcccactatgtctatccgcaggcttttgtgcagccgggagtggtcattccacacgtccagccgacagcagctgccgcctccaccaccccttacattgattacactggagctgcatacgcacaatactcagcagctgctgctgctgccgccgccgctgctgcctatgaccagtacccctatgcagcctctccagctgctgcaggatatgttactgctgggggctatggctacgcagtccagcagccaatcaccgcagcggcacctgggacagctgccgccgccgctgcagcagctgctgccgctgcagcatttggccagtaccagcctcagcagctgcagacagaccgaatgcaatagaccagccatctgatcaaagttgaattgttttctctttccctcccaattttccaatttttagtagctaataagagagttaacattgacttaacagctttaaaaaaaaaacagccatgctattgtgaagcagagttattattttttttatactccaggtagtgttctagatgagaaagaggtaagaatgaggggaatgggcacaattttggaaatcaatcccaaagagcctgagtaaatgaaaggccactacgaaatgacgccaggagtaacaacggaacttcacttttgtaacgggatttttatttttgctctttttatagtatcagggaagcaaactgccttttacaagttagaaaatgctgtttgaatctagttgaaccagggaatacagagcgagcaatatgtagcttgaattacatttaaaagcagattttttacaaacaaaatggcgaaagcactgattgtcatttttagcagtcacttaaggcctatagaacttttttcaagtcggaaggtcctgttcttactatctcaaaaatgggcatcgaacaatcaatctaggagcgtggcagtgggtaaaatggtggacaggcaccaaagctattttctcatctgtcctgtggatgagtggaactgtggaacaagtgatgtggaattaatgggtgcaacagctgtacagacaatcaataacacacacagttctggaaagaacacatcacttgtgcttgtttgatgagcttgtcacattctaatccctctccccatcctgtttcaattttgggaaacttgtatctgctggtgtcagcaattctgattctgaaataggatcaggcttttactacaacagccttctctttctatttattgtgtcgactcgtggcttatgaataaaggcaggcaaagtttgcagaactgtcttaaggacatttattttttttccctttttaagtaattttacactttagtatctatttcagagtcatatttaaaactatttattagtgactacagtacatgagacaacaaggttactgagattacaattcttcaaaggttaatgataatgtggtttatactgtgccttaatagtaatgctatttaagatatttatttttaagttttactatgctgcactctaaagaaaggaactttagatgtgacactgtaaaattatgtattcatctcatggcataaattatttagtaagtctagatgtagcgtattaaatattaacctattcaactaaagatgttgacttggatttatttaaattcatatgtgcactgtataagagagtactcttacattaacacattttagtttagtttttagatttttttttaaacgatatattgctagtttcatgcttcctcctctgattttgcctgtgtagatttcattcattggtaattcattagtttaacactattatgtagtttttaaatgctgctttacatttttcttctgaaactgcaatacttgcaatttttattcttaaactaaattgaatactattttacactgtattggatttttatacttgaacaatttcatacaagggaagacaggttagcatttttatggactttctccattatcactggatttactttaagtattcccatactagacagtgttatgtaatgtagacatgactctcctgtgcaaattatttattcgttgtgtatattgctttataacatttcagatcttctaatctat

SEQ ID NO: 56819 - DNA, 2583 bp, Homo Sapiens
gagagccacgtgggtcgagctggggcgcagctcgcatgggggagtctatcccgctggccgccccggtcccggtggaacaggcggtgctggagacgttcttctctcacctgggtatcttctcttacgacaaggctaaggacaatgtggagaaggaacgagaggccaacaagagcgcggggggcagctggctgtcgctgctggcggccttggcgcacctggccgcggccgagaaggtctatcacagcctcacctacctggggcagaaactagggggccagtctttcttcagcaggaaggattccatccgcaccatctatacttcattgcataatgagctgaagaaggtggtgactggccgtggtgccctgggtgggactgctcctcacgtggaagaactcctttcccacctgtcagagcagctctgcttctttgttcaggctcggatggagatagcagacttctatgagaagatgtacaccctcagcacacagaagttcatcaatgctgaagagctcgttggccttttggatgccatcatgaaaaaatacagctccagatttcaccacccaatcctcagtcctttggaaagcagtttccagctggaagttgacgtcctgtgtcatctcctgaaagcccaggcccaggtctcagagtggaagttcctcccatctctggttaatttacacagtgcgcacaccaaactgcagacgtggggccagatctttgagaaacagcgggagaccaagaaacatctgtttggagggcagtctcagaaggccgtgcagcctccacaccttttcctttggctgatgaaactcaaaaacatgcttcttgccaagtttagcttttactttcatgaggctctgagccgacaaacgactgcttcagaaatgaaaacgttgacagcaaaagctaacccagacttttttggaaagatttccagcttcatcagaaaatatgatgctgccaatgtgtccttaatttttgacaacagaggttctgagagttttcagggtcatggttatcaccacccccattcctacagagaggcccccaagggtgtggaccagtatccagctgtagtgtctctgcccagcgacaggccagtcatgcactggcccaatgtcatcatgatcatgacggaccgcacatctgatctgaacagcttggagaaagtggtccacttctatgatgacaaagttcagagtacctacttcctaacccgcccggaacctcactttaccattgtcatcatttttgagtcaaagaaatctgagagagactcccactttatttccttcctcaatgaggtctcacttgcccttaagaaccccaaagtgtttgcaagtctgaaacctggatccaaaggttagcaggtgatttgcgtggaggggtttcaagactagaaactgttcttaattgccctaatgatctacggtggtctgtgaatagagtttacatccattcatgcctctttcagaactaaattaaagacaaatcctccctgtgttgcacactttataagcaattaaggccaattgaattaagtttccaaagagtaatctaggaagtggtcatgggctaccatgtgtctccatggtacagcaaagtagtttcagtattttcccctattttgctatatttcttgtagattgaatatttattgggcttttttttttcccatatgtttttctgttgttctaaacattgtgttctactgcaattccaaacagcctctctgtttccctccttcttggaagagtaatagggatgagatattaaatggcctttttagaattaagaactatatgttttctgtctcataaattagcaaatgaatatggagttagtagatttatgattctgatctacaaattaacatttttgatgccaaaattagggtcttggtaagaaatttctatcagttattgaaactgaaagtgagtcagattggtagcatgacgtaaggttttaacagttcagaagatcctcatggcagctttaatagccatgggttcttttggggtaatgtacacacctaactgcatttgttttgacttctttaatgtttgaatgtttcactctgttgtaaagtcagcataagccatcatgtgggctttcttcattcttcagcatattatccgcttcgctttctgtttatcacttttctgctgaaatgtacatgtttggctctactccttggttatttttaggcttaaaagcatgcagtcggtttttcagccacttttagatactcatgcaacatagcctacttttataaaatcaaaatgaaggtcttcatacgctgtacttgctaaaaatcaactgtgcgcttgaaagacctcttcatagttgagtaatcacctcagtacttaagcacttctgaacttgggtttcatgcctgccccccacaaattatgtttagaagcagcactgcatcttagcacatgctgccttatttctttccttcggcaggtgttcatgggaagtaggtggatcagtgaaggcataatgggctgtggagaccttcacttctagattattgattcaaaataaaaagaagccacaaagagtaaaaaaaaa

SEQ ID NO: 56820 - DNA, 3949 bp, Homo Sapiens; identical to SEQ ID NO: 25686

SEQ ID NO: 56821 - DNA, 6569 bp, Homo Sapiens
cgcgaggccgccggcggccgctctgccgtgggctcggcccgggctgccacgagcgtgcgggcctcgccgggcatgtcctaggcggcggccccgcccagcgctcggccgggcgggcgggcgggcgcgagggcagggaccgagccgggccgagctggggaacaagccggggaccaagccggggaccaagccggggactaaggcgagccggagaccgagcccgaacagcagtcccgcagcgtggacaagcagcatgccgtcatcaactacgaccaggacagggacgagcactgggtgaaggacctgggcagcctcaatgggacgtttgtgaatgacatgcgcatcccggaccagaagtacgtcacgctgaagctcaacgatgtcatccgcttcggctacgattccaacatgtatgtgctggagcgtgtgcagcaccgagtcccggaggaggcactcaagcatgaaaagtacaccagccagctgcaggtgagcgtgaagggtttggcgcccaagaggagcgaggcactgccggaacacacaccatactgcgaggcctcgaaccccaggccggagaagggggaccggagaccaggaacagaggcagcctcttaccgcacacccctgtatgggcagccctcctggtggggtgaggacgatggtagcacgctgcctgacgcccagcgccagggagagccctacccagagcgccccaagggaccagtgcagcaggacggggagctccacggcttccgcgcccctgctgagcctcagggctgctcgttccggcgggagcccagctacttcgagatccccacgaaggagaccccgcagccgtcgcagccccccgaggtgccggcacacgagatgcccacgaaggatgcagaggcaggtgggggcggagcggcccctgtggtgcagagccacgcctccttcaccatcgagtttgatgactgcagccctggcaagatgaagatcaaggaccatatcaccaagttttccctgcgccagcggcggcccccgggcaaggaggccacacctggcgagatggtgtcggctgagaccaaggtggccgactggctggtgcagaatgacccgagcctgctgcaccgggttggccctggggatgaccgccacagcaccaagagcgacctgcctgtccacacccgcaccctgaagggccacaagcacgaggacggcacgcagagtgactcagaggaccccctggccaaggcggcctcggccgctggggtgcccttggaggccagcggggagcaggtgcggctgcagaggcagatcaagcgggacccccaggagctactacataaccagcaggcctttgtcatcgagttcttcgacgaggacacaccccgaaagaagcgctcccagtccttcacgcacagcccgtccggggaccccaaggccgacaagcgccgtggcccaacgccggccgatagggaccgccccagtgtcccagccccagtccaggcagggggccgcagctcggggccacagagggccggctcgctcaagcgggagaagacagaggaacggctgggcagcccctcgcccgcctcccgaacccctgcccgccccttcggaagcgtggggcgccgctcccgcctggcccaggacttcatggcccagtgtctgcgggagagctccccggccgcccggcccagccccgagaaggttcctccggtgctgcccgctcccctgacaccccatgggaccagccccgtgggccccccgaccccaccgcccgcccccacggacccccagctgaccaaggcacggaaacaggaggaggacgacagcctcagtgacgcagggacatacaccatcgagaccgaggcgcaggacacggaggtggaggaggcccggaagatgatcgaccaggtctttggggtgttggagtcccctgaactctccagggcatcttcggccacctttcgcccagtcatcagaggggacagagatgagtctgatgacgggggcgtggcccagcggatggcgctactgcaggagtttgcctcccggccactgggtgcggccccccaggcggagcaccagggcctcccggtgccgggctcccctgggggtcagaagtgggtgtcccgctgggccagcctggctgacagctactcagacccgggcctcacagaggatggcctgggacgtagaggcggggagccggaggggtccctgcctgtgcgcatgcggcgacggctccctcagctgcccagtgagagggctgacagccctgcgggcccagagagcagcaggaggagtgggcctgggccaccggagctggacagtgagcagcccagccgcctcttcggccaggaggagttggatcctgacagcctcagcgatgccagtgggtcggacgggggccgaggccccgagccaggggtggagccacaggacagcagacgcaggagcccccaggaggggcccacgtggagcaggggtcggcgctcaccaagggcccccggggagccaactcccgcctctttcttcattggggaccagaatggggacgctgtgttatctaggaaaccgcttgcggctccaggggatggggagggcctagggcagacagcccagcccagccccccagcacgggatggcgtctatgtcagtgccaatgggagaatggtcatccagctacggcctggacggtccccagaacccgacggccctgccccagcctttctccggcaagagagcttcactaaggagccagccagtggtcccccagcgcccggcaagcccccccacatctccagccacccgcttctacaggacctggccgctacccgggccgcacgcatggacttccactcccaggacacccacctgatcttgaaggagacggagacggccctggcggccctggaggcccgactcctctctaattctgtggatgccgagtgtgaggggggcagcaccccgaggccgccggaggacgccctgtctggggactcggacgtggacacagccagcaccgtcagcctgcgtagtggcaagagcgggcccagccccacaaccccccagcctctgcgggcacagaaggagatgtcgccatccccgccagctgcacaggacccgggaggcaccgccctggtcagtgcccgtgagcagtcctcagagaggcagcatcacccacttggcccgacggacatgggccgtggagagccggtacggcgctcagccataaggcgtggccacaggccccgagggtccctggattggcccagtgaggagcgtggccctgtcctcgcccacctacccagctcagatgtgatggcctccaaccacgaaacccctgaggccaccggggcaggacggctaggttctcgccggaaaccagcggccccaccgccatccccagctgcccgggaggagcagagccgtagctcagccagctcccagaaggggccgcaggccttgacccgctccaacagcctgtccacccctcgccccacacgggcctcccggctgaggcgggcccggctgggggacgcttcagacactgaggctgcggatggtgagcgggggtccctgggcaaccctgagcccgtgggccggccagctgctgagcaggccaagaagctgtcacgcctggacatcctggccatgccccggaagcgggccggctccttcacagggactagtgaccccgaggcagcccctgcccgcaccagcttctctggccgcagtgtggagttgtgctgtgccagccgcaagcccaccatggccgaagcacgggctgtctccaggaaggctgccaacacagccaccaccacgggtccccgccagcccttcagcagggcccgctcaggcagtgcccgatacacctccaccactcagaccccgagggctggcagctccagccgggctcgttcccgggcccccggcccccgggacacggacgacgatgaggaggagcctgacccttatggtttcatcgtgcagacggcagagattgcggagattgccaggctgagccagacgctggtgaaggacgtggccatcctagcccaggagatccacgatgtggctggggacggtgacacactgggctcctcggagcctgcccacagcgcctccctcagcaacatgcccagcacccccgcctcgaccatctctgcccgggaggagctggtgcagcgcatccccgaggccagcctcaacttccagaaggtgccgcccggctcgctgaactctcgggactttgaccagaacatgaacgacagctgtgaggacgccctggccaacaagacgcggcctcggaaccgagaggaggtgatcttcgataacctgatgctgaacccggtgtcccagctgtcgcaggccatccgtgagaacacagagcaccttgccgagaagatgaagatcctctttcagaacacagggagagcttgggaggacctggaagccaggatcaacgccgagaacgaggtgcccatcctgaagacatctaacaaggaaatcagctccatcctgaaggaactgaggcgggtgcagaaacagctggaagttatcaatgccatcgtggaccccagtgggagcctggacctgctcacaggaaacaggagcttggccagctctgcacagccggggctggggaagggccgcgtggctgcccagagcccaccctcacccgcctcagccgaggccctgctgccagccctgcccctgaggaatttcccacagcgggccagctgtgggcctcccagcctcccggaccccaccttcctccctgatgccgagaggttcctgatctaggccccagacctggccaggccagcctccctgtgcgtgtgcgtctctgccttccgtccgccgcacacccgcctgcctggccgcaggtggttctccctgaagacccccacatgtgccatatccctgtgggcgggtgcctcccacgcccttgccccctcgtcagctcccagccagcaccctactcaccctgtccagccccatggccacccccacccctgcctcgccccctacaggcctctgggcccagctcctggccaggctgctgccaaggtcaagccctcaagggcattaccccgcctcctcttcatcactgttatttttgtctttagctttaaaggaaagagttgttggtgccattgcaggtgccccctccaggcctgactggctccgccaggcactaacctgccataaccctttgtgctggcctgcggccaggcagaggaagagaggtcgactgtggggtcatttggtgccaaacatggaggtgggcaggctcacctgttcctgggactgtctgagatggcagggcacttgccctggtggctcccacctgaccccaggccttttataggcaggagccccactgcttccagcctctggtgccaacacagttgccaaacccattgagcttggggctgccctgtggaggcctcctgggtatggaccaggggcttgttgagagctgagccatgcacacaggtgcagacaccccccaactcccatgcacacggctagtccaggcgcctccacgctgcaccgtgaggactgcagggcatgtccccgtgaggggctatgggcctctgtaggtgggcttccaaggtcctgggtgcagccgggtgcatggcagcccttctggcgggggtgagcgcacgaccaaagtcactggaagccgggtttccggaagctcgcagcttggcctgcaccacacgccctccccttttggcttcacgccatcaggcctcaagtgggcatgggggcagggacgggcccaggaactgttgttttctcaggattctttcagctgggaacatggcaggtgagcagagcttggtgcctctgccgtggcccctgctggggcagcccgtgttgccggagcctctaagccaaagagcccgttggccgtggttggtgggggtggacgtgggggtgtcccacctggaccagactggcgtgggtgagctccacaccctgcctggcaatggtatgagagtcggacctggacagggccagctgctgggggagcggcactggggactggaggctggaagcgggtggtgtgtgtcccctgtttacttttagctgagctggggttgggtgtacgggttctgttcctctgagcctgcggcccacctgatgtttacgtgtgtgtgtgagggggggcgggggtggcaggtgtccccccctggtccccgccccaagagcctgctgtctgtatggaggaggtgctagcccggtccaccgggctgctgcccacccctgcatgccccagttgcccaccccgcctgcccctggacatgaagtggtcacgcttcatccacggctccttcccacccctcggcagtggctgtgcaatgttttaagttcacaagttcctgctcctccccacactgagctcctttgttcctccccctccagcctttgcctgggaactggtccttgtttgccgggcttctcggagggttcactgtacattcgttctcaggtggtcttgtggctgtctttcggaaaatggttattttatatgatttgtcatggaatttgttctaataaatcattcttctatc

SEQ ID NO: 56822 - DNA, 3155 bp, Homo Sapiens
ccgggcgcccagactctgagagagagcgacggccatcatagaacagcgaaggcagtcgatcggcctgcggtccgcttcggcattcgcaggccgcaggcgggaggctagagcccccaggcgcacctcgccccaaccgcccgcggctcgggcagctctgcagagacgtcgtggcggcagggccagcacccattggtccgccacagccctccgccctccccctcgccacgcttattggccggagcggcggcgctcgccgggtaggcggtggcggcgtccctcccttgcgccggccctcaagaggcgacgaggaagcggccgcctccctgcgccccgcccctccggctagctcgctggctcccggctcctcccgacgtctcctacctcctcacggctcttcccggcgctctcctggctcccttctgccccagctccgtctcggcggcggcggggcagttgcagtggtgcagaatggctgacctcagtcttgcagatgcattaacagaaccatctccagacattgagggagagataaagcgggacttcattgccacactagaggcagaggcctttgatgatgttgtgggagaaactgttggaaaaacagactatattcctctcctggatgttgatgagaaaaccgggaactcagagtcaaagaagaaaccgtgctcagaaactagccagattgaagatactccatcttctaaaccaacactcctagccaatggtggtcatggagtagaagggagcgatactacagaagcctagcgtgtctctcaacactggggctgctgcaacaccagaccagtgatctttcctaagcatcgttatacttctaaaaccttcagcattttgcagagctttgcttttcattcctggacatgatgtagaagaaactgagggtagttcttcggggcctatttctgctgatgcctgagcaaacaacctgcttcctcttgtgctctgcagggtttgatggagcctcatttccctttgtgaacacaaagtgcaaaatgaattctttttaattttagtaatttttacaaaggttatctaatgtcttttatttcttgttttctttatgattttatcatttgattcattctcacatttttttcctttaaatatttttagttgacctttttcctttggttttcaaatgttcaacatgaatcagaatagtgtaacaccaaatgagaacatgtgttttcataaaggggttgaggccaccagtactgcagcgaatttccttttcttctccctcctccttccttctctgagcttgcttttagggaaggttaatcttacaggctacctatgtttctctccaccttactaaaatctaaataatgatagatattttaagtttttaaattgagtagttctgagtaatcctagaatatttttccaaattaaataatcctttattatttgcaagttgggccaaatttttttttttttggagacggactcttaacaatctaagattgtttcaacaggactttcttattcccattcctaattttttcaaactaattgcttagatctagaaccagttgagattagtactgtacaatggtatgctttgattgtatttatagaaatataacataaaacatggaccatgttttgaaatcttagaggaattctggtttaaaatctgaaatactttaaagttttctatccttttactgattatgcagcttcttataacccccaaggtacagattatttcagcttaaaagaaataattggcaccatgttctgagaaagattttgagatatacattgttttttgtttttgagacagggtctcactcttgcctaggctggagtgcggtggcgcgatcttggcttactgcaccctctgcctcccaggttcaagtggttctcctgcctcagcctcccaagtagctgggattataggtgtgcgccaccacaccagctaatttttgtatttttagtagagacggggttttactttgttggccaggctggtctcgaactcctgatctcaagtgatccacccgccttggccacccaaagtgctgggattacaggtgtgagacactgtgcctggccagatatacattgttttagatcccctgatacagaactacttttgagatggtaagattagaatatcatgaaagtttaaactgaatccttgcagcgacttccggaatttaggaagcattccctcttctacaggggtctggtcacaagggctggattctctgacaaaaatttcttctatggattctggacagaagacacttgagggtgatatgttttaaaggaaagaggttatgcttatcttcttagcagttgataaaatattaaaactctcttgccatagagaatacaccatcaaagaaaacacaaccctttccctttggtgtacagttatttattaagttgattttggggtttctttcgccagggatcttttcaaaactggtagtagttatttttaaaaatcatgtttgacatctttctattgctcgtaaccagtccctgtagctgtctaagttatgggtggagaagcctgggtatgactttccgttgtgtacactcacacttcatgattgacatttatttattcttttatttccatttggttatgcttatttttgtttgaaatttgtttttttcaaatatgtttcctttttgaacttacagaattgttgaaattttctactaacagccagctaaaatttggtatatgttagctctatctgtttcacttggacgtttcattttgaaagaaagaaattttatgtttcacatatagttttatacaaagtagccagtcccataatgaaatgctgtattgccatagtggtcacacccaagtggtccagtatctcaatggtgaggcagccagactggtcagggctgctttgttgaaatgtgatgattttcatatgccttctttctctttctctctctctttttttttccttttttggcccaatgttgaagatgtagaactttgtttttaaataatgtttttataatttcattcgtatacctaagtttgtattttttgtgactttggacttcaacagtttgtatattgggacttctaatgtgattactgtactaaataaattccactaataaacatcttacattaacaccttaaaaaaaaa

SEQ ID NO: 56823 - DNA, 1816 bp, Homo Sapiens; identical to SEQ ID NO: 31529

SEQ ID NO: 56824 - DNA, 6862 bp, Homo Sapiens; identical to SEQ ID NO: 30089

SEQ ID NO: 56825 - DNA, 2423 bp, Homo Sapiens; identical to SEQ ID NO: 30978

SEQ ID NO: 56826 - DNA, 8778 bp, Homo Sapiens; identical to SEQ ID NO: 29874

SEQ ID NO: 56827 - DNA, 2614 bp, Homo Sapiens
gaagaggaaggggagagtcggcggtcggagcggggtgacgaggacctcatgcacgaggcggcgaaggaccgatggcagagaaccgagtgcggcgcgaggcggtggccgcggccagcgggtgggtgcgtctgggcgcaggcgggcaccggggcccagggtctggtcctcctccttgtggcgggtccagggcgcggccgcctcgcccagcccctaggcgcactcgtcccggcgcggaggcggcggcgacaaggcagtcgctgggtgccgcgtctgccggcggagacgcagaccgacgcgcaagaggcgaccgcggctgcctcggctcccagctctgttaactgcgcggagtactttcgactttggagataggagggcgatcgcctcccccacccaccgcctccgcccaccacccaccgcctccgcccctccgagcaacttttcccggtgcctgcgagctccccctccgcgccgagccgaacgtcccggcccgccgcgcttcgtgccgccgcgcgcgcagggaaggccgcttctccttcaaagctggcacggccgcgagtccggaacaatagtcggggtgtcccgaatgccaggagcacggccactgcccgccgggctgtgggtggcacaggaatgggggttgcgtggtggatgcagagcggggtgcatccctggatggcatcgctggagcgctcgccgctccggcgacatcgcgagcggtgcaaaccgggccgcctggagcccgtgacgcggtggcggcgagggcggtggggctgcctgtcctcgggctacaggactggggctcctggggaccccaagctgctcgagcccagggctgctggcgccaacagagctgtgccctgaggacccggcctccccgcccggggggaggccgcacaggagcgtccccagcaggtcccgcgaaggcgtaacagagccacaaacttttgccgactcccgcggccgcggccgccggcagcccgactccggccgcggtgctcatttaaggtggcgcgggcactagccgagcaggctggcctctggccgcgcttttgtccctgcgattccgcttgggcgcgctgcctccttaaggaaaagcacgtgggcaggggccgcagcccccgcgagatacccggggcgtcggcggacattagccgctaggaccttaggcgagaaaatgtggacgcatccccgccggccctgaggccaaagaagtccgaggcgacctgggagtcggtcggatcccagccgagaaaagaaacaagcaggatagcaattcttaggggagccaccctgggagttttaggcagcgtttgcctttccctggttttcttcaccaagccccatcctccccccgcataccacccccagtcaaaagagtgggagaaaatgcacagttcgaagtcggtgagagcaaaaatgggtctagtaaatcaacccgtggtggtagctaaaaggtttggggctgcaaagaaacaaactgtaagttttgagcaacaaactttttcttcaatctgtaatatgtcgaaatgggaagggggtgttgcaaaagccaactaccactgtcaaacttagcccgtttacaacatggggaaaggcgtatttcttactaatatctcaacaacgataacaatgctgtatccttccttaccttgatgttgaactgcgaatcctcctccggatcaatgtccaggaacttagaagaattggtgatattaggagttcagtacttctggaaaaaaatgcaaatggtttagccaggatctttcctgtctgattcgtcactattattatatctgatgatgcgaatggttggagcgattcaatcctaagtcattaatgagctattttataaacaccactgtctgaagatcttcatttacattttgctaaggatcacttcgctaacctcacaggcttgtgtcaacagcatgatttgcaggacttcagttacactcttataaacaacacggctgtattgttaatcggttaatattttataaagtgtaaatattttattatgttttgaagggaactattgattctaaattattaaacccctgagaaggactatttaaatgaaatatacaattaagtacaattaaatgtacattgtggttagtttgttttcagattctgcacccttttaaattcattgcttttctctttactggagtttcctcttgtccatttctgatactgaaaaaaatctatcatgttaggaaaaagcctaaattatttaaagttgcattaaacttagaggaaaatgtcaaatacgattaattatgaccagaaatgtattttggatgtttgtagagttgtatttcatatcacattttacaaatttcttccgatttaaaggagagttctaggaagttttgtgatctatgtccggtgtgggtttttgtcctctcgagttttgtctctaataaaggccttttttgtttcaaattacatacgctttttactgcacaatttttgtattgaccttatttcaactgaagcgattatttccagcaggtttaatttcgacaataagatatattttaatagttttacctttcgctagaattttgtattgtttaaaacagtaaatgaataaatttgctgatgattc

SEQ ID NO: 56828 - DNA, 3125 bp, Homo Sapiens
gtctctcgctgcagccggcgctccacgtctagtcttcactgctctgcgtcctgtgctgataaaggctcgccgctgtgaccctgttacctgcaagaacttggaggttcacagctaagacgccaggaccccctggaagcctagaaatgggaccactgacatttagggatgtgaaaatagaattctctctagaggaatggcaatgcctggacactgcgcagcggaatttatatagagatgtgatgttagagaactacagaaacctggtcttccttggtattgctgtctctaagccagacctgatcacctggctggagcaaggaaaagagccctggaatctgaagagacatgagatggtagacaaaaccccagttatgtgttctcattttgcccaagatgtttggccagagcacagcataaaagattctttccaaaaagtgatactgagaacatatggaaaatatggacatgagaatttacagctaagaaaagaccataaaagtgtggatgcatgtaaggtgtacaaaggaggttataatggacttaaccagtgtttgacaactactgacagcaagatatttcagtgtgataaatatgtgaaagtctttcataaatttccaaatgtaaatagaaataagataagacatactggaaagaaacctttcaaatgtaaaaaccgtggcaaatcattttgcatgctttcacaattaactcaacataagaaaattcatactagagagtattcttacaaatgtgaagaatgtggtaaagcctttaactggtcctcaacccttactaaacataagataattcatactggagaaaaaccctacaaatgtgaagaatgtggcaaagcttttaaccggtcctcaaatcttactaaacataaaataattcatactggagagaaaccctacaaatgtgaagaatgtggcaaagcttttaaccggtcctcaacccttactaaacataaaagaattcatacagaagagaaaccctacaaatgtgaagaatgtggcaaggcctttaaccagttctcgattcttaataaacataagagaattcatatggaagataaaccctacaaatgtgaagaatgtggcaaagcctttagagtattctcaattcttaaaaaacataagataatccatactggggaaaaaccatacaaatgtgaagaatgtggcaaagcctttaaccagttctcaaaccttactaaacataagataattcatactggagagaaaccctacaaatgtgatgaatgtggcaaagcctttaaccagtcctcaacccttactaaacataaaagaattcatacgggagaaaaaccctacaaatgtgaagaatgtggcaaagcttttaaacagtcctcaacccttactgaacataagataattcatactggagagaaaccctacaaatgtgaaaaatgtggcaaggcctttagctggtcctcagcttttactaaacataagagaaatcatatggaagataaaccctacaaatgtgaagaatgtggcaaagcctttagtgtattctcaacccttactaaacataaaataattcatactagagaaaaaccctacaaatgtgaagaatgtggcaaagcctttaaccagtcctcaatttttactaaacataagataattcacactgaagggaaatcctacaaatgtgaaaaatgtggcaatgcttttaaccagtcctcaaaccttactgcacgtaagataatttatactggagagaaaccctacaaatatgaagaatgtgacaaagcctttaacaagttctcaacccttattacacatcagataatttatactggagagaaaccctgcaaacatgaatgtggcagagcctttaacaaatcctcaaattatactaaagagaaactacaaacctgaaagatgtgacaatgattttcactacacctcaaacttttctaaacataaaccatattggtgccctagaaatgtgaggaatatgacaaggactttaaatggttgtcacgcttgattgtaggtaagataatttatattggagaaaaatcctccaagtatgaagaatgtggcaaacttttaaccaatcctcacaccttattgcacaggaaagcatttatacttgagaaaaattgtataaagaatatggaaaagccatttatatctgctcacatgtaaaaacatcagttcatacttaataaaatgcaattaccgtcaaatctttcagaaaatataagcctttaatacgaggaagagtattcttaagatgaacattacaaatagaaagagggttgtagtacctttagttttatgatagatcttattgtacacattttgtaccagaggaaaaccctaaagcattagttgctcaaactttgttcgacatcagggaatttgtattggagaaaaaccctgcaaatgtaataaatatggaaaaacattttttcaaaaactacagcttggaaaacatcagagagttcatactaaaatatatttttgcagatgcagtaaatatgaaaaatatttaatcccaaattaagtctatgtaaatatcagaattcacagtagaaatcataaggcataaggcactgatacttcagacattacactaaattagagtgttgagtataggagatccaaaactaaaattgttaggtaagttatttatatataactttaaaagaagtagaagattttttggagatttataattacattcaaagtatacttttttcttgaaaaaaattacagattttttgaaaagcaattgatgtaatttaactctcaaattcatgtttttcttcattcctattatattcacatgtgaaagcaagtgatctgttgttgctgaatcagagatatgagagattcttttttataggtgggcattatttatgcccctttctgtggaagagtaagaaaattaaaatacaagatgcatgaggaaaatgtagagatgctctttgtgattaacttagaatattaagtgctacttgaggtacatgttcagactaacattcttttgcagtatagtgagaaaaaaacattttaaaattaattatcattttgttgattgtgcttttatgtaataaaatgcagtactttaaaacatttaaaaaaaaaaaa

SEQ ID NO: 56829 - DNA, 1230 bp, Homo Sapiens
aggcagcccagctaaacatgtcatgcgtaatttatgggtagcaagcagagaattaacctttgcgtgcacatatttggcccagatgaaaaccgggcgggatggcagccccggggccagggatgcgggagccgccgggaagacccgcgcgccgctcgactcagagggactcacaccttcccccgacaaaggtcattaagttaggcggccccactgtcgaccaagtgcccaaggcattgtgggagtcatgattccaagatgcccgcgacggaaaatggaacttgtcagctccttgtcatgggagcattgtgggcgccacaactcattcagctgcagtgaaaagactgttgcatgtcgctgtgcagcctcttatcgccgaggtctggcttccgctgctgctgcgcggcccctcccccgcccgcccagccccaccaggaagcccagggcggactcgtcgagctcctaatgcacgcggcggcgagaaaaacgctcttcaactttccgccggcgccctcccgcgcttccccgggccacagggtcgcctgtcaaccggacagagcccgcaagagcgggtcatgggcggtcgcccagcggcgccgagagcaggaggaagccggagcccgcgcgggcgccgtggatcccctcggcctcccgttggtatcttccatctcatgcgttcagcattgtaacctcgcggcgggcgtgcagaccggacgccctcccgcttcttctaccgactgctaggcacaccagtgggttcattttgaaagaggcccttgcaccgggctttgcaaggaagccggcaaggttagattgaaggttagaagccaattagactagaatcctgcgatctggtgagactgccgccttaaaatgcaccaaacagtttttgaacctggagggctaacaggcgggaaaaacatctgcaagactgccaccgtgtatttttctcaagtaacaggctatccacagttttggaattccttagtgaaactgtcacacaggcacaaacacatgtcagctttccttctagtttgtaaataatatttgtaatttacaggccactgtattcccaactttgcaccatgtgatttagagaaagcaaagctccctctttaaaaataatatgttacttctgaaataccgggatattccacggcaagtaagccatattgtcgccagagcaaataaaccgcagccccatatcataattcactgggtgctataagatgt

SEQ ID NO: 56830 - DNA, 5337 bp, Homo Sapiens; identical to SEQ ID NO: 30996

SEQ ID NO: 56831 - DNA, 3712 bp, Homo Sapiens
ggcccgggcggtcgctgcgcggtggcggagcgtctagtggccgccgcaaccggtggctccgggccgccgttgtgaagtgagcgggcctctcccgcgccgcggcccgccgggcaccgccgctggaccccgcgccgacccggcagcgccccgacctgccgctcgggaggtccgcgaccgtttcgatttctgttcctaaagtccgattttggacgctgaaaaggaggctgtggaggggcgagcggcgtcctgggaagcaaggcctgctctgtgcggagcagaaacgccttgtgcgaacagaaataaattcccgcggaaaggatgaaggtggacttttaaatattctccactgaagcaaatgctgcaacaatttgcatttccttcaccaatgtcgtcttgtgccttttcttgttcctactgtaaaggagatgggttagatgttcactttcatttggacccgtggatacccattgaacagatgcttgaaacctgcaagtaatcttcagatcctagcagaaccataggcctttcctttgttttgggaggatatagcctgcctatatgctgtggaaatgaacggggagcagcagcttgatgcagatgccggctctggtatggaagaggtagaattaagctgggaagattatctagaagaaacagggtccacagcagttccctatgggtcttttaaacatgtggacacacgtttgcaaaatggatttgctcctgggatgaagctggaggtggctgtgagaacagatcctgagacctactgggttgccaccgttatcactacctgtgagcagttgctccttctccgctatgatggctatggggaggatcggagagcagatttctggtgtgacatcaggaaggctgatctctaccccattgggtggtgtgagcagaataagaagacccttgaagccccagaaggcatcagagataaagtatctgactgggatgagtttctgcggcagaccctgataggagcatgtagtcctcctgttccgctgctagagggcctccgtaatgggaggaatcctttagatctcattgctccaggatccagactagaatgtcaagctttccaggactctttaagcacttggattgttactgtagtagaaaacattggaggaaggctgaagctacgttatgaaggacttgaaagttctgacaattatgaacattggttgtattacttggatccatttcttcatcacgttggttgggctgctcaacagggatatgagcttcagcccccttcagccattagacatctaaaaaatgaagctgagtggcaagagattttggccaaagtgaaagaggaagaggaagagccattaccatcttacttatttaaggacaaacaagttattggcattcatacattctctgtaaacatgaaattggaagctgtagacccctggtctccttttgggatctctcctgctacagttgttaaggtttttgatgagaagtactttctggtggaaatggatgacttgcgtcctgagaaccacgcacggcgatcctttgtgtgccacgccgacagtcctggcatcttccctgtgcagtggagtctgaagaatggcctacacatcagcccccctccaggctacccaagccaggactttgactgggctgactacctcaaacagtgtggtgctgaagctgctccccagaggtgcttccctccgttaatttctgaacatgaatttaaggagaacatgaagctcgaggcggtgaaccccattctccctgaagaagtgtgtgttgctaccatcactgcagtgagaggctcctacctgtggctccagctggagggttctaagaagcctatacctgaatgtattgtgagtgtggaatccatggatatatttcctttgggctggtgtgaaaccaacggccaccccctcagcactcctcgccgagcacgagtatataaacagaggaaaattgcagtggttcagccagaaaaacaagtaccatcctcgaggactgtccacgagggcctgaggaatcaggagctgaactccacagagtcagttatgattaatggaaaatattgctgtccaaagatatacttcaaccaccgttgcttctcagggccatatcttaacaaaggaagaattgctgagctgcctcaatgtgtaggacctgggaactgtgttctggtccttagagaggtcctcactttacttatcaatgcagcctacaaacccagccgtgtccttcgggagctccagctggacaaagactctgtgtggcacggatgtggggaagtcctaaaagccaaatataaaggaaagagttatcgggctactgttgagatagtgaaaacagcagatcgggtgactgaattctgccggcaaacctgtatcaaactggaatgctgtcctaacctcttcggtccacggatggttctggataagtgttctgagaactgttctgtacttacaaagaccaaatacacacactattacggaaagaagaaaaataaaagaattgggaggccacctggtgggcatagtaacttagcttgtgccctgaaaaaagccagtaagaggagaaagaggcggaaaaatgtttttgttcataagaagaaacgctcctctgcatctgttgataataccccagcgggctctccccagggaagtgggggtgaagatgaggatgacccagatgaaggggatgatgattccctaagtgaaggcagtacatccgagcagcaggatgagctacaggaagaatcagaaatgtcagaaaaaaagtcatgctcctcttctcccacccaaagtgagatatccacatcgctgcctccagatagacaaaggagaaaaagggagcttcgcaccttttcattttctgacgatgaaaataaacctccttcaccaaaggaaataaggatcgaagttgctgaaaggcttcacctggacagtaaccccttgaagtggagtgtggcagacgttgtgcggttcatcagatccactgactgtgctccattagcaagaatattcctagaccaggaaattgatgggcaggccctgttgctccttacccttcccactgttcaagaatgcatggacttaaaattgggccctgccatcaaactttgccatcacatagagaggatcaagtttgctttttatgagcagtttgccaactgagaaggacaaccaaagtgagctggatctttgaagcacaaatgcagcaaatccttcaccctgctttataagtggagctggaatagtcctggggctctggggcctgcaggtatcagcttgctctctttgcactttcggggaaggaggactcacagtgaggaagcaaaaactgtgcacagaagtggatcacctgctggtggaaatgtggacatctcttgttcagcagatggcagtttttaaaaaataaaggttgtgaggaaaagacttatataagaagaaaagcatttccagtggtgtggcctgaaaacaaagaataacctaggctgctggaaagcacccttttggttgttttcattctgttccctcccattgtagattgaactttgttctctgctttctttttcttggaaagagaggacttagctttaagtcagcactgatttgggactgttcctaaggcatatcagtgcttcattgtcattgtgtttttaaactttttaaaattaaaacagttcattttggggatgaaaaaaaaaaaaaaaaaa

SEQ ID NO: 56832 - DNA, 2107 bp, Homo Sapiens
atgctcagaatggagcagtggacaaaggagacaaaaatccctgccttcatggaacatgtattctatcagagaaaaaaaattctcaaggaaaaaaggcaattttagcatctgctctgctctgttctctcaaaaaataagcaaaggatttcacagtgttctaggtacttgggaatcatcagtgaacaaaacaaagatcctgcccttgtggaccttatgtgccagaggctcctgaccaccataaagatagaactggggcttaaccctcatcacttctgaagctgatggaatgacaattgcagcatgactttcccagggccctgattttcagcacggatgattttttcttcagggaagatggtgcctatgagttcaatcctgacttcctggaggaagctcatgaatggaaccaaaaaagagcaagaaaagcaatgaggaatggcatatcccccattattattgataataccaacctccacgcctgggaaatgaagccctatgcagtcatggcacttgaaaataactatgaagttatattccgagaacctgacactcgctggaaattcaacgttcaagagttagcaagaagaaacattcatggtgtctcaagagaaaaaatccaccgaatgaaagaacggtatgaacacgatgttacttttcacagtgtgcttcatgcagaaaagccaagcagaatgaacagaaaccaggacaggaataatgcattgccttccaacaatgccagatactggaattcctacacagagtttccaaaccggagggcccacggtggatttacaaatgagagctcctatcacagaaggggcggttgtcaccatggatattagaggcctatcttacagccaggcagaattttcctaagtcagtttctacttcagtttttgttattttttgttgcattttagtcagagctccaattccagtgtaaatagctgaactcaaaagtttctgagcaaagtcattatattcactttcttcaccaaaatttgttaaagtgcttctatatgcatggtctgatgctgggaattctgcagatttgagtaaacagtctctttctctagggtaagaatttgaaaccaaaacttgagaacacacccaagaatatatttacataggttcatagatgaaataaagtgtttatattatatataagcttcagtaccatttgctctgaagtgatctatttattttttcaggaaattcatctccatcggtaaagttgggaaggtggagagaagtggtgggggggcattgctacttatcaaagtgccattgctactttgataatctatgtatctaaaaatgtgagatgtgcgactcttatgatactgattttcctttaatgttaatatgccagaaagcatacatctaagggaacattgtccttcaaagtagacactttgggaagttatttctttattttaatgatgtatcattgttaaaaatgctgtcaaatccttaatagctacaggagctactgagggaaatcagtgtcattatttaaagtcacgccttgtgtttttactactttattcagcaggattaaacctgaataacttttggctgttgtgctaatagtgtaaataaaataagcctgccttcataaaacactaacttttaaaaggaataaacgacttctaaaattatgcctattaacatgtgtaattagtcggcagctcaaatgtttgggagtgcaagaaattaggcaccccaggatataggtcatacagggatatataaaagccatgctcattacaaaatgagcagttgatgttttatgtggcattaagacaatcaagtcctcacaactctggaatgtcttcttatactgatgctgaatttatgaatccaaattaatttccaacaggttggaatcagatttaatgtgagatcatgatagacaagaccacagaggacgtatgctctatttcttgttggccaacagcttctttctaatgttctgtgaaaaattattttaagtgtcttatataatggtgcttttatggttattaaaaattgtaaatggtatcacatttatatggatttgtcattggatctttttttggttcaacaataaaaaaatttaattacc

SEQ ID NO: 56833 - DNA, 3384 bp, Homo Sapiens; identical to SEQ ID NO: 31031

SEQ ID NO: 56834 - DNA, 4999 bp, Homo Sapiens
gaggaggattcgcagttcaacatcaaggtccctgtgcgttttattgcgacctgccggtgggaactttgtctccgagtcggagcagcatggagcggcggagcgagagcccgtgtctgcgggacagccccgaccggcggagcggcagcccggacgtcaaggggcctcccccagtgaaggtggcccggctggagcagaacggcagccccatgggagcccgcgggaggcccaacggcgccgtggccaaggccgtgggaggtttgatgattcctgtcttttgtgtcgtggagcagttggacggctctcttgaatatgacaacagagaagaacacgccgagtttgtcctggtgcggaaagatgtgctttttagccagctggtggagactgcgctcctggccctggggtattctcacagctctgcggcccaggcccaaggaataatcaagctgggaaggtggaaccctctccccctcagttatgtgacagatgcacccgacgcgacagtggccgacatgctacaagatgtctatcatgttgtgacgttgaaaatccaattacaaagttgttcaaagttggaagacttgcctgcggagcagtggaaccatgccacagtccgcaatgccttaaaggaactgctcaaagagatgaaccagagcacattagccaaagaatgccctctctcccagagtatgatttcatccattgtaaatagcacatattatgccaatgtgtcagcaaccaagtgccaggagtttgggagatggtataaaaagtacaagaagattaaagtggaaagagtggaacgagaaaacctttcagactattgtgttctgggccagcgtccaatgcatttaccaaatatgaaccagctggcatccctggggaaaaccaacgaacagtctcctcacagccaaattcaccacagtactccaatccgaaaccaagtgcccgcattacagcccatcatgagccctggtcttctttctccccagcttagtccacaacttgtaaggcaacaaatagccatggcccatctgataaaccaacagattgccgttagccggctcctggctcaccagcatcctcaagccatcaaccagcagttcctgaaccatccacccatccccagagcagttaagccagagccaaccaactcttccgtggaagtctctccagatatctaccagcaagtcagagatgagctgaagagggccagtgtgtcccaagctgtctttgcaagagtggcattcaaccgcacacagggattgttgtctgagattctgcgtaaggaagaagaccctcggacagcctctcagtctcttctagtaaacctgagggccatgcagaatttcctcaatctgccagaagtggagcgagatcgcatctaccaggatgagagggagcggagcatgaatcccaatgtgagcatggtctcctcggcctccagcagtcccagctcctcccgaacccctcaggccaaaacctcgacaccgacaacagacctccctattaaggtggacggcgccaacatcaacatcacagctgccatttatgacgagatccaacaggagatgaaaagggccaaggtgtctcaagccctgtttgccaaagtggctgcaaataaaagtcagggctggctgtgtgaactgctccgctggaaggagaacccaagcccagaaaaccgcaccctctgggaaaacctctgtaccatccgtcgcttcctgaaccttccccagcatgagagggatgtcatctatgaggaggagtcaaggcatcaccacagcgaacgcatgcaacacgtggtccagcttccccctgagccggtgcaggtacttcatagacagcagtctcagccagccaaggagagttcccctcccagagaagaagcgcctcccccacctcctccgactgaagacagttgtgccaaaaagccccggtctcgcacaaagatctccttagaagccctggggatcctccaaagctttattcatgatgtaggcctgtacccagaccaggaagccatccacactctttcggctcagctggatctccccaaacacaccatcatcaagttcttccagaaccagcggtaccacgtgaagcaccacgggaagctgaaagagcacctgggctccgcggtggacgtggctgaatataaggacgaggagctgctgaccgagtcagaggagaacgacagcgaggaaggctccgaggagatgtacaaagtggaggctgaggaggaaaatgctgacaaaagcaaggcagcacctgccgaaattgaccagagataatgtgaacttctactaggcaaagcaatacatcggtccaaggattttctgctttcatttctttaaaagttttttgttagtttgttttttgtttttgtttttgggtttttttggctttatttttgtctttttatgtctgttttgtttttcttacccttttggacatttctttgttgcacaggatacacctatagactgaataagttcagtatttccgaatcagacatcgccttggcaaagacactaaagcgttacactttatcccgtctctatgactggatcatagtcattataatcacaggagactctgccttcattatccttgcacttaacggaagttacatcaggcaagttccaggatgaaaagaactatgaaataaatgaaggaagctacaagtgtgtgtgtatatgtatatgtatatatctctatatttacatatatatattaaaattgcatgggacagagactttgcaatccgaaagaatagactgtgaaatgagttcttaaagaaaagacttgtttatgtattaaaaaaaccacttcacagtgagtcgctttggctttttgataaactgcggcctgctctcagggtggggtgactatttttgaattcctatttattttttgtgtttgtccctgatttttttttttaattctatggcttcctatctggcagcttaatgggtaatttttgaggtatgtatttaacaaaataaacgacactgccgaaaaaaaaaaaagtgaagtgaaaacaatcagggcacattaaaatgatacaagtcaaataaatcttaaagacacaatgcacacttaaaatgactcaataaaatgacttgctacgttccgttattcaatttgtcattactgtagtgaacagatgcatttctgtggaattccaaataagtaaaactgaaattcagtgcagagaaaactttgtccactagtgcaagtcttgatcaaatgacattttgacattggacatatggaattcatagtatgagccacattttgttgtgaaatttatttacctgcttgtggcttcaaatctgaaaattaataagcctgctcgtttaaaagttgtttgttgttgctgtttttttgtctttttgttttttactagaaaatagttcagtgtaatattaagttagaaaagaagttgctgcccagttaaaggggctccctctcaaataaatctccatccttccctctcccaaaagacatttctgatttctgcttcactttgggcttcctcttcttcgtacacattccatctacctaatcaaacattttcagtccctgatctctcctgtcccttttcctgggatgacagccctaacaagaactgtttttgaatcgttgtgcagctccaggcaatagagtatgtgaagcgatttcagtagaatcacttactcatcctaaaagaaaacattatcccagttacctacatcgcaattaccttatgtaaagcagaactaatgctgactggatgtttaatgggatgagcattaaagctgcaatctactatagtactccagatctctttcggcttcctatgagaaacaccagaagcattactttccacttctacttacagtaattgcaagaggagacctcacattcaggactggcctagtgaacgtaatccatgctttaaactggccattaaacagtcccacatggttggattttttttttttttttgagttgtgctttcacaaaaccttgtcaaagacctcatgcaatatcactttgaaagttattttctgtttactacacaaacattgtaatataactgttaatactatttatatatttgaaaggtataaaaggtaggagttaaaaaaaaaacctctatgtgtagatattaactcagaacttacaatatacagggagaagacatgttgcaatacaagctaattctagctgctcagtaacctctggagtttttaaagggacattttcctgtactttttcaaataatgatgtttaaaaattatcttgacataagcgtcatatacctttgcaaaaggatggttgtttgcagttagccctggccccatccttcctatttctgtagtatgctgcagctttaatcagaaagtccatggttgctgcttcctgatctccgagttactctttccaaattgtcttcttacactgttgctgaaggtcactctgtacacgtaatggaaactgattttgccaagctcttacaaggtggttcatctatcgatggcatccgcatttggtatcttttacacttcaaccaaaaatttattaggtatttttcaatgctaagtcttgccttttattttttaatttcactgccaagtttgcagtggttctaagtgaatctgtgggcattttagcctgtggtcttgccagatctttgcgaattacaatgcatatatgtctatttattcaatatctgtcatataatatctatttggaagaagaaactttctcttgtagtgcctcttgacaaagcacaatttcccgcctttttttttttttttgtgaaatgaaaaaaacaaattgtgttttattgcggtatcaacaatgtgaataaggattaacatattgtaaatgttcttttttccatgtaaatcaactatctttgttatcactaagtgataattaatttttaacttatgtgcattgttaggctgttagaattttttggttgttaaaataaacgcattcaataaatatg

SEQ ID NO: 56835 - DNA, 8947 bp, Homo Sapiens
agtcttggggtccaaggctgagggagcgggacggaagtgagcgggtcccgccccttccccttctcgtctccgttggagtcgtctctgccgcggcttcctcggctgccagctctccggcgagccggagtcctagtgccgtaccgtcagtccccggccgcgcggagccgggatgcactgttcctgctgtgggtcctcatcatggagaccaaacgggtggagattcccggcagcgtcctggacgatctctgcagccgatttattttgcatattcccagcgaggaaagagacaatgcaatccgagtgtgttttcagattgaacttgcccattggttttacttggatttctacatgcagaacacaccaggattacctcagtgtgggataagagactttgctaaagctgtcttcagtcattgtccgtttttgctgcctcaaggtgaagatgtggaaaaagttttggatgaatggaaggaatataaaatgggagtaccaacatatggtgcaattattcttgatgagacacttgaaaatgtactactagttcaggggtacctagcaaaatcaggctggggatttccaaaaggaaaagtaaataaagaagaagctcctcatgattgtgctgctagagaggtctttgaagaaactggttttgatatcaaagactatatttgtaaggatgattacattgaacttcgaatcaatgaccagcttgctcgtttgtacatcattccaggaattccaaaagacacaaaatttaacccaaaaactagaagagaaattcggaacattgagtggttctctattgagaaattgccttgtcatagaaatgatatgacccccaaatccaaacttggtttggcacctaacaaattttttatggccattccctttatcagaccattaagggactggctttctcgaagatttggcgattcctcagacagtgacaatggattttcctcaactggtagcacgccggctaaacccactgtggaaaaattgagtcgaaccaaattccgccacagtcagcagttatttcctgacggttctcctggtgaccagtgggtaaagcacaggcaaccactgcagcaaaagccatataataatcattctgaaatgtctgaccttttaaaaggaaagaatcaaagtatgaggggaaatggcagaaaacagtatcaagattcacctaatcaaaagaaaagaacaaatgggcttcagccagcaaagcagcagaattctttgatgaagtgtgaaaagaaacttcatccacggaaacttcaggataattttgaaacagatgctgtatatgacttgcctagctccagtgaagaccagttgctagaacatgctgagggacagcccgtggcatgtaatggacattgcaagttccccttttcatccagagcctttttgagtttcaagtttgaccataatgctataatgaaaatcttggacctttgatagcagcacatgtattgtaaatgtcccaggatcagagacctgttgaatttgagtgggtgtctcctcaagccttacctttctcaggtgttttaaagaaatgcagggaggcaatgtttctgaagacattttctgtttataagagagtagaaagaaacacgagtttgcactgtaaatgcagttataaccttttatacagatttaccttttcagtgttcagtacaagtttaagttgctttctttgagggcatttattctgtgtgactgtgggttttattttgtattctggttaagaaaataatgtattgagttactgtcaagtagccaagttaatgggaatgctccatctacctgttacagtgattgcaataatagtatattggagtttttcaaagaaacttaaagtaatgcccaattattaaatgaacacaagagctgagatgtcacattcgtcagcattacaggtgatctattttggtggcattttgtacttctctctgcttctaaccactgaggctctctaatcttcctctggagttttagtgaaaggatttattgagcagcttctggaatataatgtgcatgtccaaaatgaactcagcgcttcaaaaggacaaagtctgtagcctggaggggcttgagtggatgggagctgatgctgtgattttgagctgtggttacatgcagtcagtaaacctgtgagactgctggaggaaatgtagcagacagcatggaggctgggacccagcagctactttgggtcatgtctttactgtcctgcctccaaccctttagtctcgtagacttttgttcttgtggaaatttcttctgtattccagttgtgtaaatatgtatggaaaactgatattactaggttttacgttgcatctccagtattgatctttggaaactgatgttacattaggttccaattcgcaatagtagcagagactgacatgcttttattgacctgctaagcccctggatgatggagcgagaagggaaggggtatgcagtttacccaagtccaaataaagcatttcactaggttacacgttatgtatatgtgttacataacagtaacatacataactcactcctaggaatgtattttgcttcaggatttttaaattcaaataaggatggcagtgcccattttaaggaggatttcagctataactgaggacaatcaccagggcgttaagggggctttagtgttttggctgcatctgacctcattgaaggaatttcttgggagtcgggggtgtttgagtatatgtgtgtgtgtgtaactatcatgtgggttttaaaaatccttttttacagtggtatccacaaaatacttctctgcttataaatgttattgtagaaatctttattctgtgtaggtagcctatttaattgggttccactgaacctcatgggacttttaaaagaagggctatttaaggaattcacttggtagtactttgctttagcttttaaatggcttgattttaaaggagaaattctatttattaatgaaagtgtcacccttttggtgctaagcaggagaattcacaattaaagcagtgtgtatagaattatgatattcagaatcctgcatcttttaatgtgacaaatttttgaatcctgtgacttttgctttttaatgcattatatgattgtgtttggaagcttttactgttcttttcagaaatacggctgctttgcttgggtctcttcgagccatatttatagttggtcccagcattccagacttctggtaaattgttaaaggagtgaaaatgtagtttgcctggcagatgaataattttcactcatttattgtcttctggaaaccatttaacttttactgttttttatttttttggtatgtgtttttttttttctttttaagtgcatactttggccagtcttcctggtgcctgtagagttggatttttcagctctcaatactgaagcaaaagagattatagttaccagaagtatggcctctaatggtgttgagccttttcaagaaccaacaaattatctttgtgattacagtagtttaactatggttaaatgttactgctgttgcgctgctttatttaatgcactgtggaacaaaatataagggtactgttggggtgtgattatgataacttcaggcttttagctctcctcaaagtttgaggttaaaaaaatgttaaaagatgtgagttaaagtttatgtgtgtgatgtgacttaactatgcagaaaatatttaagttggatgtacttgttttaggtacatctactatacttattctctcaaacctgggtaatagtttctcagtgttcaggttaccttgagaaaggccatgcttagcgaactggatttctcctttgagaaattttagtatggtttgaggaaatcaagtgataaaggagtatgctgaatatgcaatcatttacttctactgagtgctgcattttaagatgctagatgagaagagtagttggttttgcttcattatgttttatgtctttgagagagatacaggtcttggaattcactttttaaatgttacgttccaaccttatatgttccaaggtgcagtgcactgtgaatcttttatttttaaaaaaatttgtaggtgcttttatgtataactttaatgatttataagatgctaaatgaattgtttttgtacctaaccattgtaatccaaaagataagggtgtggtttacatgcttttcaaaaatttttgttaagaagtagcaaatgaatggtttaggatttcaaatagtgataccctcctgagacatgagcatttggagaggcctgagaacctaatagaactcatatagtgtgagtgaaatttgattaaagatgttggaaaatgaagttggatttttgtattcatgtataaaggaaagtctcccagtgctgtcaaaggaattgtggttactacttgctgttctgagctttgaatatcgttatttttctattaaatatcaattagtaagtatagctaatgaagacatataatgaaagtaattttatgctgtaagattgaattggtacttttccttattaaggctttagtaatttgtatgtaatgtcaaataaaaggaattcaaatctgagtaaataacagcctcctactataggaattagattcttctataaaagtcaccatattgtatcctatagaaaagttaaggtctgagtgcatgtgtgcattaaaaacatttcactacctattctctcatggacttctcatcctttcttttttcatctccaacagttaaatggtaaggagagcaaagttaattataaaaattagacattttgccaagttagttttcttaccacaataccctcttggcttttttttttttttttttgagatggagtttcactcctgttgcccaggctggagtgcaatggtgcaatttcggctcaccgcaacctacgcctcccgggttcaagtgattctcctgcctcagcctcccaagtagctgggattacaggcatgcgccaccacgccctgctaattctgtctttttagtagagacggggtttctccatgttggtcagggtggtctctcttggctttttatctttatttttgtaccagtggaccttcctgctccctgagactgttttgattgacatcttttgtgtttctatattttccgaggcagtattttctttgtatgttaatcatagttatagtaaagtcagactcattaacttttcttcctagtaattttgacttggattattttctagcctgggggatggggttcatatgtgttgttgtaactttagattactaaacaaaacaaactgtttttttgtttgaaggtatcctttacatacctgtctgtaggtaagcaagtgttagtaaaaacaattttgtcaaacagtactcctgacagcttggtaaagtctaggtagagtttctgattttgtattatgtcctaagacttgaaagtgcatttgtctagttgccaaaagttctaaaaatgagatggtgggctttctcagcatctttttgcttcctagaattgagttgctcttgaagtctgtactcctgtgtcagaaagatggcagactgcaaatgggcagtacaggctttgccccatgctttcaaagtaggattctggattgcagtttcaaaaaaatatgatagattattgttatagaatcaaagtgtcctgaagggagaagaatagctatagttgctgggcaaagagtgtaagaaagaaactttagagcatttatcaatacttgagtgctttattatgttccaggctagaaatgtgatcattgcatggcctaagtgtagtcattcatatatatatgaatatctatatctatatctatacatatatatgtatcgccattatcgagtgttttctagccctggataaagttaatttttttgaagtttgattgccaagcaatccagtgaatctaaagtaatttttctcactttaaagaccagtgatgaggagtctggtccttcctgtactgatactgtagaactccagtcaaacttcagtgcactgctttcttacaggaagacaactcagaacacacagccataatctgctttggtgtcagtcacatcacagtggttatacatttgtcctgaatggtgattcattcctttccatctaacttccttgtgacaaatagcatttactattgaaatagtcttaaaatagggaaaagagtgaaagttactcttatgcatgggagtgggcttaaagggttgacttccaccagctgagtacaaacaagtgtaaagaaaaactatgataaagtatggaggtcttgagaattgttcataatgaaatctttaatctgggttatcagagtaatgaaatcaccaataaaaacattccatttatcttggatcttctgtggttagcagaggagtatggtctagctatgttagcagcttgaaggcacaacgtaaaaggaatgagctttcacaaggtgcttacgttagctgggtagtattggtcaaaggtactctgaagagtgaatgcagaaatcagttggctgtgtttgtaatcttgtcccacatggaccctaacctttagtagacttcagtcttttagtccagtagaagacaatggccctgaatatgtgttttctgctttttggtggaaggtttcctgcaggtggttgggtggtttttgggttattggctactgttcgttcagtgccatttgaagacctgttgtttcttaatcctttttcttggtgtgactggccaggaaaaagtccattgagtcctttttttctccctggtgtcttaccccttctgtagaataatccatattttaaaatttgtttcacatctttatagcaaacctgccacagacttgcaagcagtgattttatctttccttcctgagaaggtgatctcacttttgatgtttgggtcacctgtggacacctgtgctcttttgagtctcaaggcttatagctttcacattggcttgggaacaacagacttgtgtgtggttctagagtgaaatgggcagtgttctgctggtcctcagtctttgagaggtcttaggcaacatccttagtatagtggaatttctgaggtcaaatttaacatttaatatattctccttttagttcattgaatctgaggttctaaatctgtagcttcattttgagcacaagtctgcattgtcattttttaagagattggcaggcatatccttttgtgatacttaggaaaagactatggatggcagcaaatgaaagtaaaggttctcaactgtgaatgaaatttagaaagataattcttcagcagttggttgattagatgggttagtgcttttggaatatataacagtagacttgtattctttatgcactatacatatgatacgcactgacagaaaagcacagaagacatactgctaagagtttctttgtgcatttcactactgttctaggggactgctgtctctttggttccttttaggtttgtgttaggatgttgcacaagtaatcatttaatgttaaatgcaagtgtccaaagaaatgagtcttaaagttctttggtcatatttcactttagagttaggacaggagacagctaacctgacttccattttacaaatattagaaactttttcttcagtaacaaaaacagggaaggacaataaaaccatgaactattttgctttatgtctgtttttaaaaaataattgttttgaagtttgcttattagcttaataccttatagtacttttaaaaaatcatccttggtaattattgacttatcctagatccatgtacaattcagacttttatctgttagctttaataaaaatttaaaaccatctcatttcagaataaaataaacggaattacagttcatgcattagcatttttaagtgaagttctcttaataagattgccttttgtctaaccgaaatagggcatacagattagtttggatgggaaagtggtaagacttgactttttaatactgtgcctatttccaaaagaagacttgatgtggctttttacattatgctttaaagatgttaatggaggatacatagtcttaaaacaatttgtttgggagtaagttttagtcggaaaaaggtgaagatatttatgctgagttatgttaagcaaattattttgagaccttttgctggtagacaaaaactgaggaaatgtttcactaaatatattatggtcaatgaaaaaaccagactttagagtaaatgtgataaccaagtagatttgtgaactttatttctttagtaattatttttatcttatgtgaaatgattcaacctttaatttttgcctagattatagcaatgttttgttttaccttatagggcattttaatgcttggagaaagactataagtgaatctacttcaagggattctgttcatggtggtatacagttcttggtgctcttttggaaattgtcaaacatttactgatagcagaaaaggaaccccaaaacacctgtagtgttcaccttgttataagaacagaaacatttggaacaggtttcattctgtttctagatttatgttgttgtagttgaacagcaactgtttttttccctcagtgttaacgaaaggataaagactacctgtattgttgggtatgactatcaaaggatttccggtgattcatgtttgtgaattggagtttaaatgtttgcaggattactgtacttccaaagacccactagaatgtcagctgtactctgtactctccactgagaaaatgaacaaaatcctatgtcttaacagttatgctctaactttttgaaagctttttgatgtaaataataggttagaaactaaaagccttttaatcttacaaaatacaatttgaacgatggaaggttgttcagatactggctttctgtaaaaacatcattgtgttagattgtttgtaatgtactatcaataaaattggctgcttgggcggttttagttaccacctta

SEQ ID NO: 56836 - DNA, 2695 bp, Homo Sapiens; identical to SEQ ID NO: 31723

SEQ ID NO: 56837 - DNA, 4988 bp, Homo Sapiens
agaaaaacggggagcaggagccagactaggggaggaagaggactggcccgctcagggaatagctgggttgctgcaaaaaggggcggggagaaggcgggggcgctgcatgcagcgcgctggctccagcggtggccgcggggaatgtgacatcagcggcgccgggcgcttggggctggaggaggcagctcgcctcagctgcgctgtgcacacctcgcccgggggaggacgcagacccgggcaggcggcagggatgtcggcgaaggagaggccaaagggcaaagtgatcaaggacagcgtcaccctcctgccctgcttttatttcgtcgagttgcctatattggcatcatcggtggttagcctctatttcctcgaactcacagatgtcttcaaacctgtgcactctggatttagctgctatgaccggagtcttagcatgccgtacattgaaccaacccaggaggcaattccattcctcatgttgcttagcttggcttttgctggacctgcaattacgattatggtaggagaaggaattctctactgttgcctctccaaaagaagaaatggggtcggactagagcccaacattaatgctggaggctgcaacttcaattccttcctcagacgagctgtcagattcgttggtgttcatgtatttggattatgctctacagctctcattacagatatcatacagctgtccacaggatatcaagcaccttactttctgactgtgtgcaaaccaaactatacctctctgaatgtatcttgcaaagaaaattcctacattgtggaagatatttgctcaggatctgacctcacagttatcaacagtggcagaaagtccttcccttctcaacatgcaacccttgctgcctttgcagctgtgtatgtttcgatgtacttcaattccacattaacggattcctctaagcttctgaaacctctcttggtcttcacatttatcatctgtggaataatctgcgggctaacacggataactcagtataagaaccacccagttgatgtctattgtggctttttaataggaggaggaattgcactgtacttgggcttgtatgctgtggggaatttcctgcccagtgatgagagtatgtttcagcacagagacgccctcaggtctctgacagacctcaatcaagatcccaaccgacttttatctgctaaaaatggtagcagcagtgatggaattgctcatacagaaggcatcctcaaccgaaaccacagagatgctagctctctgacaaatctcaaaagagcaaatgctgatgtggaaatcattactccacggagccccatggggaaggagaacatggttaccttcagcaataccttgccgcgagccaataccccatctgtagaagaccctgtcagaagaaatgcgagcattcatgcctctatggattccgctcgatcaaagcagctcctcacccagtggaagaataagaatgaaagtcgaaagttgtccttgcaagttatagagcctgagcctgggcagtcaccacccagatccatagaaatgaggtcaagctcagagccatcgagggtaggggtgaatggagaccaccatggtcctggcaatcagtacctcaaaatccagcctggcgctgtccccggatgtaacaacagcatgcctggagggccaagagtgtccattcagtcccgtcctgggtcctcacagttggtgcacatccctgaggagactcaggaaaacataagcacctcccccaaaagcagctctgctcgggccaagtggttaaaagctgctgaaaagactgtggcctgtaacagaagcaacagccagccccgaatcatgcaagtcatagccatgtccaagcagcagggtgtcctccaaagcagccccaagaacactgaaggcagcacggtctcctgcactggctccatccgctataaaaccttgacagaccatgagcccagtgggatagtgagggttgaggctcacccagagaacaacaggcccatcatacagatcccgtccactgaaggtgaaggcagtggctcctggaagtggaaagcccctgaaaagggcagccttcgccaaacttacgagctcaacgatctcaacagggactcagaaagctgtgagtctctgaaagacagctttggttctggagatcgcaagagaagcaacattgatagcaatgagcatcaccaccacggaattaccaccatccgcgtcaccccagtagagggcagcgaaattggctcagagacgctgtccatttcttcttcccgcgactccaccctgcggagaaagggcaatatcattctaatccctgaaagaagcaacagccccgaaaacactagaaatatcttctacaaaggaacctcccccacacgggcttataaggattgagtgatgtccattccatcattagggctactcgcaaaagaccatatgttgattctacctgtgttctgttccagcgaattgggaagtctcaccaagctagattgtctaccatcagcccagaactctgtaacttttcagaactgctatactcaaacttgcagatctcacatcaaggagagggaaaagcacaatgcaagaacctaactaacgtgatgatatgaagagttttcttaagacctgtcgtcaaacttaaaaggttttgcagagggcagtatcaaaagaaagtggttttcttcaaatgtatactattttacttcctgaatgtgccaactttggggatttttctttatagtgagctgtgggaacccagaacacacacgttttccctacagcagaggccatgcagtattatatattcattttgcagaatctgcacctacagctcaatacgggtggtgctgattattatagtacatataccatgtaaactctcaaactctatttagctgtgaaatagtggtgtgcaattccttgttaaagaaatgctactttattaagaagatgctggctgctttgtgttagaataggacaccccgcagcttctctgtagtggctctgtcacagtcaaaaaatgaaaaggtttttgtgcgtttcttcaaaattctgctttcttcaacatcaaaaattgtgtagaaatattttcagtgaaagggaataactagtacttttctgcatagtttttcttctgcttactttttatttaagtataggtactgctaatgaatctgttttcttagtgagtaaatttgcataattttataaatattattttagagaatcttttgaaattgttgtgatcatattttgctttctatggcttctccttaacttattgattaattttttgaagttatagatatgttctcctattttaaaagcaaaaataacaattgacattccttgagcaaaatatactgctgtgaatttgcaaacaagaaatctgagccaaaacttgacattgtgggttacattgccagaaatgttggtcaagtttgcccttagatgtctacaactagctggcataggttgccatcttaacaagtaatctaaaagtcccattcggttctacattattaactttttttttctatatcctgatgaccagtaaattagagccacactggttaagtttgactcgtctctaaaacgtttttgttaattggacaccaagaggaagaatctgaaaaaaaaatgcatgttggtaagtaaaagtatctcacggtacaaattaagaatgactttcttcaaaatatctgaataggtgcagttttagtttaacatgcaaacaaccattgttgctacctatcctgaatcaagccttgagcctaaatcaaagcaaaccaataccattgataagaagaagataaaaacaaaatattttggagtgttttccaacttaaagtatgaagacatactcagttcttggaacttagtattaaaccttttttatgccatttcataagaattccgatatatacttgatgattgccaaggggatgaaaggaaacaacagagatggttgatctgatcttagctcactttccaataacagaaggagttgtttacagatgaatagtatcacatcattatcaatttccacatgaaaaaggtggagctttctagaaaaaccaacctctaaggcattaggaatttagctgaaaccagcagaattgaaaactctggcaataaaacatggactcaaccatatcccttctggcaatttccttctcagagaggggagtgggaataaaatgttgccttccccacttctcaccaccaccgccatcatgacgctcatactggcttttgcctgtttgtagaggaaaaggtgggctggttttagtactctgaaggacaaaaacaagcaaacaaaaacccctgctgcagcatttcaggtgcagtatgatatttcctaatctttcctatttcttaacaaaagattttaaagtacttctctagtcattgaagtttttttttctttacataaatattgatatattctttttctactcaaagtgccaaaggctacagtttttaatgacttaacaaattgtaccacattgttaaggacatataatgatagacactagaactcagacctctgcatgtatatttgataacatgtcttttgtaaaacaaaaattacaaaaaaatttgtttacattccactggtaccttaatttaaaataaatcagactaaaaggtggtatctcttcttagtgttctatttatcttatttgctaatgggagcacttcttcctttgttaggctgtgctttactgataaaaccaagtattgaataaagagagttaattatctttttaaagtaaataaaattatgaaaatatatatagtatatataaagtactgtgtttaaaaaaatgttatgcaatgttttccaaactgataaagtttgtaaagtgctataaatgtattttgttaagtacagataaaagctattgtgtgagtatattgtgctaaaatcatagaaataaagattagatttcttcatcaaaaaaaaaaaaaaaaaaaa

SEQ ID NO: 56838 - DNA, 1445 bp, Homo Sapiens; identical to SEQ ID NO: 31021

SEQ ID NO: 56839 - DNA, 7497 bp, Homo Sapiens
ggagcctggaggactagcgaggaggagttgagagaacggagcggacgccatggcgaccaacatcgagcagatttttaggtctttcgtggtcagtaaattccgggaaattcaacaggagctttccagtggaaggaatgaaggccagctgaatggtgaaacaaatacacccattgaaggaaaccaggcgggtgatgcagctgcctctgccaggagtctaccaaatgaagaaatagtgcagaagatagaggaagtactttctggggtcttagatacagaactacgatataagccagacttgaaagagggctccagaaaaagtagatgcgtatctgtacaaacagatcctactgatgaaattcccactaaaaagtcaaagaagcataaaaagcacaaaaacaaaaagaagaaaaagaagaaagaaaaggaaaaaaaatataaaagacagccagaagaatctgagtcaaagacgaaatctcatgatgatgggaacatagatttagaatctgattcctttttaaagtttgattctgaaccttcagctgtggcgctggagcttcctacaagagcatttggcccatctgagaccaatgaatcccctgcagttgtgctagaacctcctgtagtatcaatggaggtatcagagccacacatcttagaaactctgaagccagctacaaaaactgcagaactgtcagttgtatctacatcagtaatctcagagcagtcagagcagtctgtggcagtaatgccagaaccatccatgacaaagattctggattcctttgcagcagcaccagtgcctactacaacactggtgttgaagtcatctgagccagttgtaacaatgtcagtggagtatcagatgaagtctgtgctgaaatctgtggagagcacatctccagagccatcaaagatcatgttggtagagcccccagtagcaaaagtgttagagccttcagaaacccttgtggtatcatcagagacacctactgaggtgtaccctgagccaagcacatcaacaacaatggattttccagagtcatctgcaattgaagcgctaagattgccagagcagcctgtagacgtaccatcggagattgcagattcatccatgacaagaccgcaggagttgccggagctgcctaagaccacagcgttggagctgcaggagtcgtcggtggcctcagcgatggagttgccggggccacctgcgacctccatgccggagttgcaggggccccctgtgactccagtgctggagttacctgggccctctgctaccccggtgccagagttgccagggcccctttctaccccagtgcctgagttgccagggccccctgcgacagcagtgcctgagttgccagggccctctgtgacaccagtgccacagttgtcgcaggaattgccagggcttccagcaccatccatggggttggagccaccacaggaggtaccagagccacctgtgatggcacaggagttgccagggctgcctttggtgacagcagcagtagagttgccagagcagcctgcggtaacagtagcaatggagttgaccgaacaacctgtgacgacgacagagttggagcagcctgtggggatgacaacggtggaacatcctgggcatcctgaggtgacaacggcaacagggttgctggggcagcctgaggcaacgatggtgctggagttgccaggacagccagtggcaacgacagcgctggagttgccggggcagccttcggtgactggggtgccagagttgccagggctgccttcggcaactagggcactggagttgtcggggcagcctgtggcaactggggcactagagttgcctgggccgctcatggcagctggggcactggagttctcggggcagtctggggcagctggagcactggagcttttggggcagcctctggcaacaggggtgctggagttgccagggcagcctggggcgccagagttgcctgggcagcctgtggcaactgtggcgctggagatctctgttcagtctgtggtgacaacatcggagctgtcaacgatgaccgtgtcgcagtccctggaggtgccctcgacgacagcgctggaatcctataatacggtagcacaggagctgcctactacattagtgggggagacttctgtaacagtaggagtggatcccttgatggccccagaatcccatatattagcttctaacaccatggagacccatatattagcatccaacaccatggactcccaaatgctagcgtccaacaccatggactcccagatgctagcatccaacaccatggactcccagatgttagcgtctagcaccatggactcccagatgttagcaactagctccatggactcccagatgttagcaactagctccatggactcccagatgttagcaactagcactatggactcccagatgttagcaaccagttccatggactcccagatgttagcaaccagctccatggactcccagatgttagcaaccagctccatggactcccagatgttagcaaccagctccatggactcccagatgttagcaaccagcaccatggattctcagatgttagcaaccagcaccatggactcccagatgttagcaactagctcaatggattcccagatgttagcatctggcactatggactctcaaatgttagcttctggcaccatggatgctcagatgttagcgtctggtaccatggatgcccagatgttagcgtctagtacccaagattctgctatgttgggttcaaaatctcctgatccctataggttagctcaggatccttacaggttagctcaggatccctataggttgggccatgacccctatagattaggtcatgatgcttacaggttaggacaagacccttatagattaggccatgatccctacagactaactcctgatccctataggatgtcacctagaccctacaggatagcacccaggtcctatagaatagcacccaggccatataggttagcacctagacccctgatgttagcatctagacgttctatgatgatgtcctatgctgcagaacgttccatgatgtcatcttacgaacgctctatgatgtcttatgagcggtctatgatgtcccctatggctgaacgctctatgatgtcagcctacgagcgctctatgatgtcagcctacgagcgctctatgatgtcccctatggctgagcgctctatgatgtcagcttatgaacgctccatgatgtcagcttatgaacgctccatgatgtccccaatggctgatcgatctatgatgtccatgggtgctgaccggtctatgatgtcgtcatactctgctgctgaccggtctatgatgtcatcgtactctgcagctgaccgatctatgatgtcatcttatactgctgatcgttcaatgatgtctatggctgctgattcttacaccgattcttacactgacacatatacagaggcatatatggtgccacctttgcctcctgaagagcccccaacaatgccaccgttgccacctgaggagccaccaatgacaccaccattgcctcctgaggaaccaccagagggtccagcattgcccactgagcagtcagcattaacagctgaaaatacttggcctacagaggtgccatcatcaccatctgaagagtctgtatcgcagcctgagcctcctgtgagtcaaagtgagatttcggagccttcagcagtgcctactgattattcagtgtcagcatcagatccctcagttttagtatcagaggctgctgtgactgttccagaaccaccaccagagccagaatcttcaattacgttaacacctgtagagtctgcagtagtagcagaagaacatgaagttgttccagagagaccagtgacttgtatggtatctgaaactcccgccatgtcagctgaaccaactgtgttagcatcagagcctcctgttatgtcagagacagcagaaacatttgattccatgagagcctcaggacatgttgcctcagaagtatctacatccttgttggttccagcagtaactactccagtgctggcagagagcattctggagccgccagccatggctgccccagagtcttcagctatggctgtcctggagtcttcggctgtgaccgtcctggagtcttcgactgtgactgtcctggagtcttcgactgtaactgtcctggagccttcggttgtgactgtcccggagcctcctgttgtggctgagccagactatgttaccattcctgtgccagttgtttctgcgctggagccttctgtgcctgttctggaaccagcggtgtcagtccttcaaccttctatgattgtttcagaaccatctgtttctgtccaggaatcgactgtgacagtttcagagcctgctgtcacagtctcagagcagactcaagtaataccaactgaggtggctatagagtccacaccaatgatactggaatctagtatcatgtcatcacatgttatgaaaggaattaatctatcctctggtgatcaaaatcttgctccagagattggcatgcaggagattgcattgcattcaggtgaagaaccacatgctgaggaacacctgaaaggtgacttttacgaaagtgaacatggtataaatatagaccttaatataaataatcatttaattgctaaagagatggaacataatacagtgtgtgctgctggtactagtcctgttggggaaattggtgaagagaaaattttgcccaccagtgagactaaacagcgcacagtattggatacctaccctggtgttagtgaagctgatgcaggagaaactctatcttctactggtccttttgctctggaacctgatgcaacaggaactagtaagggtattgaatttaccacagcatctactctcagtttagttaataaatatgatgttgatttatctttaactactcaagatactgaacatgacatggtaatttccaccagtcctagtggtggtagtgaagctgacattgaagggcctttgcctgctaaagatattcatcttgatttaccatctaataataaccttgttagtaaggatacagaagaaccattacctgtaaaagagagtgaccagacattagcagctctgctcagccctaaagaaagtagtggaggagaaaaagaagtacctccccctcctaaagagacactgcctgattcaggattttctgccaatattgaggatattaatgaagcagatttagtgagaccgttacttcctaaggacatggaacgtcttacaagccttagagctggcattgaaggacctttacttgcaagtgatgttggacgtgacagatctgctgccagcccggttgtaagtagtatgccagaaagagcttcagagtcttcttcagaggaaaaagatgattatgaaatttttgtaaaagttaaggacactcacgaaaaaagcaagaaaaataagaaccgtgataagggggagaaagagaagaaaagagactcttcattaagatctcgaagtaagcgttccaaatcttctgaacacaaatcacgcaagcgtaccagtgaatctcgttctagggcaagaaagagatcatctaagtccaagtctcatcgctctcagacacgttcacggtcacgttcaagacgcaggaggagaagcagcagatcaagatcaaagtctagaggaagaagatctgtatcaaaagagaagcgcaaaagatctccaaagcacagatccaagtctagggaaagaaaaagaaaaagatcaagctccagggataaccgaaagacagttagagctcgaagtcgaaccccaagtcgtcggagtcggagtcatactccaagtcgtcgacgaaggtctagatctgtgggtagaagaaggagctttagcatttccccaagccgccgcagccgcacccccagccgccgcagccgcacccccagccgccgcagccgcacccccagccgccgcagccgcacccccagccgccggagccgcacccctagccgtcggagccgcaccccaagccgccggagaagatcaaggtctgtggtaagaagacgaagcttcagtatctcaccagtcagattaaggcgatcaagaacacccttaagaagaaggtttagcagatctcccatccgtcgtaaaagatccaggtcttctgaacgaggcagatcacccaaacgtctgacagatttggataaggctcaattacttgaaatagccaaagctaatgcagctgccatgtgtgctaaggctggtgtccctttaccaccaaacctaaagcctgcacctccacctactatagaagagaaagttgctaaaaagtcaggaggagctactatagaagaactaactgagaaatgtaaacagatcgcacagagtaaagaagatgatgatgtaatagtgaataaacctcatgtttcggatgaagaggaagaagaacctcctttttatcatcatccctttaaactcagtgaacccaaacctatttttttcaatctgaatattgctgcagcaaaaccaactccaccaaaaagccaggtaacattaacaaaagaattccctgtatcatctggatctcaacatcggaaaaaagaagcggatagtgtttatggagaatgggttcctgtggagaaaaatggtgaagaaaacaaagatgatgataatgttttcagcagcaatttgccctcagagggccgggttaaacggcagggccgggttagacgacagatgaaacaacccgcagcttctcatttgacagtaactcgatgcaattcactttgtggaaccaagccacaaagtgaaaagcatcgaattgcagagaacagtgttatcacatccctacccaacattgggccctccctgcacttgtgggaaggtagtccaaggtacaactatttagcttcccgatttgcttcaaggctctatagctctagattttggtggtagcaaatttatcgggtggagggattgatcggagagggcagatcctcaggttcaacacaagaactggattggaaaaggtcattgtaggttgatgtgagcatcttgggtacatagcccattgcccttaatgatggtttcttactgtttctctgggttgtttgtcagatagcctttaattttaattatttttccttccctttgctaccttggcccttttaaattcttgtgtttaacctaatgctcagccttggtactccattcccttctccttcccctctttgctactattaaaagtcggagaagtggaattcaaacgttgaaatttccacggggctatagttgtatcttaataatgccaagtgtcaaaacaaccccattaaaatgccgcctgattaaataatgtgctgctaaatatagtgcacatgaaaacagcaagactgtatatatatgtaaatatatatatatatctgtatctttgtatgtatctctgtatctgtacctttgctgtatcttttaataaacagtttacttttatttaa

SEQ ID NO: 56840 - DNA, 2760 bp, Homo Sapiens
ttcatattaaaaaaatagctggtaaatctttctaggtagtaacttatccaaacaatactttgagtatcatattttgtgaatgacttgcttaaactgggaaactgaatattctttttaaatcatataattcctgtattaaatgtgaaacacacagtctccaaagtcacctgattctctgtggaaaatgaaaggcattgaaggaaaccagatacattaatacttagttttggttgaaagtgcaacattactgtacttagaaggggcttggtttatttttagatatttaagctatcattaattttagaccaatggctaataataagagagatttttggttgctcatttatggagagacaaagaacagcatggcataaacaaacatcccagaaataaatgaaaagttttaagtgataaaattgtgttttctatgaaccagtgttgtacatgaaccaacattgtgtttcttagctctgacctgtacagtgaggtacctgtcaggacccctagtcttggcactggaaatgacaaagttctcctattactaaattctcatgccttccttttctgacttagtagattgaaattggtaggtactaatgatttatgtttgataaacttaagttctgctgatatcctgttactggtaattctggtaccaaaatttcaaacggtttgattattagtagcattttgagtacctaggtgcatataatacagttagcagacccttacagagtcaaaagagattttggaatctggtgatactgttgtttattacactagcctattacattttctttctttataataactgtttatgtgagtttcattgaaaatcgtggctctattgctttattcatggtttccacaactctttttgtaacaccttaattttctctcttaggtattttcctgttaaataagatatcaaaagcatcaatcacaagacagagaaaacgtattaggaaaaacttgtattagtatattctaaactgaaatggaaaaactcattattcatattttaataaataaaactcccaaatgatcttgctaaattatcccactatttagaagtagaaaataagagaagagtgctttcaaggaaatttgtcatattctcccttctatctagaagttgacaatgaattgcaataaaactaagaaataactgaatgctgaaaaataccatgaattaatgttatggcttctttatttttgtatatccattcccacaaaattgaatttaagattattaatgaaaattctatattaagtaataatgcttgtattagtaatgggcaaagaagtctttctttgttacattaaccgttagtaaaagatgtactttgacatttctgatgtaaaacctatatgtaaatattgtaatttaaatatgattggacagctgttaagttttggggagggaagcagatgccagcgttctctgctgaaaagacaagatggcgcttgacggaccacagcagatggagctggaggaggaaaaggcaggcagtggactctgccagtattatctgtccaagattgaagaactccagggtcaactgcaatataaattggatgggggaaagccacaaggaacagttctgaactccaggtgcatttgcagctgattttgaatgataagacccaaaacctctggaggcggcaggtgcacgggaatgaactaaatgttaaagtgtgcctattacaggaggagctacagctgctgcaggaataggactcctgtgtcagggaagtagtccaggccatgggtaagaagaaagtgttggtcaaggtgcatctcaaggacaagtttgtcatagatgtggacaaaaatatcagcatcagtgatgtgacacccagttccttggtggttctaagaaatgacagctacactttgcacaagatcctacccaacaaggtggactcattggtgtcactgatgatggtgaagaaagtaccagattcagcttatgaaatgattggtagactggataggcagatcaagaagatcaaagaagtgatcgacctgcctgctaagcatcccgagctcttcaaagcactgggcattgcacagcccaagggaatgctgcttggaagagactgttggcctgggctctggctcatcatagggactgtgtacctttattcatgtctctggctctgaattggtacagaaattcattggggaatttctgtgatggcagagaaaatgctcatctgtcatcttcatggatgaaattgactcttttggctcctcagagctggagggggatgctggagggaacagtgaagtgcagcagatgatgcttcgagggtggctttgaggccaccaagagtatcacggtttatcacggctgctaatacgattgatatcctggactcggcactgctttgcccagggcacattgacagaaaaattgaattcccaacctgcaatgagtaggcctggctggtcactttgaagattcattctcagaaatgaacctgacccaggggatcaacctgagaaaaattgctgagcttatgccaggagcatcaggctgaagtgaagggcatgtgcacagaaaccggcatgtatgccctgagtagcgagtccatgtcactcagaaggactttgaggtagtccaaagtcctatctcatgccaaaggacagtgaggaaaaacatgtccatcaagaaactatggaattgagggcacatcctttgtgtgtatccctacaataaaactcagtgggacaagcaaaaaaaaaaaaaaaaa

SEQ ID NO: 56841 - DNA, 5385 bp, Homo Sapiens
tctgccccaccccgtcccgttccgttccgctgcccagtcctgctggtactcactaggtagtagcggcaacggacgccatggggaccgcctcgtcgctcgtgagccccgcgggcggggaagtgatcgaggacacgtacggggcgggcggcggcgaggcctgcgagatcccggtggaggtgaagcccaaggcccgcctgctgcgcaactcgttccgccgaggcgcgggggcggcagcaggggccgggcccgggtcgctgccccgcggggtgggcgcgggcgggctgctgggggccagcttcaagtccactggctcgtcggtgccagagctggagtacgcggcggccgagtacgagcggctcaggaaggagtacgagatctttcgcgtcagcaagaaccaggagttgttgtccatgggccgccgcgaggccaagctggacacggagaacaagcggctgcgggccgaactgcaggcacttcaaaaaacgtatcagaagatacttcgagaaaaagaaagtgctttagaagcgaaataccaagcaatggagagagcagcaacatttgaacatgacagagataaagttaaaaggcaattcaagatttttagggagaccaaagaaaatgaaattcaggacttactgagggccaagagggagttggagagcaaacttcagaggctacaggctcagggtatccaagtatttgatcctggggagtctgattcagatgacaactgtacagatgtcactgctgctggaacccaatgtgaatattggactggcggagccttgggaagtgaaccttccataggaagcatgatccagcttcagcagtccttcagaggccctgagtttgcccatagttctatagatgtggaaggaccctttgcaaatgttaatagagatgactgggatattgctgtagctagtttattacaagttactcctctgttttcacattctctgtggagtaacactgtcagatgttacctcatttatacagatgaaacccagcctgagatggatcttttccttaaggactattcacctaaacttaagagaatgtgcgagacaatgggatattttttccatgctgtttattttccaatagatgttgaaaatcaatacctcactgtaagaaaatgggaaattgagaaaagttctttagttattttatttattcacttaacattaccaagccttttattggaagactgtgaagaagcttttctgaaaaaccctgaaggaaaacctcgattaatctttcatcgtttggaagatggaaaagtcagttctgactctgtccagcaattgattgatcaagtttctaatctaaacaagaccagcaaagccaagatcattgatcactcaggagatcctgcagaaggagtatataaaacttatatttgtgtagaaaagattattaaacaggacatactgggttttgagaacacagacttggagactaaggatttgggcagtgaggattccattccagaagaagatgattttggtgatgttctgtgggacatacatgatgaacaagagcaaatggaaacttttcagcaggcttctaattcagcccatgagttgggatttgagaaatattaccaacgccttaatgatctagtggcagcaccagccccgattccacctcttctcgtgtctggaggaccaggttctgggaagtctcttcttttatcaaagtggattcaattacaacagaagaattcccccaacacactgattctttcccattttgtgggaaggcccatgtcaaccagctcagagtcctccttgattattaaacgactaactctaaagttgatgcagcactcttggtcagtctctgctctgacactggatcctgctaagcttctggaagaatttccacgttggctggaaaaactctctgctcgtcatcaaggcagcatcatcatcgttattgattctatagatcaagttcagcaagttgaaaaacacatgaaatggctgatagatccactgccagtgaatgtaagagtaattgtttctgtgaatgtagaaacatgccctccagcatggaggttgtggcctacacttcatcttgatcccttaagtccaaaagatgcaaaatctattataattgcagaatgccactctgtagacattaaattgagtaaagagcaggagaagaagctagaacgacactgtcgttctgctacaacctgcaatgccctttatgtcacccttttcggcaaaatgatcgcgcgtgctgggagagcaggcaatttagataaaatccttcatcagtgtttccagtgtcaagatactctttcattatatagacttgttctgcactctatccgggagtccatggcaaatgatgtggataaagagctaatgaagcagatcctctgccttgtcaatgttagtcacaatggtgtgagtgaatcagaactgatggaactctatcctgagatgtcctggactttcttgacctcccttattcacagtttatacaaaatgtgtttgttgacttatggatgtggcttgcttaggtttcaacatctgcaggcttgggaaacagtgagattggagtacctggaaggccccactgttacttcttcatacaggcaaaagctaatcaactatttcaccttgcagctaagtcaggacagagtgacttggagaagtgcagatgaactcccgtggctttttcagcagcagggaagtaaacagaagctgcatgattgccttcttaatctctttgtgtctcaaaacctttataaaaggggacactttgctgagttgctgagttattggcagtttgttggcaaagacaaaagtgcaatggcaacagaatacttcgattcattgaagcagtatgagaaaaactgcgaaggcgaggacaacatgagttgcttagctgatctttatgaaaccttggggcgatttctcaaggatctaggccttctcagtcaggccatagtacctttgcagaggtctttagagattcgagaaacagctttagatcccgatcacccaagagtagcccagtccctccaccaactagcaagtgtatacgtgcagtggaagaagtttggcaatgcagaacaactgtataaacaggcgttggaaatctcagaaaatgcttatggtgcggaccatccatatactgctcgtgaacttgaagcacttgcaactttgtaccagaaacaaaataaatatgaacaagctgaacattttaggaaaaaatcctttaaaattcatcagaaagctataaagaaaaaaggcaacttgtacggatttgcccttttacgtagacgggctttacagttagaagagcttacattaggtaaggacacacctgataatgctcggaccctcaatgaactgggtgttctctactatcttcaaaataacctggaaacagctgaccagtttctgaagcgttccttagaaatgagggagcgagttctaggaccagatcaccctgactgtgctcagtctttgaataatctggcagctctatgcaatgaaaagaaacagtatgataaagcagaagaactttatgaaagagctttagatattcggagacgtgcattagctcctgatcacccttctttggcatatacggtgaagcatcttgccatcttgtataagaaaatggggaaacttgacaaagctgtacctttgtatgaattggctgttgaaattcgacagaaatcttttggcccaaagcaccctagtgtagctactgccttggtgaacttagctgttctttatagccaaatgaaaaaacacgttgaagctttgccattatatgaaagagcattaaagatttatgaagatagcctgggtcggatgcatcctcgagttggagaaacactgaaaaatttagctgtgcttagctatgaaggaggagattttgaaaaagctgctgaattatacaaaagggcaatggaaataaaagaagcagaaacatcactcttgggtggaaaagctccttcacgccattcatcaagtggagacacgtttagcttaaaaacagctcattctcctaatgttttccttcagcaaggacaaaggtaatagcagcagttagaattctttgcaaatgtaccttaagacaaaataattaaacatttggaacatttgaatttgaaactttaaaaaaatgttgtacgaaattttactacgtgtgatttaactgctatttgtatgaagttgtattggattacattaagttggaattgtgattatgtctgttttagttgtttaaaagaattttcctattatatggtatccaaggatgtagacacattagaattataagaagacatgaggagcaaatcatgaagagcggattggtctttgttcaacaagagctggcagagtagttaagacaaggagttcaaaaattccatgaatcttggccaggcatggtggctcatgcctgtaatcccaccactttgggagggtgatgcaggaggatcacttgaggccaggagttggagaccagcctggccaacatggtgaaaccctgtctctactaaaaatacaaaaaaaaattagctggacctggtggcgcatgcctgtaatcctagctactcaggaggctgaggcatgagaatcgcttgaactcagcaagtggaggttgctatgagctgagattgtgccagttcattccaccctgggcaacagggtgagactctgtctcaaaaaaaaaaaaaaaaaaaaaaagaattccatgattcttttgagctctcaagagctactttagccttgccattcctcttgcttttcagcagtagtctggcccaattctctacctcaaaggaaagtttcaaggattaaagggttaatgtttatgaacgattcaaattgtcttcagtgaaacacattagtcacaagaatccctgattgctgcactttaaaaaattctttaccttttccttgagcagattggtccagtccctctgctttctgttctgtctacattgtgtattatttattactatatagtatatgtatctgcataatgtctgaagtcattaatgcagtaacaggtcaagctctttagcattctttgacttttcccaaaatatagatatgacattctcctttatcttccttcttagatggcctaaatctgtctcttcatttacctcaaactcaaattagtatgccattttcatactgaaaattaaatatttttatggattttataaatattgcaacattttagatattgttttggaccatttgtgtatttatatataataaaatcatcaatttaatacttgtaagatcctaacatgtattgattgtaaaagtgaaatatgtaatagccacacttcactgttttaaaataaaagtgcaatttcaagttaaaaaaaaaaaaaaa

SEQ ID NO: 56842 - DNA, 4415 bp, Homo Sapiens
atgaagactccctgtattcccagtcctaagcaagggagcaaaggcaggggacagagccctgctgctcaggtgaggggccccacgtggaacgcgccggcgcgggaggggcggcctggcgcaggtcatttgggacatctgcgggttggcgcatgcgcgcgaggtgcgcaggctcgcgcctttttcccttttctaagctttctgtgttacccccggttccgctgtcttttctgtctacagtttgcgatccccgcgtccaggatggagcagctgaacgaactggagctgctgatggagaagagtttttgggaggaggcggagctgccggcggagctatttcagaagaaagtggtagcttcctttccaagaacagttctgagcacaggaatggataaccggtacctggtgttggcagtcaatactgtacagaacaaagagggaaactgtgaaaagcgcctggtcatcactgcttcacagtcactagaaaataaagaactatgcatccttaggaatgactggtgttctgttccagtagagccaggagatatcattcatttggagggagactgcacatctgacacttggataatagataaagattttggatatttgattctgtatccagacatgctgatttctggcaccagcatagccagtagtattcgatgtatgagaagagctgtcctgagtgaaacttttaggagctctgatccagccacacgccaaatgctaattggtacggttctccatgaggtgtttcaaaaagccataaataatagctttgccccagaaaagctacaagaacttgcttttcaaacaattcaagaaataagacatttgaaggaaatgtaccgcttaaatctaagtcaagatgaaataaaacaagaagtagaggactatcttccttcgttttgtaaatgggcaggagatttcatgcataaaaacacttcgactgacttccctcagatgcagctctctctgccaagtgataatagtaaggataattcaacatgtaacattgaagtcgtgaaaccaatggatattgaagaaagcatttggtcccctaggtttggattgaaaggcaaaatagatgttacagttggtgtgaaaatacatcgagggtataaaacaaaatacaagataatgccgctggaacttaaaactggcaaagaatcaaattctattgaacaccgtagtcaggttgttctgtacactctactaagccaagagagaagagctgatccagaggctggcttgcttctctacctcaagactggtcagatgtaccctgtgcctgccaaccatctagataaaagagaattattaaagctaagaaaccagatggcattctcattgtttcaccgtattagcaaatctgctactagacagaagacacagcttgcttctttgccacaaataattgaggaagagaaaacttgtaaatattgttcacaaattggcaattgtgctctttatagcagagcagttgaacaacagatggattgtagttcagtcccaattgtgatgctgcccaaaatagaagaagaaacccagcatctgaagcaaacacacttagaatatttcagcctttggtgtctaatgttaaccctggagtcacaatcgaaggataataaaaagaatcaccaaaatatctggctaatgcctgcttcggaaatggagaagagtggcagttgcattggaaacctgattagaatggaacatgtaaagatagtttgtgatgggcaatatttacataatttccaatgtaaacatggtgccatacctgtcacaaatctaatggcaggtgacagagttattgtaagtggagaagaaaggtcactgtttgctttgtctagaggatatgtgaaggagattaacatgacaacagtaacttgtttattagacagaaacttgtcggtccttccagaatcaactttgttcagattagaccaagaagaaaaaaattgtgatatagataccccattaggaaatctttccaaattgatggaaaacacgtttgtcagcaaaaaacttcgagatttaattattgactttcgtgaacctcagtttatatcctaccttagttctgttcttccacatgatgcaaaggatacagttgcctgcattctaaagggtttgaataagcctcagaggcaagcgatgaaaaaggtacttctttcaaaagactacacactcatcgtgggtatgcctgggacaggaaaaacaactacgatatgtactctcgtaagaattctctacgcctgtggttttagcgttttgttgaccagctatacacactctgctgttgacaatattcttttgaagttagccaagtttaaaataggatttttgcgtttgggtcagattcagaaggttcatccagctatccagcaatttacagagcaagaaatttgcagatcaaagtccattaaatccttagctcttctagaagaactctacaatagtcaacttatagttgcaacaacatgtatgggaataaaccatccaatattttcccgtaaaatttttgatttttgtattgtggatgaagcctctcaaattagccaaccaatttgtctgggccccctttttttttcacggagatttgtgttagtgggggaccatcagcagcttcctcccctggtgctaaaccgtgaagcaagagctcttggcatgagtgaaagcttattcaagaggctggagcagaataagagtgctgttgtacagttaaccgtgcagtacagaatgaacagtaaaattatgtccttaagtaataagctgacctatgagggcaagctggagtgtggatcagacaaagtggccaatgcagtgataaacctacgtcactttaaagatgtgaagctggaactggaattttatgctgactattctgataatccttggttgatgggagtatttgaacccaacaatcctgtttgtttccttaatacagacaaggttccagcgccagaacaagttgaaaaaggtggtgtgagcaatgtaacagaagccaaactcatagttttcctaacctccatttttgttaaggctggatgcagtccctctgatattggtattattgcaccgtacaggcagcaattaaagatcatcaatgatttattggcacgttctattgggatggtcgaagttaatacagtagacaaataccaaggaagggacaaaagtattgtcctagtatcttttgttagaagtaataaggatggaactgttggtgaactcttgaaagattggcgacgtcttaatgttgctataaccagagccaaacataaactgattcttctggggtgtgtgccctcactaaattgctatcctcctttggagaagctgcttaatcatttaaactcagaaaaattaatcattgatcttccatcaagagaacatgaaagtctttgccacatattgggtgactttcaaagagaataaaacactatttcccttgccttttcatactagggcagtatctcctctagctagtgcccatacagaaaattctatcaccatacaaaatttaatgcagtatttatgttttaaagcacaggtgtaccgaaaactgtgaaaagtctgaatttatgggttctatgcatgcatttttgcctaacctagagaaagagtttgataaatttttaccagctttgaagatggattaacttttgactttgagctttaaacttttaagtcagacatttcaggactaatttgattttgtagatatcattgtaagaactttatttgaaagactgaataaagggatttgatttgttttcatcatttaagcacagtcttgtgatgatgagaacataagtgtgattcttttctgtattttgaggtccctaatccaaagcccattttgctaggattttttctgctatcagatgtgttttcactctaaacctagtcttttatgacatgaattgattacttcctgttaattttctatcctcccttactatcctccttttttgttttcagtattcagtatttcagtattctagagtagattttgatataaaagaaaataattcttacatcatcttttgcaacaaattttgttttctgaattgataataaatttaaaaagttgattcctattttcacatatgttcatatgcccctatgtttgggggtatcactcagttttcccttttttgtgtaaagatgttttgtaaaacaaaattgtctcaaagtgattatattatatatataaaaagtaacagattttaacaaaggttaaaagattcttggggtaacagattcttctggggcttggaaatcttccatttctcttgagggttttttttaatgagtgttaaatatgttaaaatttttatttctacctcatgtgtttttttaaattattacttgaagttttttatttaataaattttttctactaatgg

SEQ ID NO: 56843 - DNA, 2238 bp, Homo Sapiens
gccggagccaagggagtccaggctgccgggggctgcagacatggagggccagagcagcaggggcagcaggaggccagggacccgggctggcctgggttccctgcccatgccccagggtgttgcccaaactggggcaccctccaaggtggactcaagttttcagctcccagcaaagaagaacgcagccctaggaccctcggaaccaaggatcactgtggtcacatggaacgtgggcactgccatgcccccagacgatgtcacatccctcctccacctgggcggtggtgacgacagcgacggcgcagacatgatcgccatagggttgcaggaagtgaactccatgctcaacaagcgactcaaggacgccctcttcacggaccagtggagtgagctgttcatggatgcgctagggcccttcaacttcgtgctggtgagttcggtgaggatgcagggtgtcatcctgctgctgttcgccaagtactaccacctgcccttcctgcgagacgtgcagaccgactgcacgcgcactggcctgggcggctactggggtaacaagggtggcgtgagcgtgcgcctggcggccttcgggcacatgctctgcttcctgaactgccacttgcctgcgcatatggacaaggcggagcagcgcaaagacaacttccagaccatcctcagcctccagcagttccaagggccgggcgcacagggcatcctggatcatgacctcgtgttctggttcggggacctgaacttccgcattgagagctatgacctgcactttgtcaagtttgccatcgacagtgaccagctccatcagctctgggagaaggaccagctcaacatggccaagaacacctggcccattctgaagggctttcaggaggggcccctcaacttcgctcccaccttcaagtttgatgtgggtaccaacaaatacgataccagtgccaagaaacggaagccagcttggacagaccgtatcctatggaaggtcaaggctccaggtgggggtcccagcccctcaggacggaagagccaccgactccaggtgacgcagcacagctaccgcagccacatggaatacacagtcagcgaccacaagcctgtggctgcccagttcctcctgcagtttgccttcagggacgacatgccactggtgcggctggaggtggcagatgagtgggtgcggcccgagcaggcggtggtgaggtaccgcatggaaacagtgttcgcccgcagctcctgggactggatcggcttataccgggtgggtttccgccattgcaaggactatgtggcttatgtctgggccaaacatgaagatgtggatgggaatacctaccaggtaacattcagtgaggaatcactgcccaagggccatggagacttcatcctgggctactatagtcacaaccacagcatcctcatcggcatcactgaacccttccagatctcgctgccttcctcggagttggccagcagcagcacagacagctcaggcaccagctcagagggagaggatgacagcacactggagctccttgcacccaagtcccgcagccccagtcctggcaagtccaagcgacaccgcagccgcagcccgggactggccaggttccctgggcttgccctacggccctcatcccgtgaacgccgtggtgccagccgtagcccctcaccccagagccgccgcctgtcccgagtggctcctgacaggagcagtaatggcagcagccggggcagtagtgaagaggggccctctgggttgcctggcccctgggccttcccaccagctgtgcctcgaagcctgggcctgttgcccgccttgcgcctagagactgtagaccctggtggtggtggctcctggggacctgatcgggaggccctggcgcccaacagcctgtctcctagtccccagggccatcgggggctggaggaagggggcctggggccctgagggtggggtaggcagatgggccaaggtgaccaccattctgcctcaatcttttgcaagcccacctgcctctctcctgctgctcctccagctgtatctgcacctgcctctctgtcctggccaggggtggacaactggggtcccccaaaactcagtcctggcacctcaactgtgacaatcagcaaagccccacccaggcccccatctgggatgatgggagagctctggcagatgtcccaatcctggaggtcatccattaggaattaaattctccagcctcaaaa

SEQ ID NO: 56844 - DNA, 5583 bp, Homo Sapiens; identical to SEQ ID NO: 29807

SEQ ID NO: 56845 - DNA, 3549 bp, Homo Sapiens
gtcttcccggcgcccaggcttgggctcatagggagaaaggaagctgcgctgcattctgcgggacgaaccctgctccgcgcgagaatttttttgattccttcttatttggagaaatctccagctgctctgatgatagcctaagaagactgcatgctgcttcctctcgatgccaagccagaccctctcacaacctcggatctcagtccttcatggagacctggtcccagcaggaatggcagtgcaggaaattggcgcccagatggttcttccatgtgaagttgtctcgggctctgggctgacgagagaacacctggtaaccaggttagccctctgtcagtcacccagggcagggcagcatggtgcggattcagaggaggaagcttttggcatcttgcctgtgcgtcacagccaccgtctttctgcttgtcacactccaggtcatggttgagctggggaagtttgaaaggaaggagtttaaaagttccagtttgcaagatggacatacaaaaatggaggaagcacctacgcatcttaattcatttcttaagaaagaaggattgaccttcaacaggaaaagaaaatgggaattggacagctaccccattatgctctggtggtccccgctgacgggggagactgggaggttaggccaatgtggagcagatgcttgtttcttcaccatcaaccggacctacctccatcatcacatgaccaaagcattcctcttctatggtactgactttaacatagatagcttacctctgcctcggaaagcccatcatgactgggctgtttttcatgaagagtccccgaaaaacaattataagctctttcataaaccagtgatcaccttgttcaactacactgccacgttcagcaggcattcccacttgccactaactacccaatacttggagagcattgaagtcctgaagtcactccgatacctagttcctttgcagtccaaaaacaagcttagaaaaagacttgctccgctggtgtatgtacagtcagactgtgacccaccatcagacagggacagctatgttcgcgagctgatgacttacatcgaggtcgattcctatggtgaatgtttacgaaacaaagacctccctcagcagctgaaaaatccagcctctatggatgccgatggcttttataggatcattgcacagtataagtttatcctagcttttgagaatgcagtttgtgatgactacatcactgagaagttctggaggccactgaaactgggggtagtccctgtatattacggatcccccagcatcacagactggcttccaagtaacaaaagtgctattcttgtatcagaattttctcaccccagggaactggcaagttacatcagacgactggattctgatgacagattgtatgaggcctatgtagaatggaagctgaagggtgagatctctaaccagcgacttctgacagctctcagggaacggaaatggggagtgcaagacgtcaaccaggacaattacatcgatgcatttgagtgtatggtgtgcaccaaggtgtgggctaatatcaggcttcaggaaaagggcttaccacccaaaagatgggaggcagaagatacccacctgagttgcccagagcccacagtgtttgctttctcaccactccggactccacctttgagctctttgcgagagatgtggatttccagctttgaacaatccaagaaagaagcccaggcactaaggtggctggttgataggaatcaaaacttttcatctcaagagttttggggcctagtattcaaggactgatttcaaaaatgatcagaatgaaacagactagagccttcttgaggtttattttctaggttgccttaatatttgaacataatagctattctgttgactatccatcaggataataattagttgctgcagtactcataatgagccctttcaaggaatagatgtaaattacccttaggggtagccactatattttttatactaaaaaaggaaatatttcttatggacactggttatcttccatgtccgtgtctgtggacccacatacttactgccttttgtggaaattcacctagagtgagtactttccttgtgcaatggagggagacgatctagctatagattcttgatactcacctcactctcaacagcttattggtatttggcaaacctggtatcctgcagccgagcatgaacatgaaatacattagaacttggcaatgagagatcccatctgttggtttccagggatgtaagtgagtaataaaagctgtttcaagtttatccactatccactcttcaagtgaaaagaacttatgtgtgtctaccttcttctccataccctgagccacctctctcactttctttagttgtgccttgccctatcgcctcccattttcccttcaaagtagaatgtcttgtaaagacacagtaactcctgtgtgttttgattagtgagatgttaccacttaccccttctgctgcgcagaataatattaagaattgctatgcttatgattcaggctggacagcctggacattttgagcagcgcgagagtagaagtgaatacccccaggaactccaattgtgctgaagctgatttgtctgttcgtaggatgatgtgcagcctgtcacagtggcagccacaggcattcagtttgtgggcatttcctgtcatttcggatcctgctatagggaaggttcagctctcctgtctggggcatctactggagcacctcagaagacaaggaggaaaacactggctcatgttttctttccatgtgagggaggggaggtttctagatgatactaaaagcctgttgccactgttgtgtcatgatttccattcttcatcatggaaagccacaagcctcagaaggcagccagaggacaggaagagtctgtgatgctcatgtctgtgtcatggcatgagggggaattgacgagtgcttgcttagcatcagctctcattgtattgaaggctgtgcccttggtgtgcttagcagtgagcagcgtcttcattaggtagctctggctgggctttgtcagccagcgtgtgagaaaggagaaccaaaaccaatacctccttatagaagccagaaggatcacattggatgagagaaggtgtctataactgggttcttcccaatcccagctctttcattaactaaatatgatcttggacatatctcttaacctccatcggccttagtttttgcatccaaaaagaagtgattgggctggtcttggaaggtttttttcttttttttcccctgtgtaacattcttcattgttcatcaacatttaagaaatttaattttgtagatgtttttactaaagagggtaacaaactattttggaactgctgtatgttattcaagggaagcacgctgtttggaggaaggagcatacttaatgggtagtattgaggatgaaagggaatttctctctctgccattttatttgataatattaaagaaataaagactggaaagggggattccttgttaaaggtcagattttaaattgcatataaaa

SEQ ID NO: 56846 - DNA, 4685 bp, Homo Sapiens
gcggcgccacaggaacgatgcatgccgggaccgggaagattcagtctctgaacggcccggagtagtcgtctttccccttctgactgccgccacgctgcagtccagaatatttgaagatcaaaccgaacttgagagactaacgagaacggtccctttttattcctaacagattccttccgtggcaaagtaacccgtcgtcttccgtttccggttgcccggttgccctgttgccgtggtaaccgcacgcataacagccgtggtggttatggctggtctgagcggcgcgcagatccccgacggggagtttaccgcgctagtgtaccggctcatccgcgatgcccgctacgccgaggcggtgcagctgctgggccgagaactgcagcggagccccaggagccgtgccggcctgtcgctgctaggctactgctactaccgcctgcaggagttcgcgctggcggccgagtgctatgagcagctgggccagctgcacccggaactggagcagtaccgcctgtaccaggcccaggccctgtacaaggcctgcctttatccggaggccactcgggtcgccttccttctcctggataaccccgcctaccacagccgggtcctccgcctgcaagctgccatcaagtatagcgagggcgatctgccagggtccaggagcctggtggagcagctgctgagtggggaagggggagaagaaagtggaggcgacaatgagaccgatggccaggtcaacctgggttgtttgctctacaaggagggacagtatgaagctgcatgctccaagttttctgccacactgcaggcctcgggctaccagcctgacctttcctacaacctggctttggcctattacagcagccgacagtatgcctcagcactgaagcatatcgctgagattattgagcgtggcatccgccagcatcctgagctaggtgtgggcatgaccaccgagggctttgatgttcgcagtgttggcaacaccttagttctccatcagactgctctggtggaagccttcaaccttaaggcagccatagaataccaactgagaaactatgaggtagctcaagaaaccctcaccgacatgccacccagggcagaggaagagttggaccctgtgaccctgcacaaccaggcactaatgaacatggatgccaggcctacagaagggtttgaaaagctacagtttttgctccaacagaatccctttcctccagagacttttggcaacctgttgctgctctactgtaaatatgagtattttgacctggcagcagatgtcctggcagaaaatgcccatttgacgtataagttcctcacaccctatctctatgacttcttagatgccctgatcacttgccagacagctcctgaagaggctttcattaagcttgatgggctagcagggatgctgactgagcagcttcggagactcaccaagcaagtacaggaagcaagacacaacagagatgatgaagctatcaaaaaggcagtgaatgaatatgatgaaaccatggagaaatacattcctgtgttgatggctcaggcaaaaatctactggaatcttgaaaattatccaatggtggaaaagatcttccgcaaatctgtggaattctgtaacgaccatgatgtgtggaagttgaatgtggctcatgttctgttcatgcaggaaaacaaatacaaagaagccattggtttctatgaacccatagtcaagaagcattatgataacatcctgaatgtcagtgctattgtactggctaatctctgtgtttcctatattatgacaagtcaaaatgaagaagcagaggagttgatgaggaagattgaaaaggaggaagagcagctctcttatgatgacccaaataggaaaatgtaccatctctgcattgtgaatttggtgataggaactctttattgtgccaaaggaaactatgagtttggtatttctcgagttatcaaaagcttggagccttataataaaaagctgggaacagatacctggtattatgccaaaagatgcttcctgtccttgttagaaaacatgtcaaaacacatgatagtcattcatgacagtgttattcaagaatgtgtccagtttttaggacactgtgaactttatggcacaaacatacctgctgttattgaacaacccctcgaagaagaaagaatgcatgttgggaagaatacagtcacagatgagtccagacaattgaaagctttgatttatgagattataggatggaataagtagttatgactgatagtggcttttttcaaaatggctttcttacgtaccacacttttttttatctgtatttagccttggcatctttatatttgtcttattttgaatcttatccactttgtaagaacaagtttatgtttgagcaactttttcatttaatccagaagggtagggactatgcagtgtaagctgcatcacttctgctttcttcctactagtgacaatcatctggtcttgccctcaagcaacaattgctagagtaacatctttgtataagcaagtaaccccagatagagttgacgtttcagctttgggctgtcaaaagggtatgtcatggaccaaagcactgttagtacgggtatgtttgcatttggtcactgatatgtaaatgactgctagcccacggctggaccacttctcaatcagcaaataaagccatgtctattttgctatctcagcatagactatgctgtctgataaatctaattcttaactctatttctccagttttttagtcctttaactttctggattgcaacgaagtctagtttagacctctaagcccttttagaagtacaagtataatgggaatttcttttcttggttcttttcaggttatgaggtttggtcagtgacaaaattttttttcataatttggttgattggttgcttcttaagttttataataaacgtttttcttcatgttctatttttgattttacagaaatgattttgcctccttgtggatactgacatatattaagtgtggaagcttattaatatttttggttttttaaaaactgaaatttttaatttttactttttaattttttaggaaaaaataagcactgaactgagaatgagaagaataaaagtatgagttccataccttctaattttaggctgtcagaaattcctttattctttgggatttcacaatcatttgaactatcagaagcctttacaattacttttagctgtaacatccgattctgtataagccacatagaaaaaagttgcctttctttttttatgacctggatatataagcaaatcagctaggaaatatataattgtattttatattaatgttttctaggattttggcttacagtaaatgttaacccctatggtaagtgattgttattgttggatgttatactgattattaataagaaatttggatttttgcctttttacctggaatttttgcttacagccgtagctatgaatatatatagggtggtccccagtctctgttatggttgcgcataaattaataattttataagtatttagaaatggtataattctcttaacttcctctttcagtttttgtactaatgtttgtttttgttcgggaagaggagatttgcttttaatccttccaaaaaatgatgaaccaccgttccattcagtagtttgacaagctgttataatgtgtattttttcctcaattattcttgaaatatttagagcctctcctgcttctaacatgaaggcctttagatgccagtctgccagaaatctggaaacagaggaaccggtgaagtgaagatgtaatggagatttagctaatgatgtacttcacaatccaccttggatctcctgcatgtccaaatctcagtagttaatcaagtgtctgctgccattaacagaacagaagtaatggataacagaatggaaataagagatgccagaactacttccataactaactcaccaaatcaaatcatcagtcctcatattcttgttttatttaatacaaggagaagaggccatgcactttccaaaaggtcaaagccacatagaataggaaggcaatctctagtttaaagctttctcttggagtgttttctccccctgtcttcaaagggtctacttgagagatagtggtgtttactgctgcagcatgtatcacaagataagaaatgaaaaatcaatctttcttaccaccctgttctctttcccttttttatcttttcccttttgtcaattatagaattatagggacatttttctctgatagctggaagttgaacctcaaccaggtataaaagatgcataacaaccttttagcagtaagtgtcaagtgagtgagcactatgattatcaaggtgactttggaaaccttttaaaaatgcatttttgcaaaacaagataacatatattgataaaaagtgactctcagattggtaatgccagaaaaaattttaagaggactcaccaaaagtactagatctatgtaagttgtagaatagagtgaagtttttttatatatttgtggtagcctccatcttttaaactttttgaactcagtagaaaaacagactgaaattttaaagacatgcagtatttgtatcattttaaattctgtaacactgggaattaaatatactcaactttagaggaaaaaaaaaaaaaaaaa

SEQ ID NO: 56847 - DNA, 6604 bp, Homo Sapiens
gcctgcggagaaaagctgggaacggccgcttccggcatgttcatctctggacgaagaacggccgacaagtggagggcggaggagagactccaatgcccagcgggcagtgcgcgggcggcgcttgcgcgatgcgcggacgggggggcggtcgggccatttaaatgtgtgtttgtgggtgaaatggctgcgcaggtcggagcggtgcgcgtagtacgggcggtggcggcgcaggaggagccggacaaagaggggaaggagaaacctcatgctggggtctccccgcggggagttaaacggcagcgccgatctagcagtggggggtctcaggagaagcgggggcggccgagccaggagccccctctcgctccccctcaccggcggcgtcgcagccgccaacatcctgggccgctgccgccaacgaatgcagccccaactgtcccaggccctgttgagcctcttctcctgccgcctccgccgccaccttcgctggcacccgccgggcccgctgtcgctgcccctctcccggccccaagcacctcggccctcttcaccttctcgcctctgacggtgagcgcggccgggcccaagcataagggccacaaggagcggcacaagcaccatcaccaccgcggccccgatggtgatcccagctcctgcggaaccgatctcaagcacaaggacaagcaggaaaacggcgagaggactggaggggtgcctctgatcaaagcccccaagagagaaacaccagatgaaaatggtaaaacccagagagccgatgattttgtcttgaagaaaataaagaagaaaaagaaaaagaaacaccgagaagacatgcgaggaagacgccttaaaatgtacaataaggaagtacaaaccgtctgtgctggcctgacccgcatcagtaaagaaattctcacccaaggacaaataaatagcacttcaggacttaataaggagtccttcaggtatctgaaagatgaacagctgtgccgattaaatttgggtatgcaagaatatcgggtaccccagggagtacaaacaccttttatgactcaccaggaacattctattcgtagaaatttcttaaaaacaggtactaaatttagcaactttattcatgaggaacaccagtccaatggtggtgctcttgtccttcatgcttacatggatgaactctcatttttgtctccaatggagatggagagattttctgaggagtttcttgctttgacattcagtgaaaatgagaaaaatgctgcttactatgctttagcaatagtgcatggagcggctgcttatctcccagacttcttggactactttgcttttaatttccccaacactccagtgaaaatggaaattctgggcaagaaagatattgaaacaaccaccatttcaaattttcacactcaggtcaacaggacatactgctgtggcacctaccgagcaggtcctatgcggcagataagtctcgttggagcagtagatgaagaagttggtgattatttcccagagttccttgatatgttagaagaatcaccatttctgaaaatgactttgccctggggtacactttctagcctccgactccagtgtaggtcccagagtgatgatgggcctataatgtgggtaaggccaggagaacagatgatccctacagcagatatgccaaagtcacccttcaaaagacgacgatcaatgaatgaaataaaaaatctccagtacctacctcggaccagtgaaccccgcgaagttctctttgaagataggactagagctcatgctgatcatgtcggtcaggggtttgactggcagagtacggctgctgttggagttttgaaagctgtacaatttggtgaatggagtgaccaacctcgcataaccaaagatgtgatttgttttcatgctgaggattttactgatgttgtacaaagacttcagttagatcttcatgaacctccagtttcccagtgcgtacagtgggtagatgaagctaaactaaaccaaatgaggcgggaaggcattcgttatgctagaattcagctttgcgacaatgatatctacttcatccctagaaatgtcattcatcagttcaaaacagtttcggcggtgtgcagcttagcctggcatataaggcttaaacagtaccaccctgttgtggaagccactcaaaacacagaaagcaattctaacatggactgtggtttaactggaaagcgagaattagaagttgactcccaatgtgtgaggataaaaactgaatctgaagaagcatgcacagagattcagctgttaacaactgcttcatcatctttcccacctgcatcagaacttaatctacagcaagatcagaagactcagcctattccagttttaaaagtggaaagtagactggactctgaccagcaacacaatctgcaagaacattcaaccacttctgtgtgatatgtacatattcaaacacattttttaacttttttaaattttgatgtgaagttatagttttataactggcttaagttaagttttattggagaaatcttgcctataattctataaagagaaatgacattccacaaatgtcaagcatatcttttttacacagattatgcaaagttaagagttgtatcttatcccgttagtacagtatgtaatagtgggtctgctgctactttctgttttaaggtgtgaggtaacaattcaatctcttcttcaaatcaaaatgagaattctctggaataacagattcttgtttggtaaattattcacttcccttaattttatcttgccttgtctcttgccatatttgctgtttttatggataaataagatttatggtttagtacttgtgtctttatggcacaggttcaatttctacagtgaaaatggcataggttgcaggaaagaatttctgcatctggtacatgggcaagtaagttatttagttctaaccacaaataacaagtagtttccaaggaaatttcagtggctctctggtttcttaacaaaagagaaagcacagcactttctgatccaaactgtcttttttttgtatctgttatttaaagcccagtggatatttcaattaaaaaaaaaatctaaagatgaatagtccttggtcattcattatccatggctcattaatctcttctagaatatatgctaactgttgaagatattttgggtaaaagagataatgttgacatgatactctattgttctgcttcctggcatcctcacattttgtggggataattttgcttcctaaactgatcacaactattaaacttagagaataataatagtctttctgatgaggctgccatattttgagcatcaatcttatgataaactattcttgtcacttggcatcaacctcttcatgataaatatctactactgagacacttcaattcacagttttaactggtgaatacctgggtttatttactattactctgtgttgctattttctaagaaagaatacagcactagacttcatcctagagtttcaggtaggctaatgcttagtgcctgagtatttaaattttcttttcaaacaggcacagttcacattgctagtatggtcctaactttctgttattttagaatgttaacatgattcacattatactttctcttagttaataatacagtaggccttttgtttattaatggaagagtactccccacacctaagaccagattcttatatctccctggttacagtgcaatttggagattttttttttttcctggatggtaagatttgaaatatttacattaacataggcaaaaaaaaaaaaaaatacaagatgctgctttattatgtctgtcaccatgaaaacttagctgcatcttttgaaatatcaaatatgaattttctctaaaatattctgaaataggttaaatcttatataaatattactttgtgcaatattgttgtgtagttaaatgcatattagcaaagtatagaggtcactgtgtaaaccgatagaaaagtaaccatcagcaaatactgcagtgattagttagaatctgtattattccttatatatatgtatatgtatgtattctctgttacaaaggatgaagacaaatagggatacatttcaatgtaaaccatttatgaattggaagtgatgttggctttagttatctttgtaaataaggtaattagaatggtatgaaaggtaatgtgattattgcaggggtgtttttaaatcttgggtataaattctagggtaaattccagtttatccagactagtttttaacgggacctgcctttgagggtgttttttgttattttgttggggaggggtttaatcacaaagtgtgtgggtttgggttatttcttgtttttatttttctgtccagaagagctttaccaggctgtgcaaagtaaaattcttctcaggcaacatttgcttttaaaaataatcatgaagagaaggctgttaaagcaaaaattttttttttttaattttttcttgtcttccaagatccgatttccccatctcccacttgccatccagcagatgccatctgtcatccaagctggtcattgctaataaacaaggagtctgtctcctgacggccagcactgtgtattatcactcaggaaccagcggatctgcaaagacctacaatcaaaagcaaatccccattttccttttataaaacattctaccctcacctccaatataaacacattaaaagagtacaataaaaatgtttaaaatcatgtactaataaattcattgtatgttagaattgcaatagaatgaagagaaacatttagctagtaacgtgatctgaaaactgaatgtcctatgtgagtattagattttaatagcatgctttaaagactgatgagtataaaagcagaagttttgcgttttttactgctttcaaagctgtatcctagtttagtgatacaaatgattgcaatttttctaaatcattaaattatttggtttggtggagtgaggcatggagcaatctggcgtcttctgatttgttaaagtagtgatggcagtgaagttgtaactgaaatttaagctgatcttcctttttggtatattatccgttgtgccagctcttgagattacttgcacaatgtggctataagttttaatattttgtggagcagagggatggtttttaaatgtgcttatggaaaggacccaataaatgaatattcctaacttagtaaagtagaataatttcatggtattcattaaaaagcataaaagtcttcctcttgccccagaagtaattctctataccaagatatgctaggagtaggatgatgattcaaagtggtaacccaaattcataaagcaataataataaaaacctatatagtatgttctctcctccaaagttttaactctaaaaattggttcctaggtttaattgtacctttaatttgcttattcagtacttagaatttgtttaactggtacttttattattttttagtgaaagacttttgaaaagtgccctttccccttaagagacagttggaataccagttgactaatattacaagctcttgtagggggaaaaaggagcttattaaagttgtttactaaactttaggaaaagatgtcttgcatcagtcttactaggcataaaagtcacacttaatgactggaaaaaacttgcttattgcctttccctatataaatattaattgtctagaatgaaagctaatataggaacaagactcccaaatccatgaaaacgcttagtgaatatattcttaatcattaataaattagcccattatattttcatctgtatttgccataaaaaatttatttgcatttatgcctttaggataattttgtatctttctaatctgttttatcattgctacaggtttttaaaaaagaacctttcactagctagcacatgccagaggttcacatctgttttgtttttcaaacaggtcgtagctgtatttattggccatgcaagtagaggaaatgcacagtacaaatgtttttctttagcacgtaagggacctatccttgtcttgaaagtttgttgctttaaaagcaagtatctctccataaatattatggccttccattttcttcatacattttttaggatccacttgtgcatgtagttgagaccactgtctcttaaaatatagcacttttcaattctctctaaagaaatacttatgtactactatcacatgttgtaaattttcatgtaatagtgttttctgtgagtaaactccattttgattggcagctaagactttttttcctgtggcttttatttatctaagaggtctttgcatatagatgaaatgtatatttgcctggcggactatttgcgttgtgtggccttagtttgtttattgacattaacgagtgttttaaaaaggtttttaatgaatagtcttaaatctaaatttgtgtgaataatccttttaacacagtgcttttttgtagctgtctaagtgtgttaaattgttaagctatttctttgtaaaataggacaatggaatgcatagtttttttttttcctgtaaagtatttttttaataaaaaaagtctgatttgtcctttaaaaaaaaaaaa

SEQ ID NO: 56848 - DNA, 2774 bp, Homo Sapiens
atacccaagtcggtgccactagcccaggcagagcccggcgccgcactagcgcttatctccgggccgcggctgctgccctccctcttctgcctcccctcctcagaatgccagcaacaaccctacccctgccaacgcggccaagagccccctgctcaactcacccacagtggccaaacaaatcttcccctggatgaaagagtctcgacaaaacacaaagcagaaaaccagcagctccagctcaggcgaaagctgcgctggcgacaagagcccgccggggcaggcttcgtccaagcgcgcgcgcacggcctacacgagcgcgcagctggtggagctggagaaagagttccacttcaaccgctacctgtgccggccgcgccgggtggagatggccaatctgctgaacctcactgagcgccagatcaagatctggttccagaatcgccgcatgaagtacaaaaaggatcagaagggcaagggcatgctaacgtcatcggggggccagtctccaagtcgcagccccgtgccccccggagccggtggctatctgaactctatgcattcgctggtcaacagcgtcccgtatgagccccagtcgcccccgcccttctccaagcccccccagggtacctacgggctgccccccgcctcctaccctgcgtccctgcccagctgcgcacccccgccacccccacagaagcgctacacggcggcaggggcgggcgcagggggcacccccgactatgacccgcacgctcatggcctgcagggcaacggcagctatgggaccccacacatacagggaagccccgtcttcgtggggggcagctatgtggagcccatgagcaactccgggccagccctctttggtctaactcacctcccccacgctgcctcgggcgccatggactatgggggtgccgggccgctgggcagcggccaccaccacgggccggggcctggggagccgcaccccacctacacggaccttaccggccaccatccttctcagggaagaattcaggaagcacccaagctcacccacctgtgatagtgggcttggggctacgcgccaggagagtctccccccacccaccttttttctttggttgcttttttttttttttttttttaggttcttcctgccctttccttccttccttttctctcttctccgccccgcactccgtttcccggtttcccccctcgttggtaaggcgtttttatagtttatgtgacgtagcaatcttggttgctggaatggctgtatcatagcgatatttatctcttcctgctcctcgataggccactggccctgcaccctttaccttctccactctttgatcagaaacagggtatatgaacaaattttctagtcgagttttcaatgtgaatttgttcttacattatggctcccgaggggaagcgattactttttttaattttaaatttttttttttaattgcacttcttgtaaagagtgagaaaaaaaatcaaaggcgctttgaaacaggggctctctgtgcaaggatgactaagtgtacgtctttccgtgtgtgtatgctggtgaacagtcagatttatttatatttttttgcaagcattgaataatctaagttttaaatattatttatccccatccgttcgtatttatattaaagaattctgtaccctgatggttcagaagggttcttgggccttttgttcaattgtgtattggcgtacttagaattttttttatttgaaagagaaatataattcctttaaacggtaacgatgcaataaaaccagagaagatccagcttttgaaaacagtgatttaggtttgtaacatccggcaaaactgaaaaaaaaaatctgtaaacgcgaaaaatactagatttgttttgagagttcttcattccttgctgctcacattctgagaaacaaaaagaaataaagtttttattctgaataatatccgtgttaagaaggggttctttggccgaagacgtgggtctgcgtggaattcaggccgaggcgagccggcagagcaggccggacgcagcagccctctggctccagcatggggcctggccaggctattcgcctggaagctcggcgaattctcaggatggcggctggggctccaggcggctgcggcagctctggtaacgccgtgcggcgggccagctgggctgcccggttcccagctgctgcggaggcaggctgagggcgcaggggctgccgagtgctgtgcacggaagaaacaaagacatcccggcccaaggcgcagcgggagcgcacaggtgccccgcggcccagccgggggataacgcagggcggtcttctgctccatgctcttcctcgggtcaaagcggaccaactaacgcctaaacctcggtattagccagccgcgcagaggatgccgagcactttccgggagcaatcggactcctggtctcctccggggatgcttcgcggtctgttatcgcgtcaggaggaaagaattgctccaaaaatctgcacgcggagcgaaacagtttgaaagggactgaggctcacccaggtctccagcaaacggaggactgaactggggagagtcaccctgagccagcccttccctggactgccggaatcccagcattagcttcctgctgaatgtagtatttggcattctctgaatttatttcctctccttcccccacccagctttctttttatggccccagggggagggggagagagcaaggagatcggtatctttgtaataaaactgcaattttataaatttttca

SEQ ID NO: 56849 - DNA, 6505 bp, Homo Sapiens; identical to SEQ ID NO: 32309

SEQ ID NO: 56850 - DNA, 2765 bp, Homo Sapiens; identical to SEQ ID NO: 31502

SEQ ID NO: 56851 - DNA, 4343 bp, Homo Sapiens
tggtcatcgcacggcggcagctcctcacctggatttagaagagctggcgtccccgcccgcccaagcctttaaactctcgtctgccagaacccgccaactctccaggcttagggccagtttccgcgattctaagagtaattgcgtgggcacctgtgctggggccaggcgcaaagaagggagttggtctgcgcgaagatcgtcaacctgctaacagaccgcacatgcactttgcaccgaccatctacgtctcagtctggaggttgcgcactttggctgctgacgcgctggtggtgcctattaatcatttaccagtccagagccgcgccagttaatggctgtgccgtgcggtgctcccacatcctggcctctcctctccacggtcgcctgtgcccgggcaccccggagctgcaaactgcagagcccaggcaaccgctgggctgtgcgccccgccggcgccggtaggagccgcgctccccgcagcggttgcgctctacccggaggcgctgggcggctgtgggctgcaggcaagcggtcgggtggggagggagggcgcaggcggcgggtgcgcgaggagaaagccccagccctggcagccccactggcccccctcagctgggatgttccccaatggcaccgcctcctctccttcctcctctcctagccccagcccgggcagctgcggcgaaggcggcggcagcaggggccccggggccggcgctgcggacggcatggaggagccagggcgaaatgcgtcccagaacgggaccttgagcgagggccagggcagcgccatcctgatctctttcatctactccgtggtgtgcctggtggggctgtgtgggaactctatggtcatctacgtgatcctgcgctatgccaagatgaagacggccaccaacatctacatcctaaatctggccattgctgatgagctgctcatgctcagcgtgcccttcctagtcacctccacgttgttgcgccactggcccttcggtgcgctgctctgccgcctcgtgctcagcgtggacgcggtcaacatgttcaccagcatctactgtctgactgtgctcagcgtggaccgctacgtggccgtggtgcatcccatcaaggcggcccgctaccgccggcccaccgtggccaaggtagtaaacctgggcgtgtgggtgctatcgctgctcgtcatcctgcccatcgtggtcttctctcgcaccgcggccaacagcgacggcacggtggcttgcaacatgctcatgccagagcccgctcaacgctggctggtgggcttcgtgttgtacacatttctcatgggcttcctgctgcccgtgggggctatctgcctgtgctacgtgctcatcattgctaagatgcgcatggtggccctcaaggccggctggcagcagcgcaagcgctcggagcgcaagatcaccttaatggtgatgatggtggtgatggtgtttgtcatctgctggatgcctttctacgtggtgcagctggtcaacgtgtttgctgagcaggacgacgccacggtgagtcagctgtcggtcatcctcggctatgccaacagctgcgccaaccccatcctctatggctttctctcagacaacttcaagcgctctttccaacgcatcctatgcctcagctggatggacaacgccgcggaggagccggttgactattacgccaccgcgctcaagagccgtgcctacagtgtggaagacttccaacctgagaacctggagtccggcggcgtcttccgtaatggcacctgcacgtcccggatcacgacgctctgagcccgggccacgcaggggctctgagcccgggccacgcaggggccctgagccaaaagagggggagaatgagaagggaaggccgggtgcgaaagggacggtatccagggcgccagggtgctgtcgggataacgtggggctaggacactgacagcctttgatggaggaacccaagaaaggcgcgcgacaatggtagaagtgagagctttgcttataaactgggaaggctttcaggctacctttttctgggtctcccactttctgttccttcctccactgcgcttactcctctgaccctccttctattttccctaccctgcaacttctatcctttcttccgcaccgtcccgccagtgcagatcacgaactcattaacaactcattctgatcctcagcccctccagtcgttatttctgtttgtttaagctgagccacggataccgccacgggtttccctcggcgttagtccctagccgcgcggggccgctgtccaggttctgtctggtgcccctactggagtcccgggaatgaccgctctccctttgcgcagccctaccttaaggaaagttggacttgagaaagatctaagcagctggtcttttctcctactcttgggtgaaggtgcatctttccctgccctcccctgtccccctctcgccgcccgcccgccaccaccactctcactccacccagagtagagccaggtgcttagtaaaataggtcccgcgcttcgaactccaggctttctggagttcccacccaagccctcctttggagcaaagaaggagctgagaacaagccgaatgaggagtttttataagattgcggggtcggagtgtgggcgcgtaataggaatcaccctcctactgcgcgttttcaaagaccaagcgctgggcgctcccgggccgcgcgtctgcgttaggcagggcagggtagtgcagggcacaccttccccggggttcggggttcggggttcggttgcagggctgcagcccgccttggctttctccctcacccaagtttccggaggagccgacctaaaagtaacaatagataaggtttcctgctccagtgtatctcaaaagaccgggcgccaggggcgggggacctagggcgacgtcttcagagtccgccagtgttggcggtgtcgccgcaacctgcaggctcccgagtggggcctgcctggtctctagagggttgctgcctttcaagcggtgcctaagaagttattttcttgtttaacatatatatttattaatttatttgtcgtgttggaaaatgtgtctctgctttccttttctctgcttgcctagccccaggtcttttctttgggaccctgggggcgggcatggaagtggaagtaggggcaagctcttgccccactccctggccatctcaacgcctctcctcaatgctgggccctcttatctcatcctttcctctagcttttctatttttgattgtgttgagtgaagtttggagatttttcatacttttcttactatagtctcttgtttgtcttattaggataatacataaatgataatgtgggttatcctcctctccatgcacagtggaaagtcctgaactcctggctttccaggagacatatataggggaacatcaccctatatataatttgagtgtatatatatttatatatatgatgtggacatatgtatacttatcttgctccattgtcatgagtccatgagtctaagtatagccactgatggtgacaggtgtgagtctggctggaacactttcagtttcaggagtgcaagcagcactcaaacctggagctgaggaatctaattcagacagagactttaatcactgctgaagatgcccctgctccctctgggttccagcagaggtgattcttacatatgatccagttaacatcatcactttttttgaggacattgaaagtgaaataatttgtgtctgtgtttaatattaccaactacattggaagcctgagcagggcgaggaccaataattttaattatttatatttcctgtattgctttagtatgctggcttgtacatagtaggcactaaatacatgtttgttggttgattgtttaagccagagtgtattacaacaatctggagatactaaatctggggttctcaggttcactcattgacatgatatacaatggttaaaatcactattgaaaaatacgttttgtgtatatttgcttcaacaactttgtgctttcctgaaagcagtaaccaagagttaagatatccctaatgttttgcttaaactaatgaacaaatatgctttgggtcataaatcagaaagtttagatctgtcccttaataaaaatatatattactactcctttggaaaatagatttttaatggttaagaactgtgaaatttacaaatcaaaatcttaatcattatccttctaagaggatacaaatttagtgctcttaacttgttaccattgtaatattaactaaataaacagatgtattatgctgttaaaaaaaaaaaaaaaaaaaaaaaaaaaaaaaaaaaaaaaaaaaaaaaaaaaa

SEQ ID NO: 56852 - DNA, 6641 bp, Homo Sapiens
gccctcgccgcccgcggcgccccgagcgctttgtgagcagatgcggagccgagtggagggcgcgagccagatgcggggcgacagctgacttgctgagaggaggcggggaggcgcggagcgcgcgtgtggtccttgcgccgctgacttctccactggttcctgggcaccgaaagataaacctctcataatgaaggcccccgctgtgcttgcacctggcatcctcgtgctcctgtttaccttggtgcagaggagcaatggggagtgtaaagaggcactagcaaagtccgagatgaatgtgaatatgaagtatcagcttcccaacttcaccgcggaaacacccatccagaatgtcattctacatgagcatcacattttccttggtgccactaactacatttatgttttaaatgaggaagaccttcagaaggttgctgagtacaagactgggcctgtgctggaacacccagattgtttcccatgtcaggactgcagcagcaaagccaatttatcaggaggtgtttggaaagataacatcaacatggctctagttgtcgacacctactatgatgatcaactcattagctgtggcagcgtcaacagagggacctgccagcgacatgtctttccccacaatcatactgctgacatacagtcggaggttcactgcatattctccccacagatagaagagcccagccagtgtcctgactgtgtggtgagcgccctgggagccaaagtcctttcatctgtaaaggaccggttcatcaacttctttgtaggcaataccataaattcttcttatttcccagatcatccattgcattcgatatcagtgagaaggctaaaggaaacgaaagatggttttatgtttttgacggaccagtcctacattgatgttttacctgagttcagagattcttaccccattaagtatgtccatgcctttgaaagcaacaattttatttacttcttgacggtccaaagggaaactctagatgctcagacttttcacacaagaataatcaggttctgttccataaactctggattgcattcctacatggaaatgcctctggagtgtattctcacagaaaagagaaaaaagagatccacaaagaaggaagtgtttaatatacttcaggctgcgtatgtcagcaagcctggggcccagcttgctagacaaataggagccagcctgaatgatgacattcttttcggggtgttcgcacaaagcaagccagattctgccgaaccaatggatcgatctgccatgtgtgcattccctatcaaatatgtcaacgacttcttcaacaagatcgtcaacaaaaacaatgtgagatgtctccagcatttttacggacccaatcatgagcactgctttaataggacacttctgagaaattcatcaggctgtgaagcgcgccgtgatgaatatcgaacagagtttaccacagctttgcagcgcgttgacttattcatgggtcaattcagcgaagtcctcttaacatctatatccaccttcattaaaggagacctcaccatagctaatcttgggacatcagagggtcgcttcatgcaggttgtggtttctcgatcaggaccatcaacccctcatgtgaattttctcctggactcccatccagtgtctccagaagtgattgtggagcatacattaaaccaaaatggctacacactggttatcactgggaagaagatcacgaagatcccattgaatggcttgggctgcagacatttccagtcctgcagtcaatgcctctctgccccaccctttgttcagtgtggctggtgccacgacaaatgtgtgcgatcggaggaatgcctgagcgggacatggactcaacagatctgtctgcctgcaatctacaaggttttcccaaatagtgcaccccttgaaggagggacaaggctgaccatatgtggctgggactttggatttcggaggaataataaatttgatttaaagaaaactagagttctccttggaaatgagagctgcaccttgactttaagtgagagcacgatgaatacattgaaatgcacagttggtcctgccatgaataagcatttcaatatgtccataattatttcaaatggccacgggacaacacaatacagtacattctcctatgtggatcctgtaataacaagtatttcgccgaaatacggtcctatggctggtggcactttacttactttaactggaaattacctaaacagtgggaattctagacacatttcaattggtggaaaaacatgtactttaaaaagtgtgtcaaacagtattcttgaatgttataccccagcccaaaccatttcaactgagtttgctgttaaattgaaaattgacttagccaaccgagagacaagcatcttcagttaccgtgaagatcccattgtctatgaaattcatccaaccaaatcttttattagtggtgggagcacaataacaggtgttgggaaaaacctgaattcagttagtgtcccgagaatggtcataaatgtgcatgaagcaggaaggaactttacagtggcatgtcaacatcgctctaattcagagataatctgttgtaccactccttccctgcaacagctgaatctgcaactccccctgaaaaccaaagcctttttcatgttagatgggatcctttccaaatactttgatctcatttatgtacataatcctgtgtttaagccttttgaaaagccagtgatgatctcaatgggcaatgaaaatgtactggaaattaagggaaatgatattgaccctgaagcagttaaaggtgaagtgttaaaagttggaaataagagctgtgagaatatacacttacattctgaagccgttttatgcacggtccccaatgacctgctgaaattgaacagcgagctaaatatagagtggaagcaagcaatttcttcaaccgtccttggaaaagtaatagttcaaccagatcagaatttcacaggattgattgctggtgttgtctcaatatcaacagcactgttattactacttgggtttttcctgtggctgaaaaagagaaagcaaattaaagatctgggcagtgaattagttcgctacgatgcaagagtacacactcctcatttggataggcttgtaagtgcccgaagtgtaagcccaactacagaaatggtttcaaatgaatctgtagactaccgagctacttttccagaagatcagtttcctaattcatctcagaacggttcatgccgacaagtgcagtatcctctgacagacatgtcccccatcctaactagtggggactctgatatatccagtccattactgcaaaatactgtccacattgacctcagtgctctaaatccagagctggtccaggcagtgcagcatgtagtgattgggcccagtagcctgattgtgcatttcaatgaagtcataggaagagggcattttggttgtgtatatcatgggactttgttggacaatgatggcaagaaaattcactgtgctgtgaaatccttgaacagaatcactgacataggagaagtttcccaatttctgaccgagggaatcatcatgaaagattttagtcatcccaatgtcctctcgctcctgggaatctgcctgcgaagtgaagggtctccgctggtggtcctaccatacatgaaacatggagatcttcgaaatttcattcgaaatgagactcataatccaactgtaaaagatcttattggctttggtcttcaagtagccaaaggcatgaaatatcttgcaagcaaaaagtttgtccacagagacttggctgcaagaaactgtatgctggatgaaaaattcacagtcaaggttgctgattttggtcttgccagagacatgtatgataaagaatactatagtgtacacaacaaaacaggtgcaaagctgccagtgaagtggatggctttggaaagtctgcaaactcaaaagtttaccaccaagtcagatgtgtggtcctttggcgtgctcctctgggagctgatgacaagaggagccccaccttatcctgacgtaaacacctttgatataactgtttacttgttgcaagggagaagactcctacaacccgaatactgcccagaccccttatatgaagtaatgctaaaatgctggcaccctaaagccgaaatgcgcccatccttttctgaactggtgtcccggatatcagcgatcttctctactttcattggggagcactatgtccatgtgaacgctacttatgtgaacgtaaaatgtgtcgctccgtatccttctctgttgtcatcagaagataacgctgatgatgaggtggacacacgaccagcctccttctgggagacatcatagtgctagtactatgtcaaagcaacagtccacactttgtccaatggttttttcactgcctgacctttaaaaggccatcgatattctttgctcttgccaaaattgcactattataggacttgtattgttatttaaattactggattctaaggaatttcttatctgacagagcatcagaaccagaggcttggtcccacaggccacggaccaatggcctgcagccgtgacaacactcctgtcatattggagtccaaaacttgaattctgggttgaattttttaaaaatcaggtaccacttgatttcatatgggaaattgaagcaggaaatattgagggcttcttgatcacagaaaactcagaagagatagtaatgctcaggacaggagcggcagccccagaacaggccactcatttagaattctagtgtttcaaaacacttttgtgtgttgtatggtcaataacatttttcattactgatggtgtcattcacccattaggtaaacattcccttttaaatgtttgtttgttttttgagacaggatctcactctgttgccagggctgtagtgcagtggtgtgatcatagctcactgcaacctccacctcccaggctcaagcctcccgaatagctgggactacaggcgcacaccaccatccccggctaatttttgtattttttgtagagacggggttttgccatgttgccaaggctggtttcaaactcctggactcaagaaatccacccacctcagcctcccaaagtgctaggattacaggcatgagccactgcgcccagcccttataaatttttgtatagacattcctttggttggaagaatatttataggcaatacagtcaaagtttcaaaatagcatcacacaaaacatgtttataaatgaacaggatgtaatgtacatagatgacattaagaaaatttgtatgaaataatttagtcatcatgaaatatttagttgtcatataaaaacccactgtttgagaatgatgctactctgatctaatgaatgtgaacatgtagatgttttgtgtgtatttttttaaatgaaaactcaaaataagacaagtaatttgttgataaatatttttaaagataactcagcatgtttgtaaagcaggatacattttactaaaaggttcattggttccaatcacagctcataggtagagcaaagaaagggtggatggattgaaaagattagcctctgtctcggtggcaggttcccacctcgcaagcaattggaaacaaaacttttggggagttttattttgcattagggtgtgttttatgttaagcaaaacatactttagaaacaaatgaaaaaggcaattgaaaatcccagctatttcacctagatggaatagccaccctgagcagaactttgtgatgcttcattctgtggaattttgtgcttgctactgtatagtgcatgtggtgtaggttactctaactggttttgtcgacgtaaacatttaaagtgttatattttttataaaaatgtttatttttaatgatatgagaaaaattttgttaggccacaaaaacactgcactgtgaacattttagaaaaggtatgtcagactgggattaatgacagcatgattttcaatgactgtaaattgcgataaggaaatgtactgattgccaatacaccccaccctcattacatcatcaggacttgaagccaagggttaacccagcaagctacaaagagggtgtgtcacactgaaactcaatagttgagtttggctgttgttgcaggaaaatgattataactaaaagctctctgatagtgcagagacttaccagaagacacaaggaattgtactgaagagctattacaatccaaatattgccgtttcataaatgtaataagtaatactaattcacagagtattgtaaatggtggatgacaaaagaaaatctgctctgtggaaagaaagaactgtctctaccagggtcaagagcatgaacgcatcaatagaaagaactcggggaaacatcccatcaacaggactacacacttgtatatacattcttgagaacactgcaatgtgaaaatcacgtttgctatttataaacttgtccttagattaatgtgtctggacagattgtgggagtaagtgattcttctaagaattagatacttgtcactgcctatacctgcagctgaactgaatggtacttcgtatgttaatagttgttctgataaatcatgcaattaaagtaaagtgatgcaacatcttgtaaaaaaaaaaaaaaaaaaaa

SEQ ID NO: 56853 - DNA, 1294 bp, Homo Sapiens
gagctccagcctccaggcacccgggatccagcgccgccgctcataacacccgcgaccccgcagctaagcgcagctcccgacgcaatggacccggcgctggcagcccagatgagcgaggctgtggccgagaagatgctccagtaccggcgggacacagcaggctggaagatttgccgggaaggcgtaccgaggagaaggcattgtatatgggacactagaggaggtgtgggactgtgtgaagccagctgttggaggcctacgagtgaagtgggatgagaatgtgaccggttttgaaattatccaaagcatcactgacaccctgtgtgtaagcagaacctccactccctccgctgccatgaagctcatttctcccagagattttgtggacttggtgctagtcaagagatatgaggatgggaccatcagttccaacgccacccatgtggagcatccgttatgtcccccgaagccaggttttgtgagaggatttaaccatccttgtggttgcttctgtgaacctcttccaggggaacccaccaagaccaacctggtcacattcttccataccgacctcagcggttacctcccacagaacgtggtggactccttcttcccccgcagcatgacccggttttatgccaaccttcagaaagcagtgaagcaattccatgagtaatgctatcgttacttcttggcaaagaactcccgtgactcatcgaggagctccagctgttgggacaccaaggagcctgggagcacgcagaggcctgtgttcactctttggaacaagctgatggactgcgcatctctgagaatgccaaccagaggcggcagcccacccttcctgcctcctgccccactcagggttggcgtgtgatgagccattcatgtgttccaaactccatctgcctgttacccaaacacgcctctcctggcagggtagacccaggcctctaaccatctgacagagactcggcctggacaccatgcgatgcactctggcaccaaggctttatgtgcccatcactctcagagaccacgtttccctgactgtcatagagaatcatcatcgccactgaaaaccaggccctgttgccttttaagcatgtaccgctccctcagtcctgtgctgcagccccccaaatatatttttctgatatagaccttgtatatggctttaatgccgcaaaatatttatttttccttaaaaaaggtgtcaacttggaaataatggtttaaaaacaggataagcattaaggaaaaacaaaaaaaaaaaaaaaaaaaaaaaaaaaaa

SEQ ID NO: 56854 - DNA, 2295 bp, Homo Sapiens
aagaggcagctgcagtggagaatcatgttaagctcggctactgcggagagcccaaggtagcccaataatggattttgatgagcgtggtccctgctcctctaacatgtatttgccaagttgtacttactacgtctcgggtccagatttctccagcctcccttcttttctgccccagaccccgtcttcgcgcccaatgacatactcctactcctccaacctgccccaggtccaacccgtgcgcgaagtgaccttcagagagtacgccattgagcccgccactaaatggcacccccgcggcaatctggcccactgctactccgcggaggagctcgtgcacagagactgcctgcaggcgcccagcgcggccggcgtgcctggcgacgtgctggccaagagctcggccaacgtctaccaccaccccacccccgcagtctcgtccaatttctatagcaccgtgggcaggaacggcgtcctgccacaggctttcgaccagtttttcgagacagcctacggcaccccggaaaacctcgcctcctccgactaccccggggacaagagcgccgagaaggggcccccggcggccacggcgacctccgcggcggcggcggcggctgcaacgggcgcgccggcaacttcaagttcggacagcggcggcggcggcggctgccgggagacggcggcggcagcagaggagaaagagcggcggcggcgccccgagagcagcagcagccccgagtcgtcttccggccacactgaggacaaggccggcggctccagtggccaacgcacccgcaaaaagcgctgcccctataccaagtaccagatccgagagctggaacgggagttcttcttcagcgtctacattaacaaagagaagcgcctgcaactgtcccgcatgctcaacctcactgatcgtcaagtcaaaatctggtttcagaacaggagaatgaaggaaaaaaaaattaacagagaccgtttacagtactactcagcaaatccactcctctaagactccagcggctggaattgggtggggggcttcatacacatgagataatatgcagattttgcccttgacaaagtcaagccacatggtgacttttgaaaagaggtgtgcaagagagggatgcatggagatagccccacaggaggtggtctgggactctcttgattaagatctcagtggttaagattcctaataatcattggattctgagagctgtgcatcagctagaatgacaggtttgggacccctggtggttcactcttggagcctgcagagctgcgggctgggtgtggtctccactggggattgggcccctgccagaccccctggagactaaccccaccacaccctccctctactgggagcctacccacccccaggacccctgagtaaaaaagctgtgtgctctccaagcccagttcagcttggggacaggggcaggaggaaggggtaggattactaggtgcccagaatgaggctgctttccaaagccaatgtgaacagcggctggacttggaggtagctttgaggtggaagagggctgcaaatccttgtgggaaaagaaatctatgattccaggtggcatcagtgtctttccactcctcctagccacccaccacactgatccagccctgagttcctagccaccgcctcctacagcccacctggcttttctttctaccaaatgagggtcttggttccagcctgccactcaggcccaaagcctcgacacagagtggactgttccctgaggtgggagatgtggaaaagccaagaggctgcagccaggccactggcccctgagatctctgcaggaaatggctgtggagtgtggcagtttggcaaactctccaccacacgtaatgaaacttggatttgctcagtgtctggctgcagagcagtgggcctggccagcaggtccccagctttggctatgagggccttgagtcccccaaaacaccgggttccagcaccacactcagccctcattggctcttgaactgagcttggaagcttctggtgaccttccaagagcctgagagtgaggtggaattattttaaaagataaatattatattatatatatatatatttccctgaaggaaccaaagcgaattttaaaagatgcaatgtagaggggaaaagagatgatgaaaatatttaaaggccctatctgtttacagtgttccgtggttaaactcgctcactgctaagaatatttgaatgtatgcttcatacagggatggtgttcaaaaaacttgtaaataaaggaaccataatcaattttc

SEQ ID NO: 56855 - DNA, 4323 bp, Homo Sapiens
acagggagtggctcaggtttcttgacacttccctgctgtggcgaaaaggagaaataattaacagctcctggggctctaggatcgctgatcgcgtcgggggcactgcaagcgcccagctgagccatgctctgggaggagacaggcgccgcccctgcgcccgcgcgggcctcggacctcccctacaggatatcctcagaccatctcaaaaaggaggaaaagatgactatgatggctcaccagtacccctcttggatcttcattaatgagaagacattcataaccagggaacaacttaattctttattgaagacctataacattttttatgagaaccagaaaaatctgcatattttatatggagagactgaagatggcaaactaattgttgaaggaatgctggacattttctggggagtaaaacgacctatacagctaaaaatacaagatgagaagccattctcttcttttactagtatgaagtcatcagacgtcttctccagcaaaggaatgacacgctggggggaatttgacgatctctatcgtattagtgagctggacaggacccagattcctatgtctgaaaaaaggaattcccaggaagactatttatcttatcacagcaacaccctgaagccacatgcaaaggatgaaccagactccccagtgctctatagaaccatgagtgaagcagctctggtgagaaaaaggatgaagcctctgatgatggacagaaaagaaagacagaaaaatagagcctctattaatggacacttctataaccatgaaacatcaattttcattccagcctttgaatcagaaactaaggtcagagtaaacagtaacatgagaactgaagaagtaataaagcaacttctccaaaaatttaagattgaaaatagtccccaggattttgctcttcacattatttttgcaacaggagaacaaagacgactaaagaagacagacattccgctactgcagaggctcctacagggaccttctgaaaagaatgctcgcattttcctcatggataaagatgcagaagaaattagcagtgatgtggctcagtacattaactttcacttttctctcttggaatccattcttcaaagattaaatgaagaagagaaaagagagattcaaagaatagtaacaaaattcaataaagaaaaggcgattatactgaaatgtcttcaaaataaactagtaataaaaacagagacaacagtttagcagtacaagcttctattgctaaaacatttcaaaaaactcagagatattactctttgatgaatgcataagttctgtacttgcatttatacgaacatatatgagacttgaatcgtagaaaattgaatgtcaaaaaaagctcatttctttttgaagtgatgaggttaattagggttcacagttggacaaaatgagtttgagtttagtttcagtaactgaaataagcttgaatactgcatatgccaaatagcttttatagtaaaccatgtaatgaactcaaatttaaatggtgtcttcagataagcagtttaaacttcatttagcttggactctcaagagaactgaaacataatcaatggattcagaaatgactcagaaaaaagaagctgccagttcttggaatgaaaaagaaatacagtcttacaccatcaaggaatctacctgatagtgacagtagcttcttgaaaactctggcattttcataaaatctaggactatcttaaatggcctgttgacttctgactatctgtaacatcagagctgtctggcctttggaaaggaaaaattatggactctgttaagaaatcctaattgaaattttctgaacctccccccagcccttttattctctctcttctgctgatgaaagacctttcatcagttcaaagcttttcttaagctcttttttaagttaattgaactttttctttatttatttttcaaaaaaatgtttatatcacatagacatattacatcggctaaagcaagacttggcccacaaatacctatttgttgctgaatgaatacaatggataaagcaaggctgttgtagctgaagttacatagggaatcccaaactctgccctcttagcatcttattctacatgacaactctcaaggtactcacagatctgtttaacccacttgaaaaaaaaacactaaaaatgaagaaatgctataagtataaactatgattttatttataaattctgtattaaaatggaattatatgcaacattctttcattctgtaaactaattccatttgcattcctcataagcattgtagtaaattgatcatattacatgtactaaggaatgagattatatgcagtaaacccaactggaagattaacaatattaaaatatgaaacatttttaagacaaaggcattacttctcagtattaccaaacctaaactggttgaaggtgaaagtgtgctatggccttttcaagcctaagaagtctctcttactgagtaaaccagaggcttgcatcgctattctttcacctgtcaatattaataagaaaatagtctcatctcacttaaatgaggcaaatgtaatagttaaaattcaacatacttataaaaaactagtgtcatgtacctgccatgaacatgacaaaaggttagtcttcaatagactgaaatgtataagagaagaaccaagtcttacatagaaaaaaaaggtagatatgaaaagaaaaatcacagaagagagaatgcaaatggccactaagtatatgaaaaaagtcgtatcttaacagtgaacaactgtgttagtctgtatcaatcagaagacagaaacaaggtagtaatttaaacagggaaagtttaatataaataataattaagctatgataggagaataataataaagatgaaaagagaaggtaccctaaggctgagggaaagaatcctaacaaggaaaggcaggaatgagggtttcagaattcactggagaaggtgtggttgcagcccactggagagaagtttgctggcttgcccaggccagagcaggaccacagatactggacaagctggtacagccaaccccctaggtgtggaccagctgaggcaggtgggcagatatgcagagggacttggggctttgccaaagggtaagcacaaagaaggagtcacgggttctgttcgaggcactgttgggattaggagtcggagggacctactttgcaggaacctagcataactttgtgtgacgagactgcacaagacaaagctcaggcaagtggctcagtagttggccagcccagcagggtcctctgtatgagtgtgcacccagctgaagagaagaaatggagagcagcaattggagcttcaggaccggcttgcactgtggctccaggttataccaccactgcccaaagcaaaagctagagaagcaagtggagaaatgctggagaaagctgcaccctacaggcaaccagcactgcagaaaccactccaggcaaagtagtgaaggaaaaaagcctgctctccagtagcctggcctgtcagcctggaggaatcaggaaagaccccttcctcttgcagtgtgtctccagcgccctctactgacaaagtatgccatcatgcaagctgcaaaggaaacatttcaagagtctatatctattttcacggagcgggcaaccaacagtgaatgtggagctgagagacagtaaaataataactgacatgccaccgaagtacaaagtaaaataaataaataaatacacattttggcctattagcaaagattaagaaatgataacattaaatactcaataaatcaccatgagatggggactcaaacttctggtaaaaatacaaatagatataatttttcttgaaggcaatttagtagtctgtttatcctataattctacttgtaagatcctatcatatgaaaataaccagagatacaaagacattctgcaaagatatgttttatattgttatttattgtgacaaaaggaaataaaaagcctaaatgttcagaaaattattttaaaagatgaaagagggaaataggccatggacggtggctcacgcctgtaatcccagcactttaggaggccaaggtaggtggatcacttgaggttgggatttcgagaccagcctggccaacatggtgaaaccctgcctctactaaaaatacaaaaaatgagccgggtgcaatggcaggcgcctataatgccagctactcgggaggctgaggcaggagaatcgcttgaacccgggaggcggaggttgcatgagccgagatggcgccactgctctccagcctggacgacagagcaagactccgtctct

SEQ ID NO: 56856 - DNA, 1332 bp, Homo Sapiens
gggtgctatagacgcacaaacgaccgcgagccacaaatcaagcacacatatcaaaaaacaaatgagctcttattttgtaaactcattttgcggtcgctatccaaatggcccggactaccagttgcataattatggagatcatagttccgtgagcgagcaattcagggactcggcgagcatgcactccggcaggtacggctacggctacaatggcatggatctcagcgtcggccgctcgggctccggccactttggctccggagagcgcgcccgcagctacgctgccagcgccagcgcggcgcccgccgagcccaggtacagccagccggccacgtccacgcactctcctcagcccgatccgctgccctgctccgccgtggccccctcgcccggcagcgacagccaccacggcgggaaaaactccctaagcaactccagcggcgcctcggccgacgccggcagcacccacatcagcagcagagagggggttggcacggcgtccggagccgaggaggacgcccctgccagcagcgagcaggcgagtgcgcagagcgagccgagcccggcgccgcccgcccaaccccagatctacccctggatgcgcaagctgcacataagtcatgacaacataggcggcccggaaggcaaaagggcccggacggcctacacgcgctaccagaccctggagctggagaaggagttccacttcaaccgttacctgacccgcagaaggaggattgaaatagcacatgctctttgcctctccgagagacaaattaaaatctggttccaaaaccggagaatgaagtggaaaaaagataataagctgaaaagcatgagcatggccgcggcaggaggggccttccgtccctgagtatctgagcgtttaaagtactgagcagtattagcggatcccgcgtagtgtcagtactaaggtgactttctgaaactcccttgtgttccttctgtgaagaagccctgttctcgttgccctaattcatcttttaatcatgagcctgtttattgccattatagcgcctgtataagtagatctgctttctgttcatctctttgtcctgaatggctttgtcttgaaaaaaaatagatgttttaacttatttatatgaagcaagctgtgttacttgaagtaactataacaaaaaaagaaaagagaaaaaaaaacacacaaaaagtcccccttcaatctcgtttagtgccaatgttgtgtgttgcactcaagttgtttaactgtgcatgtgcgtggaagtgttcctgtctcaatagctccaagctgttaaagatatttttattcaaactacctatattccttgt

SEQ ID NO: 56857 - DNA, 2521 bp, Homo Sapiens
gggtagcagcgcctatgtgaagttagctaatctgagaaggcccacttctggttccatggatgatggcggttgagcagatgccaaaaaaggattggtacagcatcctgggagcagacccatctgcaaatatatcagacctaaaacaaaaatatcaaaaactcatattaatgtatcatccagataaacaaagtacagatgtaccagcaggaacagtggaggaatgtgtacagaagttcatcgaaattgatcaagcatggaaaattctaggaaatgaagagacaaaaagagagtatgacctgcagcggtgtgaagatgatctaagaaatgtaggaccagtagatgctcaagtatatcttgaagaaatgtcttggaatgaaggtgatcactctttttatctgagttgcagatgtggtggaaaatacagtgtttccaaggatgaagcggaagaagttagcctgatttcttgtgatacatgttcactaattatagaactccttcattataactaaaattgttcacaacttgaaatgctttaactgtggtattgagacatgatgagaagccgttgagctttgtccattcaaggaaatggattatttgtcagcccgattatttgcaaagaaaatatacaattatcaagcagagaccacctcagattaatagagaatgaatataattatttatttgtatttataatttatatttacaagttgtcacaaaaatagatttgattatatttggtgaattcccatctgagaactttattatgtcatttttttccatgacacaaaataagaattttcttaatatgagcatgtctcctcttttcagtgggtaacagtatcatcatattcctttatagttactaagtttctggtctaaccgataacgtttctagttgctaaagttatggggctgttgtacacctagaatctttgtgaataatgtgaggccagttcttccataaggaaggctggttatggatattcataaggttatttcaaagttaataaagacaaagtggcaactgtagaaagtgttgcctccaatcttggtccgtatttccaaagcttgtaaacactgccatcttcaaatgtaaatgtaatttaggaaatggaagcttttaattttaatttcttttttctaagacagagtctcactctgtcgcgccagctggagtgcagtgccatgatctcgggtcgctgtaacctccgtctcctgggttcaagtgattctccagcctcagcctcccgaatagctgggattacacgtgcccaccaccatgcccagcatggtgaaaccccatatctactaaaaataatttttttaaaaattggccagtcacgttggtgtctgcctgtggtcccagctactcgggaggctggggcacaagaatcgcttgaacccaggaggcagagtgagccgaggttgtgccactgcactgcagcctgggctacagagagcaagactctgtctcaaaaaaaataaaataaaataaataaaaaaagatatagtattaatgcctgtatttatgaagacagggccattgcactgctgctatgctgaaatgaacttttataaagtattattgactatagccaactacagatggcatatgccttaaagatgcatttttctatgtatttaatattttgtgtacagtaaaagtcagaactcatttaaagaactttaagggatcctttagaaacatttttacttaatttcaaatgagtgggctgagcatgtagactagcagctttttatcaaacctggcattgtcaggttgaacttataaatacgaatagttactactctgatttgtaaatgtagctgctaaagtatgaggtatatttaagaagaatagattagtttcattatacctataagaacaagaattcaaaagtgaggtagtcatccaggttccccctcccacaatatttttgtatcataaaatttagatgacttttttgggttacatttttatccatatattttgaactaacagaacttggcagaatgtgtgttgaatattctttacatttaacaattaaaaacaactaaaactgaatagcaaatagtttattggtaagtacacggtttcaacgggagtaataaattcacatgaaaaggagacaataatcaagtcaaaagaataaatgcttactaatcatcagaaaatctgtggccattagggctggcacgtaaaaatccaaaatcactcagaggccaaatctgtaaaatcaaaatgaggttgaagacaattagtgaaagtaatgttatagtatcatcatattcccttttgctatctgtcccttttctctatgccagataaacactttctccttactcatcaatcaagaataaaattttctacatcaaagtaagacttgagaaaataaacttatgtgtatatatgtttaaactccaaagtttgggacattcaaacaatgtacatgaaattatatgtgtgtggtgtgtgaataaatatgtatgaatataaaaaaaaaaaaaaaaaaaaaaa

SEQ ID NO: 56858 - DNA, 3772 bp, Homo Sapiens
cttttgggcggccggaccttagaaagtcacacatctgcgcgcctgtgcggcccctgcttctgcggatgctgaggcacgtaaaaaaatttgaagaagggaatttcgcggcattcttggcctggcttcctggcgtagccagcaagttcggaggtgttaaccgctgctgtcatgtttcttttgctaaactgcatcgtcgctgtgtcccaaaacatgggcatcggcaagaacggggacctgcccaggccgccgctcaggaatgaattcaggtatttccagagaatgaccacaacttcttcagtagagggtaaacagaatctggtgattatgggtaggaagacctggttctccattcctgagaagaatcgacctttaaaggatagaattaatttagttctcagcagagaactaaaggaacctccacaaggagctcattttcttgccagaagtttggatgatgccttaaaacttactgaacgaccagaattagcaaataaagtagacatgatttggatagttggtggcagttctgtttataaggaagccatgaatcacctaggccatcttaaactatttgtgacaaggatcatgcaggactttgaaagtgacacgtttttttcagaaattgacttggagaaatataaacttctgcctgaatacccaggtgttctctctgatgtccaggaggggaaacacatcaagtacaaatttgaagtatgtgagaaggatgattaatatgaaggtgttttctggtttaagttgttccccctccctctgagaaaagtatgcatttttacattagaaaagggacttttgttgacttcagatctatggataattatttctaagcaacgtgtttttattcctcactaatcttggctatatcagataccatttatgaaacattcttgctataactgtctctccaagaccccgactgagtccccagcacctgctacagtgagctgccattccacacccatcacatgtggcactcttgccactccttgacattgtcaggcttttctaatgttggtagtatttattaaagatgaagatgcacatacccttcagctgagcagtttcactagtaggaaataccaaaagcttcgtacatgtatatccagaggtttgtagacaaatgttgcagccttttttgtaacagtgaaaaactgaaaacaacctggaagtccagtgatgggaaaatgaatatatttctgtcttagattggggaacccaaagcagattccaagactgaaatttaagtgaaagcagtttatttgctaggtcataccagaagtcatcaatcgaagtatggagaaatggaactgagaaggtaaaaaccagttcaaaatcagtgaggaggttctcaatggtaacgagctccatactgctgagatacagggaaacggaggggagaaagctagagtatttaacccccactccttggttgtcagctccctgtcctgtgtgtgggcagaacgtactccacctactcaatagcaagttccaggtgtttgctgaaagaagctgctgtaatgtacgggaacggtgaatgccaaacacttaaagcaattccatgtttaagtatgtaaactcttcatacttttttttttttttctttttgggacagagtttcactcttgttgcccaggcggagtgcagtggaacaaccttggctcacggcaacttcagccttcccaggttcaagcaattctcctgcctcaggctcctgggtggctgggactacaggcgcgtgccaccacgccaggctaattttgtatttttggtggggacattccatgttggtcaggctagtctcgaactcctgacctcaggtgatcctcctgcctcggccttcaggggtgctgggattacaggcatcagccactgcacttggcagatcttcattcttttagtaaaaagtataaagccacacatggtttatttgaaatattttataatttaaaaaagtacagaagcaggaaaaccaattctaggttcaagtgagggatgatggtagtttgaaccaaaggattgcatgtggtaagaaattgtgatttaagatatattttaaagttggaagtagcaggatattctgatggagtttgactttggttttgggcccactgagtttgagatgcctttgagaaatgaaagaagtagagagagaattaaaaactggccaggagtggtggctcacgcctgtggtcccagcactttggggggctgaggtgggtggatcacctgagaccagcttgggcaacatggtggagccctgtctctacagaagatacaaaaattggctgggcgttgtggcacacacctgtagtctcgtctactcacggggctgagatggaggattcaattgagcccatgagttcaaggctgcagtgagtcgtgattttgccactgcactcctgcctgggtgacagaagagaccctgtctcaaaaaagaatctgaaaacaacggaaccatgccttcagaattctataaagttattttcaactgataaatctatattcaggcaaagaatcaagggtgaaggtaaaataatacatttttagacaagcaaagactcaggggttacatgtaccctttcttgggaagctatcggagaaaatactccagcaaaatgaaggcgtacacaaaccagagaatgacgtggatccagcaaatagtatccaacacaggcaatattccagctatggagctagctttaaaaagaaacagtaaaaatactaatagattagctgggtgggatggcccatgcttgtagtcccagctactcaggaggctaagcaaaaggatggcttgagcccaagagttcagagcagcctggccaccatagtgagatcccttctcttaaaaataataggttattgccagatttggggcatttagaaagaagtgcattgaagataaagcaaaagtaaaaaaaaaaaaaaacaaaaaaaaacaagggggaagggttggttaggcaataattaattctagggcaggaagaagtacaggataggaagtaagagcatcatacgctgtttttctcaacaatgggcaatatgtacatagtcataatgatgtggtgactgactgcttagcccctaaatctggtaactactttgggacaatatggggggaaaagtgaagatagtgatggtgtaagagctaaatcctcatctgtcatatcaagaaatcactatataatgtataacataatcaagaaatgactaagtagttatgtgaagaaaagaatggaacattgctagaagagttagaagtcattgctccagagaattaggagggatggggcaggggactgttaggatgcattataaactgaagaggcttttaaagattacatgtattaatatatgtattcacttgaaaaactaaaaaaatagtaattttttaaaacccatggaggtaactaccagaaggaaaaactaagagaatgaaaagtgctttcctctggaaagaacaagtcgcaggactgttttcattgtaagacttttggagccatttgattttacttaaccattttcatatatttctttaataaaaataattctatcttaataaaaagttacactcattcattaaaaaaagaattttaagactgtaataagaatcatagtttatttctgttagagaaaggcaatgtgttatacttggaaagaggtcatattaattttatcacatttttgggactcagcatctttatattttctgattttaaataaacaactttgcttacgaaaaaaaaaaaaaaaa

SEQ ID NO: 56859 - DNA, 5938 bp, Homo Sapiens
acactcatgctgcagccttgagccgtccctcgtcctcctctcaggctccctcttgtccacggcgggcgggcgccgagctgctgatgtgtccctagcataacctggccccattcctttgcatctagatgcctttggacaaggctatgccactgaagcattatctccttttgctggtgggctgccaagcctggggtgcagggttggcctaccatggctgccctagcgagtgtacctgctccagggcctcccaggtggagtgcaccggggcacgcattgtggcggtgcccacccctctgccctggaacgccatgagcctgcagatcctcaacacgcacatcactgaactcaatgagtccccgttcctcaatatctcagccctcatcgccctgaggattgagaagaatgagctgtcgcgcatcacgcctggggccttccgaaacctgggctcgctgcgctatctcagcctcgccaacaacaagctgcaggttctgcccatcggcctcttccagggcctggacagccttgagtctctccttctgtccagtaaccagctgttgcagatccagccggcccacttctcccagtgcagcaacctcaaggagctgcagttgcacggcaaccacctggaatacatccctgacggagccttcgaccacctggtaggactcacgaagctcaatctgggcaagaatagcctcacccacatctcacccagggtcttccagcacctgggcaatctccaggtcctccggctgtatgagaacaggctcacggatatccccatgggcacttttgatgggcttgttaacctgcaggaactggctctacagcagaaccagattggactgctctcccctggtctcttccacaacaaccacaacctccagagactctacctgtccaacaaccacatctcccagctgccacccagcatcttcatgcagctgccccagctcaaccgtcttactctctttgggaattccctgaaggagctctctctggggatcttcgggcccatgcccaacctgcgggagctttggctctatgacaaccacatctcttctctacccgacaatgtcttcagcaacctccgccagttgcaggtcctgattcttagccgcaatcagatcagcttcatctccccgggtgccttcaacgggctaacggagcttcgggagctgtccctccacaccaacgcactgcaggacctggacgggaatgtcttccgcatgttggccaacctgcagaacatctccctgcagaacaatcgcctcagacagctcccagggaatatcttcgccaacgtcaatggcctcatggccatccagctgcagaacaaccagctggagaacttgcccctcggcatcttcgatcacctggggaaactgtgtgagctgcggctgtatgacaatccctggaggtgtgactcagacatccttccgctccgcaactggctcctgctcaaccagcctaggttagggacggacactgtacctgtgtgtttcagcccagccaatgtccgaggccagtccctcattatcatcaatgtcaacgttgctgttccaagcgtccatgtccctgaggtgcctagttacccagaaacaccatggtacccagacacacccagttaccctgacaccacatccgtctcttctaccactgagctaaccagccctgtggaagactacactgatctgactaccattcaggtcactgatgaccgcagcgtttggggcatgacccaggcccagagcgggctggccattgccgccattgtaattggcattgtcgccctggcctgctccctggctgcctgcgtcggctgttgctgctgcaagaagaggagccaagctgtcctgatgcagatgaaggcacccaatgagtgttaaagaggcaggctggagcagggctggggaatgatgggactggaggacctgggaatttcatctttctgcctccacccctgggtccatggagctttcccgtgattgctctttctggccctagataaaggtgtgcctacctcttcctgacttgcctgattctcccgtagagaagcaggtcgtgccggaccttcctacaatcaggaagatagatccaactggccatggcaaaagccctggggatttccgattcatacccctgggcttccttcgagagggctcttcctccaaatcctccccacctgtcctccaagaacagccttccctgcgcccaggccccctccgggcctctgtagactcagttagtccacagcctgctcacttcgtgggaatagttctccgctgagatagcccctctcgcctaagtattatgtaagttgatttcccttcttttgtttctcttgtttgtgctatggcttgacccagcatgtcccctcaaatgaaagttctccccttgattttctgctcctgaaggcagggtgagttctctcctcaaagaagacttcaaaccatttaactggtttcttaagagccgtcaatcagcctggttttggggatgctatgaaagagagaaggaaaatcatgccgctcagttcctggagacagaagagccgtcatcagtgtctcacttgtgatttttatctggaaaaggaagaaacaccccagcacagcaagctcagccttttagagaaggatatttccaaactgcaaactttgctttgaaaagtttagccctttaaggaatgaaatcatgtagaattttggacttctaaaaacattaaaatcagcttattaatacgggatagagaaagaaatctggtgcctgggggtccctgtgttcacccctagagtttgttttaaaatttttaattgaagcatgtgaagtgtacctgcagaaaagtgggaacatgatagtgtatggcttggtggattttcacaaactgaacatacctgtgtaatcagcatctagacccagacccagagcgtcacaaatatcccccatcctgggcttttcccagaggagatgggggcttctgaagatggacttacctgggacctgccccccatgagccaggacggtccccccacagtcagcctgtgcaaaggccccgtggccaggggtggaggagaatatgtgggtgtggacaggatgggagactgtggcctgaacaggagattttattatatctggagaccctgagagaccctgagacctggggcaccctggctggccaggtcagaagcatcctgactgcagaggtccgtgcagccacaccctcttccctgccagcaagctgtctgcggctcatcggaggcccctccgcctggagccttctatggacgtgatatgcctgtatctgtttttaattttcattcttcacttaggggaagtgaaatcgctcagagatgagatcctttaattgaaaacgaagtgtaacggaatctagtgtctttctaatgtggtaaaattctccatcaacatcacagtcagctggcagctgaacttcagaatctcacttacagcaggcgacacgggggtacaccgatgggtcacactgggtctgggggctccctggagctcctcctgcgtgtggtctggttaggagttgagttgtttgctccagggttattctcctcctcgagtcacagtcacacgaatacctgccttctctggctttcctgctatacacatattcacatggcgctcaagaagttaggctcatggcaacgtgtgtctttctctggacaactggcccagtttacagtgaaatggagaatttcaggtctccacgtctgcccaggaaagaacttcagctgactccacggggatctggaaatccacgaccaatcccgatcggctcttattagctccccgctccacaagacacctgtgctttggaaatccaccaccaatcccgatcggctcttattagctccccgctccacaagacacctgtgatctggaaatctaccaccaatcccgatcggctcttattagctccccgctccacaagacacctgtgacatcctccagggccacaggagcacgtgctgaccagttttcccttccagttcctgcacaaaaagtgtccagagggctgtttgcaaacactagtgcactttgtagcttttcaccctctgtcccagggaatctaggagagatgaggcccgtcagagtcaagagatgtcatccccccagggtctccaaggcatttccacactattggtggcacctggaggacatgcaccaaggcttgccagagccaacaggaagtgagcccagagcatggcacatgagcatcacccgctgatggtggcctgctgtgcctggtgccaacaggggcatcccggcccatacccctccagacaggaagcatgggtttgcccacagacctgtcgggtgctcctgtgagtggcctccagatgtctttgtgcataggcacaagtgggccagggctggagggaggtgggaaacctcatcatccggtgggccctgccaatcttaacccagaacccttaggtattcctggcagtagccatgacattggagcaccttcctctccagccagaggctgacctgagggccactgtcctcagatgacaccacccaggagcaccctaggtgaggggtgagggcccccttatgtgaacctcttgcctcttcctttctcccatcagagtggttggatggagccattggcctccttttcttcagcgggcccttcaacctctctgcaccatgttgtctggctgaggagctactagaaaagctgagtggagtctcctttccaacaggatgatgcatttgctcaattctcagggctggaatgagccggctggtcccccagaaagctggagtggggtacagagttcagttttcctctctgtttacagctccttgacagtcccacgcccatctggagtgggagctgggagtcagtgttggagaagaaacaacaaaagccaattagaaccactatttttaaaaagtgcttactgtgcacagatactcttcaagcactggacgtggattctctctctagccctcagcacccctgcggtaggagtgccgcctctacccacttgtgatggggtacagaggcacttgctcttctgcatggtgttcaataggctgggagttttatttatctcttcaaactttgtacaagagctcatggcttgtcttgggctttcgtcattaaaccaaaggaaatggaagccattcccctgttgctctccttagtcttggtcatcagaacctcacttggtaccatatagatcaaaagctttgtaaccacaggaaaaaataaactcttccatcccttaaagaatagaatagtttgtccctctcatgggaattgggctgtatgtatattgttcttcctccttagaatttagagatacaagagttctacttagaacttttcatggacacaatttccacaacctttcagatgctgatgtagagctattgggaaagaacttccaaactcaggaagtttgcagagagcagacagctagagataactcgggacccagagttggtcgacagatgttagatgtatcctagcttttagctataaaccactcaaagattcagcccccagatcccacagtcagaactgaatctgcgttgttgggaagccagcagtggccttgggaaggaagccatggctgtggttcagagagggtgggctggcaagccacttccggggaaaactccttccgccccaggtttcttcttctcttaaggagagattattctcaccaacccgctgccttcatgctgccttcaaagctagatcatgtttgccttgcttagagaattactgcaaatcagccccagtgcttggcgatgcatttacagatttctaggccctcagggttttgtagagtgtgagccctggtgggcagggttggggggtctgtcttctgctggatgctgcttgtaatccatttggtgtacagaatcaacaataaataatatacatgta

SEQ ID NO: 56860 - DNA, 3248 bp, Homo Sapiens
catgcgtgtcggagaggagagagcagagagagacacaggaacaagaacagcaaagggtagagcagacctgcgccaggggcgcacaacggccgtgtccacctcccggccccaagatggtgcttcccacaggcagccacgcgtagcagccagagacagctccagacatgtggctcttcttcgggatcactggattgctgacggcagccctctcaggtcatccatctccagccccacctgaccagctcaacaccagcagtgcagagagtgagctctgggagccaggggagcggcttccggtccgtctgacaaacgggagcagcagctgcagcgggacggtggaggtgcggctcgaggcgtcctgggagcccgcgtgcggggcgctctgggacagccgcgccgccgaggccgtgtgccgagcactgggctgcggcggggcggaggccgcctctcagctcgccccgccgacccctgagctgccgcccccgcctgcagccgggaacaccagcgtagcagctaatgccactctggccggggcgcccgccctcctgtgcagcggcgccgagtggcggctctgcgaggtggtggagcacgcgtgccgcagcgacgggaggcgggcccgtgtcacctgtgcagagaaccgcgcgctgcgcctggtggacggtggcggcgcctgcgccggccgcgtggagatgctggagcatggcgagtggggatcagtgtgcgatgacacttgggacctggaggacgcccacgtggtgtgcaggcaactgggctgcggctgggcagtccaggccctgcccggcttgcacttcatgcccggccgcgggcctatccaccgggaccaggtgaactgctcgggggccgaagcttacctgtgggactgcccggggctgccaggacagcactactgcggccacaaagaggacgcgggcgtggtgtgctcagagcaccagtcctggcgcctgacagggggcgctgaccgctgcgaggggcaggtggaggtacacttccgaggggtctggaacacagtgtgtgacagtgagtggtacccatcggaggccaaggtgctctgccagtccttgggctgtggaactgcggttgagaggcccaaggggctgccccactccttgtccggcaggatgtactactcatgcaatggggaggagctcaccctctccaactgctcctggcggttcaacaactccaacctctgcagccagtcgctggcagccagggtcctctgctcagcttcccggagtttgcacaatctgtccactcccgaagtccctgcaagtgttcagacagtcactatagaatcttctgtgacagtgaaaatagagaacaaggaatctcgggagctaatgctcctcatcccctccatcgttctgggaattctcctccttggctccctcatcttcatagccttcatcctcttgagaattaaaggaaaatatgccctccccgtaatggtgaaccaccagcacctacccaccaccatcccggcagggagcaatagctatcaaccggtccccatcaccatccccaaagaagttttcatgctgcccatccaggtccaggccccgccccctgaggactcagactctggctcggactcagactatgagcactatgacttcagcgcccagcctcctgtggccctgaccaccttctacaattcccagcggcatcgggtcacagatgaggaggtccagcaaagcaggttccagatgccacccttggaggaaggacttgaagagttgcatgcctcccacatcccaactgccaaccctggacactgcattacagacccgccatccctgggccctcagtatcacccgaggagcaacagtgagtcgagcacctcttcgggggaggattactgcaatagtcccaaaagcaagctgcctccatggaacccccaggtgttttcttcagagaggagttccttcctggagcagcccccaaacttggagctggccagcacccagccagccttttcagcagggcccccggctgatgacagctccagcacctcatccggggagtggtaccagaacttccagccaccaccccagcccccttcggaggagcagtttggctgtccagggtcccccagccctcagcctgactccaccgacaacgatgactacgatgacatcagcgcagcctaggccggggccagccgaggctcctggggtggctctgaccctctggcctcctgctctacctactccctttcccctttcccaccctcccagctcacctccccatggagctgagaggcctcccttggagagatggaaggaaacgttataccttgtacccctcggtctccatccatcaagccaaacctgctgccacagccctcccccggccccagatagcagccccagggaggatgctgcctccaagaggtgtgagccctctgtctcggggatgaacaagcagagtctgggctacctcttgacagctggtggaggggagttggggagctggactggatgactctggaggccccttccaaacctcaagtgtccggcgctttgattgcctgagtttctgacacttcagggcccagaggtcctgcgaggggcagaactggacccccatgccagtgctgctgcaggagggcccatatactagggtctgctgagctgttgtcactgatcggtgggcgctgggggggtagggtagcacaccagctgtcccaggctttgctccgggcggtaactgcacttgggcagggaatatagccttcctgggcacaactagctgacaatgacaggttgactgtgtacccccaaccaaggagctggggcccaaggccagtcctgccccagagacactccaagtccgccaggggcacagaccagttctgcagtgactgtccctggacaatgggtctttattctgagtttcctatggtttacaaagagggccccagcccagccccaccacagatcccagagataggggcccagtctccatgggggcaaggagcatagagatgttttccaggaaggggctcagaagctgcactaggccccgagtccccatgtgtctccttgaattgatgaggatgctcctgggagggatgcgtgactatgtggtgttgcacccggggctgcaaacgtctccgtgcagcccccagagagaggcccatgggctcagaccaggctttgttgtcctgctctgagtatcctgagattaaactgaattgctgaatgaaaaaaaaaaaaaaaaaaaaa

SEQ ID NO: 56861 - DNA, 4855 bp, Homo Sapiens
ccagagcccggcttggtccggtccctctgcccccatcccgcacccttccacctcctccgagtcccactcctcacctaggacgccccaaactgccatgggttagggtggggatcgcgacccgcgcgaaagaccagccctgcgcttccgccgggggacgcggagcccaaacgccgctcaccgcttgcgggcgccgggcatggggagtgtggtgtgagcccgcacccggggaggacgcaggagctgcggagacgggcgcgaggaggaggagaggagtcgtggattggaaggacccgagggagggagggtggggaagcgagggaaaagtgaagctgggaggagaaggcggcggaaggtggagattgatgcttctgttttttgttgccgctgctgccctcgcgctgggagccgagccggagggaaggcggtggagagatgattgcagagttggtgagcagcgctctggggctcgccttgtatctcaacaccctgagtgcggatttctgctatgatgacagccgtgctatcaagactaatcaggaccttctcccagaaactccatggacgcacattttctacaatgatttttgggggactcttctaacccacagtggcagccacaagtcctaccggccactctgcactctttcttttcgcctgaaccatgccattggagggttgaatccctggagctaccatcttgtcaatgtcctgttgcatgcagcagtcactggtctcttcacaagcttctccaagatcctccttggtgatggatactggacattcatggctggcttgatgtttgcttctcaccccattcacacggaggcagtggcaggaatcgtgggacgagccgatgtcggggccagtctcttctttctcctctccttgctctgctacattaaacactgttctacaagaggctactcagccagaacctggggctggttcctggggtcaggactgtgcgcaggatgcagcatgttgtggaaggaacaaggagtgactgttctcgcagtttcagcagtttatgatgtctttgtctttcacaggctgaaaataaaacagatattacctaccatttacaaaaggaagaacttgtcgcttttcctaagcattagtttgttaattttctggggttcctcccttttgggtgcccggttatactggatgggaaacaaaccaccaagcttttccaactcggacaaccccgctgctgattcggacagcctcctcacccgcactctcaccttcttctacttgccaaccaagaacctctggctgttgctatgtccagataccctcagttttgattggtcaatggatgctgtgcctctgctcaaaacagtttgtgactggagaaacctacacactgtggccttctatactggactccttctccttgcctactatggtttgaagagcccgagcgtagacagagaatgcaatgggaaaactgtaacaaatggcaagcagaatgcaaatggacatagctgcctttcagatgtggagtaccagaactcagagactaagtccagctttgcatccaaagtagaaaatggcattaaaaacgatgtatcacagagaacccagcttccttctacggagaacattgttgttctgtctttatctttgttaatcataccctttgttcctgccacgaacctgtttttctatgtcggctttgtaattgcagagcgagtattatatattcctagtatgggcttctgcctactgattacagtgggtgctagagccctttatgtcaaagtccaaaagcggttcctcaagagcttgattttttatgctacagctacactaattgttttttatggactcaagactgcgatcaggaatggagactggcagaatgaggaaatgctttatagatcagggataaaagtaaacccagctaaagcatggggtaaccttggaaatgttctgaagagtcagagcaaaatttctgaagctgaaagcgcctatagaaatgctttgtactaccgcagcaacatggctgacatgctttataatttagggctacttctccaggagaacagcaggtttgcagaagcactacattattataaattggccattgggagcaggcctaccctggcttctgcatatttaaataccggtattattctaatgaaccaaggaaggacggaagaagcccgacggacattcttaaagtgttcggagatcccagatgaaaacctaaaggaccctcatgcacacaagagctctgttaccagttgtttgtacaacctaggaaagctgtatcatgagcagggacactatgaggaagcccttagtgtatacaaggaagcaattcagaaaatgccaaggcagtttgccccacagagcttgtacaacatgatgggtgaagcatatatgcgtttaagcaaactccccgaagcagagcattggtatatggaatcactgagatccaagactgaccacatccctgctcatctcacctatgggaagctgctagctctaacaggtcgtaagagtgaggctgaaaagctcttcttgaaggctattgagctggatcccaccaaaggaaactgttacatgcattatggtcagtttcttctggaagaagctcgtctcatagaagcagctgagatggcaaaaaaagcagctgaactagacagcacagagtttgatgttgtcttcaatgctgcccacatgctcagacaggctagcctcaatgaagcagctgagaagtattatgatctggcagccaggctgaggcctaattatccggctgctttgatgaacctgggagccattctgcacctcaatggcagactccagaaggccgaggccaactacctgcgggccctgcagctcaagccagacgatgtcatcacacagtccaatctccgcaaactgtggaacatcatggaaaaacaaggcttaaagacttctaagacctgacacaggaggcagaagcccatcctcctccatttttaaaagctggcttccttagcagacagaacttcccagcagtgctatgacaagagctggtgttagacttcaagaccagggcagaggtcattgaggtcactaccgcttctggaagaatccactttgctgtaggcacagctgttaacaccaaaaaggggaaagccggaaacctcctggaggatgtcattgttacccatagactgtaaaccagagcacttaaaacagaaccttttggcattcttaaaaagggaggggtgggtgtgtaagtcacagattttgttcattttctgaaagctaatttcaaaattatgttgttccttaaacactgtgagaggaagtcagagtgtccattcaggcatggcaaacaattagggttaagtgttacgagggagtgataaacacgtagtgtgagtcccagtgagccgccggttgtcctaacgctgctgtcttccctgtttgggacagcctgcttatcaatttctgaagcttagaacactttttttaatactgtgtcaagatctgtcagaatctgctatgtttcttgaccagtgcacataatgttttatgatttggatgtcagaggcttcattcttttggacatcatttgctttttatgttctgaaaaggatatggagagtagagctaaccatacttcacactcgagttgtatgagggactggggaggccttatatgtgtcaggcaggcattttttaaattttaatatcgtcaatattttcccccaaactgcccagtagaattcattgtattaattcttttgaaattacctttgaaaatagctattcctggagaatgtgcaagcttacataaggataaaggacaggggaggagtttgtaagccttgcagttccaataactaaccaacaggttattagacaaaagggaaggtgttttgtgcttctcagatgttgctggtttaggagtgtgtgatgatgcttgccagtgattttgtgttttggaaagggtaggtatcgaatgttaatcactttctaatgggtacctaaacagcaatgctgataaatgttcaaggaattattttcatcttagtttgttcttctcaaaaggcatcaaaaacaacttatttgaagctgcaatagagtgtagcattagcctgcatgtttctaggtcttctgccaagtgcttttctcagttgaaaactatttttcactagcaaaattggtattttatttcattacctgttagtaactacttcaatgatcatttcacaagaaaaagactataaattaagtagagaacaacatttttattgaacatttttggcttgcaatcaaactttgccactaaaaattaacttcataaaacactagtccgttatcaacttcttcacagagaaagtagctatactataccctacatatttatttatttattattctactatagcagaataacaaaacttgatgcattaagccagttctttgcaactgaaaattacctgtttctccttccctttcacactccatgtatatatgatcagcctctccattaaaaagaagctggacatgcaaatacatcatattatgttttctccatattttatgtttttctatgtatctgaatacagtgggataaataattgaaagtagtgttcctatggcattagtgtttttgtgagaagggtaaatgtagtgagaaaggttttttcatggcattaataagaaagcccttctgtaatatatatattattttgtaaacatttcactgaagggccaaaagttaaattataactaaatcactgtgttttcagaatgatatttaacaacaaacccgtggtcaaaccaaaatagtgggttgaagtgtattattcatcttttagtgcattggcaaaaaaaaaaaaaaaaa

SEQ ID NO: 56862 - DNA, 1863 bp, Homo Sapiens
gtctgcccgccgccgccactgctgctgccaccgccgtcgccgccgccgccgccgccgccgctgctgctgccggtgctaaggagttcgctggagccctttcctcagacccggcccggtcttcgcgcccggactcctggcgccagcgctaggcgcactcaccgctctgacgggtgcagacgcgggagttgtcccagactgtggagtggcgggcacggccccagccccccttcccttccctgaccccttcttgccatcgccccagacatggggaacgcggcgaccgccaagaaaggcagcgaggtggagagcgtgaaagagtttctagccaaagccaaagaagactttttgaaaaaatgggagaatccaactcagaataatgccggacttgaagattttgaaaggaaaaaaacccttggaacaggttcatttggaagagtcatgttggtaaaacacaaagccactgaacagtattatgccatgaagatcttagataagcagaaggttgttaaactgaagcaaatagagcatactttgaatgagaaaagaatattacaggcagtgaattttcctttccttgttcgactggagtatgcttttaaggataattctaatttatacatggttatggaatatgtccctgggggtgaaatgttttcacatctaagaagaattggaaggttcagtgagccccatgcacggttctatgcagctcagatagtgctaacattcgagtacctccattcactagacctcatctacagagatctaaaacctgaaaatctcttaattgaccatcaaggctatatccaggtcacagactttgggtttgccaaaagagttaaaggcagaacttggacattatgtggaactccagagtatttggctccagaaataattctcagcaagggctacaataaggcagtggattggtgggcattaggagtgctaatctatgaaatggcagctggctatcccccattctttgcagaccaaccaattcagatttatgaaaagattgtttctggaaagaacttttgatatgaacaaaacaaaactttgagaaaaattaacagacaaggcagtgatttatttttgaagaatttgagaagtgtagactctcaagaggactaaaggtcatatgaagaatgatgagagaaccaaaatacattaaaatcacaaatggaagaagaatattttactaatacaaaaactaagaatgtaaatgttataataattgtttcaaatcatttaattgacagtaattataaagttcttgaatctttactatattacttttatttatattcatataagaaatccaattttctaacaaggatactgtcataactaaatttacatttattaagaaaaactgctttagttaaaattaatgtgtcttcatttttatgcattggcctcgatttgccaatcattctctattggttaaattttatattcagctgtttatgaatatatattcattttatatcaaactttaaaattttgtatctaataatcagcatatattctaaaatcataacagtctaaatcctgggcaccttagaagaatgacaccagaaaaccttattatatcacaatattctgttttccccttcatttatttagaaatatgacaggatatttggtgtacttttgttttttaactaaaagtaccagattatctctccccatgtgggatataaaattatccccatctcttactccctttactcatctaaagtagaagtcatgaaagtggaatttttgccattaaaaggctctgtattatgtgaagttagattgtattaaccatttcccaataaatcatctgtttcaaaactcaaaaaaaaaaaaaaaaaaaaa

SEQ ID NO: 56863 - DNA, 1351 bp, Homo Sapiens
gtgatggagagcaccagcaaagccttagggcccatccctggcctcctgttacccacagaggggtaggcccttggctctcttccactatgacgtcagcttccattcttcctttcttatagacaattttccatttcaaggaaatcagagcccttaatagttcagtgaggtcactttgctgagcacaatcccatacccttcagcctctgctccacagagcctaagcaaaagatagaaactcacaacttccttgttttgttatctggaaattatcccaggatctggtgcttactcagcatattcaaggaaggtcttacttcattcttccttgattgtgaccatgcccaggctctctgctccctataaaaggcaggcagagccaccgaggagcagagaggttgagaacaacccagaaaccttcacctctcatgctgaagctcacacccttgccctccaagatgaaggtttctgcagcgcttctgtgcctgctgctcatggcagccactttcagccctcagggacttgctcagccagattcagtttccattccaatcacctgctgctttaacgtgatcaataggaaaattcctatccagaggctggagagctacacaagaatcaccaacatccaatgtcccaaggaagctgtgatcttcaagaccaaacggggcaaggaggtctgtgctgaccccaaggagagatgggtcagggattccatgaagcatctggaccaaatatttcaaaatctgaagccatgagccttcatacatggactgagagtcagagcttgaagaaaagcttatttattttccccaacctcccccaggtgcagtgtgacattattttattataacatccacaaagagattatttttaaataatttaaagcataatatttcttaaaaagtatttaattatatttaagttgttgatgttttaactctatctgtcatacatcctagtgaatgtaaaatgcaaaatcctggtgatgtgttttttgtttttgttttcctgtgagctcaactaagttcacggcaaaatgtcattgttctccctcctacctgtctgtagtgttgtggggtcctcccatggatcatcaaggtgaaacactttggtattctttggcaatcagtgctcctgtaagtcaaatgtgtgctttgtactgctgttgttgaaattgatgttactgtatataactatggaattttgaaaaaaaatttcaaaaagaaaaaaatatatataatttaaaactaaaaaaaaaaaaaaaaaaaaaaaaaaaaaaaaaaaaaaaaaaaaaaaaaaaaaaaaaaaaaaaaaaaaaaaaaaaaaaaaaaaaaaaaaaaaaaaaaaaaaa

SEQ ID NO: 56864 - DNA, 3948 bp, Homo Sapiens; identical to SEQ ID NO: 29114

SEQ ID NO: 56865 - DNA, 1892 bp, Homo Sapiens
atggatggctccacggactggcccccgccccaggagaaagagtgcgtggccgtggcaacgctgaatcttccccgacttcagttgcatgctgccattagtcaccaggttgacctggaattccttggtttaggtctgggcagcgtcttcctgaacagcctgaagcagaaggtggtgaccctggcaagcagcgcagacgtgctgagcaccgtgcagtcggcctcccaggccatgctgcagagcggctggtccatgctgttgcccaccgctgagaagcaggcccgggcactctgctctcctgtcctgcggagtttcaggcaatgaagtgagcataagtccaggtcatcgattggtgattgatcttctggtgggcagcttgatggctgatggagggttggagtcagccttacacgcagccattactgcagagatccaggatacaaaaaaagaagcacggaaggaaaaagaaatttatgaacaggaagcaaatgcctcaacatttcatagaaggaggactccattggataaagaccttattaatacggggatctgtgagtcttctggcaaacagtgtttgcctctggttcagctcatacaacagcttcttaggtaaatcatattagctgtattgtattgtgttttatttatttacttttttgttttttgagacagagtttcgctcttgttgcccaggcccgagtgcagtggtgcgatcttgactcactgcaacctccgcctcccaggttcaagtaattcctctgcctcagcctctcgagcagctgggattacaggcatgcgccaccatgccccactaattttgtaattttattagagacagggtttcttcatgttggtcaggccggtcttgaactcccaacctcaggtggtccatccactttggcctatcaaaatgttgggattacaggcattagccaccacgcctggcctatttatttacttattaatggtgttttttttttttttttttttttgagatggagtcttgctctatcgtccaggctggagtgcagtgtcacgatcttggctcactgcaacccccgcctcctgggttcaagctattctcctgcctcagcctcccgagtagctgggactacaggcgtctgcaaccacacctggctgatttttgtatttttagtagagatggggttttaccatattggtcaggctggtctcaaattcctgacgtcaggtgacccacctgccttggcctctcaaaatgttgggattacaggtgttagccactgtgcctggcctgtattgtattttaataggtgattattggttttcatattaagatagtgaaatctagcgcaaggatctcaaaaatttgtttgatgattgaaggaatattctgaaaattacctagtatagatgttaggataaagagcagacccttttcaatataggtgagaggagaagttggagggtgtgatgatactcaaaagtttttcactgaagagaaattggggcgtgcagtaaacatgtaaaaagattcttactaataagcaggtggatgcaaatgaaaatcatcatggaaggttatttttaaaactgattgtatcattgcctcactttatatattacagagttatacatactactttgtaagataacttttcttttcaaaactgaagtcaatgtgatagaatggtgagcattattttggaaggccagactaggaggaggtgggaggaagaagtcagactcagcctgtgaacagacgctaaccttggcagaagccaaaacagtcagacagtgttgtgtaaaaatgatcattcaagaagagcgaaacagcaaggtgatttgtgaaagagatttattagaaaatgaaacacatttatacctctgttcaataaaaatctgcttttcgtcaa

SEQ ID NO: 56866 - DNA, 4562 bp, Homo Sapiens
atggcgtctcagcttcaagaaaaatgtattgcatttattgtagacaacttctccaagattattcagagtgaaaattttgctcttcttttacagtcacaagcaatgagcagcacagccgatctgttggacacaattttaaaagcaattgaagaaaatatcaccactgaaaatagctgctctcttcttatggctctggacacactgctgaactctgacagtacaaaggaaatgggttttacgtgcaagatccaggctctgcgtgataagctgtggatcttcctggttcagtctttctatgctgttcgtcacacagaaagctggaagctgatgagcacagatgatcaacagaaaatccaagcagctgcatttgacaaaggtgatgatcgaagacttggcaaaaagcctatattcagtagctcgcagcaaaggaaacaagtttctgactctggtgatataaaaatcaaatcttggaggggaaataacaagaaagagtgttggagttatctctctactaataaaaagatgaaatctgatggattaggagcatctggacattcgtcaagtaccaatagaaatagtataaataaaactctgaagcaagatgatgtaaaggaaaaagatggtacaaaaatagcatctaagattacaaaagaactaaaaactgggggaaaaaatgtttctggaaagcccaaaactgtaacaaaatccaaaacagaaaatggtgataaggcacggttggaaaacatgtcacctagacaagttgtagaaagatcagcaacagcagcagcagcagcaactggacagaagaatttactaaatggaaaaggagtgagaaatcaggaagggcaaatttcaggtgccagacccaaggtactcacaggaaacttaaatgtgcaagccaaagcaaagcctttgaagaaagctacagggaaggattcaccatgcctcagcatcgcaggaccctccagcagatccacagattcaagtatggaattctcaatttccactgaatgtctggatgaaccgaaagaaaatggatcaacagaagaagaaaagccttctggacataaactatccttttgtgattctccaggacagatgatgaaaaacagtgtagatagtgtcaaaaattccactgtagccataaaatctcgacctgtttcaagagttaccaatggaacttccaataaaaaaagtattcatgaacaagacactaatgtaaataacagtgtactaaagaaagtcagtggcaaaggatgtagtgagccagtaccacaggcaattttgaagaaaagaggaactagcaatggatgtactgcagctcagcagaggacaaagagtaccccatctaatcttactaaaactcaaggatcccaaggagagtcaccaaactcagtaaaatcttcagtctcttcaaggcagtctgatgaaaatgtggcaaagttggaccacaatacaactacagagaaacaagcacctaagagaaaaatggtcaagcaagtacacacagctttgcctaaggttaatgcaaaaatagtggcaatgcctaaaaatctaaatcagtcaaagaaaggtgaaactttgaataataaagattcaaaacagaaaatgcctcctggacaggttatatcaaaaactcagccttcctcccaaagacctttaaaacatgaaacatctactgtccaaaaaagtatgtttcatgatgtgcgtgataataacaacaaggacagtgtttctgaacagaagcctcacaaacctctcattaatcttgcatctgaaataagtgatgcagaagcactccagtcatcctgcaggcctgacccacaaaagccattaaacgatcaagaaaaagagaagttggcgttagaatgccaaaatatttcaaagctggataaatcattaaaacacgaactggaatcaaaacagatttgtttagataaaagtgaaacaaaatttcccaatcacaaagaaacagatgattgcgatgcagctaacatatgttgtcattctgttgggagtgataatgtaaattcaaaattttatagcaccacagccctaaaatacatggtttcaaatccaaatgaaaactccttgaactctaatccagtttgtgatttagactcaacaagtgcagggcaaatccatttgatatcagatagggagaaccaagtagggagaaaagatacaaacaaacaatcaagtattaaatgtgtggaagatgtttcactgtgtaatcctgaaaggacaaatggtaccttaaattctgctcaagaagacaaaaaatcgaaagttcctgtggaaggactgacaattcctagtaagttgtcagatgaatctgctatggatgaagacaaacatgctacagcagactcagatgtatcttccaagtgtttttcgggacagctatcagaaaaaaattctcctaaaaatatggaaacatcagaatctccagagagccatgaaactccagaaactccatttgtgggtcactggaatttgagtactggtgttctgcatcagcgagagagtcctgaatctgacactggcagtgctaccacctcctccgatgacataaagcccagatctgaagactatgatgctggagggtctcaggatgatgatgggtcaaatgacagaggtatctctaaatgtggcactatgctgtgccatgattttcttggaagaagtagcagtgataccagtactcctgaagaattaaaaatttatgatagtaatttaagaattgaagtaaaaatgaaaaagcaaagtaataatgatcttttccaagttaattcaacgagtgatgatgaaatccctaggaaaaggccagaaatttggtctcgatctgcaatagttcactctagggaaagagaaaatattccacgaggcagtgtccagtttgctcaggaaatagatcaggtatcttcttcagcagatgaaacagaagatgaaagatctgaagctgaaaacgttgcagaaaatttctctatatctaacccagctcctcagcagtttcagggaataattaatttagcttttgaagatgcaactgaaaatgaatgtcgtgaattttctgcaactaaaaagtttaaaaggtcagttttactttcagtcgatgaatgtgaagagctgggatcagatgaaggagaagtccatactccctttcaggcttctgtagattctttttcaccttctgatgtttttgatggcatttctcatgaacatcatggaaggacctgctattccagattctcacgagaaagtgaagataatattttagaatgtaaacaaaataaaggcaatagtgtatgtaaaaatgaaagcactgtcttggatcttagtagcattgactcttcaagaaaaaataaacagagtgtttcagccacagaaaaaaagaacacaatagacgtcctatccagtagaagcagacagcttcttcgagaagataaaaaagtaaacaatggaagcaatgtggaaaatgacattcagcaacgcagcaaattcttggatagtgatgtaaaatctcaagaaagaccatgtcacttggatcttcatcaaagagaacccaattctgacataccaaagaacagctctacaaaatctctagactcctttcggagtcaagttctgcctcaggaaggtccagtgaaagagagccattctacaactactgaaaaagctaatattgctttatctgcaggagacatagatgattgtgacacactggcacaaacccgcatgtatgaccatcggccttcaaaaaccctgtctccaatatatgagatggatgtaatagaagcatttgagcagaaagtggaatcagaaacacatgttacagatatggattttgaagatgaccaacattttgcaaaacaagattggacactactaaagcaactgctctctgaacaggattcaaacttagatgttacaaattccgttcctgaagacttaagtttagcacagtatctaatcaatcagacactacttttagcacgagatagctcaaaacctcagggtataacacatattgacactttgaacagatggagtgaactaacatctccacttgattcctcagcgagcatcaccatggctagtttttcctctgaagattgttcgcctcaaggcgagtggacaattctggaactggaaactcagcattaagtgttaacattttggaaaaatttatgccactcctttattttttgatgcctatattatatccaaatgataattgcattagccggatataaactttctttaatattgagtctttccaatttaatgaggtaaacatagtttatttattaatatatcacatatagaaaaatgtttttctaaagtttttgagcatgttttctctaattattagagaaattagaagacttataaggaaaccctagcttcagttttcctttcctagctgatgatttgttcacttaatcattattcaagaatttaaaatgtgaatgcagaagtagatcagtccctttactttttgctctgcatagggtaacatagtaatttaacaataaaaacttaccgtgcttgtgtccatt

SEQ ID NO: 56867 - DNA, 4887 bp, Homo Sapiens; identical to SEQ ID NO: 23705
  misc_feature (2870)..(2870): n is a, c, g, or t
  misc_feature (3527)..(3527): n is a, c, g, or t
  misc_feature (3901)..(3901): n is a, c, g, or t
  misc_feature (3978)..(3978): n is a, c, g, or t

SEQ ID NO: 56868 - DNA, 1614 bp, Homo Sapiens
atggttagcgatttgccagaatggccaggtattatgagagagaacgcagaccgcggaactgagagtagacccacgtgtacttccctgtggctccaagaagcgccagctcgctcatttgctcacacccagcaggcagagaaggcagcagcaggcaggaccgccaccctcccatgcaaatcacccccgggagtgcagctgggctcctcccgctcctcctgggcaatgctcctggggagtctgtggggaagatgccatccagggcgctgtgcgctcttcctcatcctcgccctcctgctggacgcggtcggcctggtccttttgctgctggggatcttggcccccctgagttcctgggacttcttcatctacacaggtgccctgatcctggctctcagcctactgctctggatcatctggtattccctcaacattgaggtgtctcctgaaaaactggacctgtaatttggccatgggaagaggagaagagacgcaggtgctgtatgcagacatgtctgtgaacctggggctcttgggcagcaacacgttgcagcttccacctagcaagccacgccgggaccaggtcccatctgatggaggagaatcaattcaaggagatgcccttcctttacagaacaccctttaacagcatccaggaggaacgagaggctgcaatactgaggctttcaaagtactcacgaggatgtccgagaatggctgtgatgccaggcttctggcaggttccagactccatcacaagcccagcatccctgcaccagatctgacatcgctgctgttgtgccagctgtttatgaagggcctgagtagctagcaggtttttatcaggagccctgctgggggcttagacaccaaaagagaagactcatcctctgtagttcttcttgtgaatgtccttttagaaaaacaattagaaccaaccacaagcaccaaagtcctaatgggatctcctgcgagcacatatcaagcaggattgttgctatttctcctcactggctctttggacagactgtgtgagctcctggagggttccactgtatctaccctttgacactgaccagttggcacatggtgacatattccaatgtgttgattgcaaatgtgaacgtacagccagtgctgtgtgcgggaggactctctcctcctcagtggggccacaccgtgcactattaatggagccccactcctttgcacagcctggccatgcagtggctcatattgaggttttagccaactgaaatctcccgtgcatttttctgacaagccagctaggcctctgctatgctgtccttgtgtctttcatttgatgaccttaagggtgggactgttttatcttaagttacaggtggtcaagtccagcccaaggacagcaactctgagggtcaagcctcataggctaactggatagatgttctctgctttgccacccactggagcccgacctgccccactaatttatatttcccctggtctcattttgtactttttatttataattcacccttaaagtgtatgtgtctcttataagctgcctccgatctttcatggtatgaggtggttacctaaataaagaaggagatttggcctttgtttttatgt

SEQ ID NO: 56869 - DNA, 1785 bp, Homo Sapiens
gagcggcgagggggcgggggaggggctgagccggaggcggctcacctggcgggacaggtgcctggctgctacaaaccatgcaatgagccatgccccgccctggacacccccgcccagcatctgggcctccacgcttgggaccgtgggagcggccaacagagctatgtctggagacatatgataaaccacctcagcccccaccaagccgccgcacccgtagaccagaccccaaggaccctggccaccatgggccagagagcattaccttcatctctggctctgctgagccggcccttgagtcccccacctgctgcctgctctggcgaccctgggtgtgggagtggtgccgggctgccttctgcttccgccgctgccgggattgcctccagcgctgtggagcctgtgtgcggggatgcagcccctgcctgtctactgaggactccactgaggggactgctgaagccaactgggccaaggagcacaatggagtgccccccagccctgatcgtgcaccccccagccggcgggatggccagcagctcaagtcaaccatgggcagcagcttcagctaccccgatgttaagctcaaaggcatccctgtgtatccctacccgagggccacctccccagcccctgatgcggactcctgctgcaaggagccactggccgatcccccacccatgcgacacagcctgcccagcacctttgccagtagtcctcgtggctccgaggagtactattctttccatgagtcggacctggacctgccggagatgggcagtggctccatgtcgagccgagaaattgatgtgctcatcttcaagaagctgacagagctgttcagcgtacaccagatcgatgagctggccaagtgcacatcagacactgtgttcctggagaagaccagtaagatctcggaccttatcagcagcatcacgcaggactaccacctggatgagcaggatgctgagggccgcctggtacgcggcatcattcgcattagtacccgaaagagccgtgctcgcccacagacctcggagggtcgttcaactcgggctgctgccccaaccgctgctgcccctgacagtggccatgagaccatggtgggctcaggtctcagccaggatgagctgacagtgcagatctcccaggagacgactgcagatgccatcgcccggaagctgaggccttatggagctccagggtacccagcaagccatgactcatccttccagggcaccgacacagactcgtcgggggcacccttgctccaggtgtactgctgacccctgccaggcccagctgccacaccctttctgggagaagcatggcctacagaatgaagagggggaccaggaacccctgtgggagaggcttagacctgaagcagtgcccactctggctcctcctgccttggctgactgggttcctggaccatgtgcatttcactgggccatgggatctacatctccttgcatccccagctggtctgatccctgccagggccccttccttcctgctcatggtcttcaggtggcctgatcatggaaagtaaggagttaggcattaccttctgggagtgaaccctgactccatccccctattgccaccctaaccaatcatgcaaacttctccctccctggggtaattcaacagttaaaagaagcttatcttaaatgtattgtattggggggtgggcagggcccactctatgttatgttaaggagttggttctggttcttggctgatgttctgtatcttaacatgaccacagtttgtaagtac

SEQ ID NO: 56870 - DNA, 6767 bp, Homo Sapiens
catggatcctttggattttgattccagttgatccctggagtaaggtcctaaccggggtctcccgaggtcgtttcgccgtccaggatggagcaggcggggagctcgcaccgccgcgcccgggccgcgagtgatgataacctaagaggccggcgcgggcgggcgtgagcggcggaggagccgggcgcggcgacacgcggccatggagcgggagccggcggggaccgaggagcccgggcctccgggacggcggaggcgccgagagggcaggacgcgcacggtgcgctccaacctgctgccgcccccgggcgccgaggaccctgcggctggcgcggccaagggcgagcggcgacggcggcgcgggtgtgcccagcacctggccgacaaccggctcaagactaccaagtacacgctgctgtccttcctgcccaagaacctgttcgagcagttccaccgcccggccaacgtgtactttgtcttcatcgcgctgctcaacttcgtgccggcggtgaacgccttccagcccggcctggcactggcgccggtgctcttcatcctggccatcacggccttcagggacctgtgggaggactacagccgccaccgctccgaccacaagatcaaccacctgggctgcctggtcttcagcagggaagaaaagaaatacgtgaaccgattctggaaagaaatccacgtgggagactttgtgcgtcttcgctgcaacgaaatcttccctgcggacattctgctgctctcctccagtgaccccgacgggctatgccacatcgagaccgccaacctggatggagagaccaacctgaagcggcggcaggtggtccgcggcttctcggagcttgtctccgaattcaatcctttgacgttcaccagcgtgatcgaatgcgagaagccaaacaacgacctgagtaggtttcgcggctgcatcatacatgacaacgggaaaaaggccgggctgtataaagaaaacctgctgctgaggggctgcacccttaggaacacggacgcagtcgtcggcattgtcatctacgcaggacatgaaaccaaggctctgctgaacaacagtgggccccgctacaagcgcagcaagctggagaggcagatgaactgcgacgtgctctggtgtgtcctgctccttgtttgcatgtctctgttttcagcagtcggacatggactgtggatatggcggtatcaagagaagaagtcattattttatgtccccaagtctgatggaagctccttatccccagtcacagctgcagtttactcatttttaacaatgataatagttctgcaggttttgatcccaatttccttatacgtttccattgaaattgttaaagcatgccaagtgtacttcattaaccaggacatgcagttgtatgacgaagaaacagactcgcagctgcagtgccgagctctgaacatcacggaagacttaggacagatacagtacattttctcagataaaactggcactttgacagagaataagatggttttccgaagatgcactgtgtctggtgtagaatattctcatgatgcaaatgcgcagcgtctggccaggtaccaagaggcagactcggaggaggaggaggtggtgcccagagggggctcggtgtcccagcgcggcagcatcggcagccaccagagtgtccgggtggtgcacagaacccagagcaccaagtcccaccggcgcacgggcagccgggccgaggccaagagggccagcatgctgtccaagcacacggccttcagcagccccatggagaaggatatcacgcccgacccaaagctgctggagaaggtgagtgagtgtgacaagagcctagccgtggcgaggcatcaggagcacctgctggcccacctctcgcccgagctgtctgacgtctttgatttcttcatcgcactcaccatctgcaacacagtcgtcgtcacgtccccggatcagccacgaacaaaggtgagggtgaggtttgagctgaagtccccggtgaagacgatagaagacttcctgcggaggttcacacccagctgcctgacctcaggctgcagcagcatcgggagcctggccgccaacaagtccagccacaagttgggctccagcttcccgtccaccccgtccagcgacggcatgcttctcaggctggaggagaggctgggccagcccacctcggccatcgccagcaacggctacagcagccaggcggacaactgggcctcggagcttgctcaggagcaggagtcagagcgcgagctgcggtacgaggcggagagcccggatgaggccgcactggtgtatgcggccagagcctacaactgcgtgcttgtggagcggctgcacgaccaagtgtcagtggagctgccccacctgggcaggctcaccttcgagctcctgcacacactgggtttcgattccgtccgcaagaggatgtcagtggtgatccggcacccgcttaccgatgagatcaacgtctacaccaagggggccgactcagtggtcatggatctcctgcagccctgctcttcagttgacgccagagggaggcatcaaaaaaagattcggagcaaaactcagaattacctcaacgtgtatgcggcggaaggcctgcgcaccttgtgcatcgccaagagagttctgagtaaagaagagtatgcctgctggttgcaaagccacctagaagccgaatcctccctggaaaacagcgaggagctcctcttccagtctgccattcgcctggagaccaacctgcacttgttaggtgccactgggattgaagaccgcctgcaggacggagtccctgaaactatttctaaattgcgtcaagcgggcctgcagatttgggttctcactggtgacaaacaagaaacagctgtcaacattgcatatgcctgcaaactgctggaccacgacgaggaggtcatcaccctgaatgccacctcccaggaggcgtgtgcagccctgctagaccagtgcctatgctacgtgcagtccagaggcctccagagagcccctgagaagaccaagggcaaagtgagcatgaggttctcctctctctgcccaccctccacgtccactgcctctggccgcagacccagcctcgtgatcgatgggagaagcctggcctacgctctcgagaaaaacctggaggacaaattcctcttccttgccaagcagtgccgctccgtcctctgctgtcggtcgacgcctctgcagaagagcatggtggtgaagctggtgcggagcaagctcaaggccatgaccctggccataggtgatggagccaatgatgtcagcatgatccaggtggcagatgtgggtgtgggaatctccggccaggagggtatgcaggcagtgatggccagcgactttgcagtgccgaaattccgatacctggagaggctcttgattcttcacgggcattggtgctactcccgacttgccaacatggtgctgtacttcttctacaaaaacacaatgttcgtgggcctcctgttttggttccagtttttctgtggcttctctgcatctaccatgattgaccagtggtatctaatcttctttaatctgctcttctcgtcacttcccccgctcgtgactggggtgctggacagggatgtgccagccaatgtgctgctgaccaacccgcagctctacaagagtggccagaacatggaggaataccggccacgaacgttctggtttaacatggccgacgccgccttccagagcctggtttgcttttccattccttacctggcctactatgactcgaacgtggacctgtttacctgggggacccctattgtgacaatcgcgctgctcactttcctgctccacctgggcattgaaaccaaaacctggacctggctcaactggataacgtgtggcttcagtgtccttttgtttttcaccgtggctttgatttacaatgcgtcttgtgccacgtgctatcctccgtccaacccttactggactatgcaagccttactgggtgacccagtgttttacttgacttgcctgatgacgcctgtcgctgcactgctgcccagattgtttttcagatccctccaggggagggttttccccacacaacttcagctggcacgtcagttgaccaggaagtcccccaggagatgcagtgctcccaaagagacctttgctcagggacgcctcccgaaggactcgggaaccgagcactcatcagggaggacagtcaagacctctgtgcccctgtcccagccttcttggcacacacagcagccggtctgctccctggaggccagcggggagcccagcacagtggacatgagcatgccagtgagggagcacaccctgctggaggggctgagcgcaccggcccccatgtcctctgcgccaggggaggctgtcctgaggagtccaggagggtgtcctgaggagtccaaggtgagagctgccagcaccggcagggtgacccccctgtcttccctcttcagcctgcctaccttcagcttactcaactggatttcctcctggtcgctggtcagcaggctggggagtgtcttacagttctcccggacggagcagcttgcagatggacaagcgggacgtggacttcctgtccagccccactcaggccgatcaggacttcaagggccagaccacagactacttataggagcatcttcaaggcggtcacagtgaaaaccttgaaatggccttttttaatatatataaataaatgttaatattatttatgtttattatttgcacagaagagttctagggagatgtatttctaaatgtttcccaggctaatacaggaaacaagaggtaccaaaaaagaaagtttattttttaaaattctaagtagagtatattgaaaagaaaaagaagagccttaacatatataaaagtttaaagaagagtaacacttgaaaagtgtgtttagatttattttttcatctcatttttaagaacaagcagtacgatttgttttcttcaacatgtgtgactgcgcactgagtacaaatgtgtgactgctcatggttaatgcaggcaggtgtgaacatgggggaacaatgagcagagatggcagagggcagagcacatggcccccagaggcttccagtctcactgacacaggagggctgggctccacttcatccagatgaaggaaaggaagacctcaagaaaaattcacagttgagtgcatcccagcattctgttccgggcaggcatttcaggaagaccgccttgtaggtattacatccctggtgtcgtattttgcctgttaaatcgtaacaagcaataaacaactttcactttgcaaagacagtgtgtccagttaccactggtgtatgaaatgattaatacctgacctcacagagtatgatctgagggcacttccgtaaggcaagtccttttagaggctatgaagaaaacagctgcatggcacataccaaagctgctgcacagccggccaccatggcaccctgcaccaggccatcagcaccacgtgccaaggagctcagcggtcttcaggcatttttgtaatgagccattagttctgtccctctaaaactagaaaaggaagggcaggaaatgataacaacccaaggcaatgatatggcatgtcatcttctgagcccttctttctactttgtcaaacagttcttagttgctggctctgctcggcaccggggctgtgaagggtgtactccctgctgtgtgggagggacctagggcctctttggatgctgtcttcgaggacagcaatgcagagagggcataggatctgaggacaaggaaattcctcagcatggcgtatcaggaaagcatggctcattctgcaatgagccatgagtgtgggccatcgcaagtcacagaaattgcacctcattccagtcaagcagaaaaacaggcacaggctcagtgtaggtcccaagagagggtgcctggactcagcaactcggacctgggcttttctcccagctttcagggacagctttgtcctgagtctgcctctgttcacggggatgcttggctggagtcacccccaggacttatccatgcatcactattcagaagacacagagggcccctctctccacattccaaacagagtcctggtttcctcagcctcaccctgcatagcttgcacaacatcctcagaaccattcactggcaaatggaggggaacgtgctgactgggactcccagctggagctgggaggagaggtccacttcccttagaacacctgagctgctgcatgagtggacgtcagaagaatctctatgccctgttaaatggggagacaaaggggtggtgggggcttcagccagtgatttcggaccgaaggtgacagccgtcccaaccctgcccagcctgatgccacctcctctgttcttggaacaacgcataggaaaagaatctcctttggaaggtgacactgctccctgaattaaggtaatggttgcgagcaccaagtacaaggactagacgcatatttacctgcgtatctgagagttccagattcccagcttccagatgatccttgcacagacaacctaccttctttccagaggatgtctttctcctctggagagtagatgcttgctcttgggaaacggaatgaccttggcgctggcttcaggaatatgcatcccacagccagtttagagaaatacatgttgtaaatggcattgacagctgctctttaggatggggagtattatggaaatccacaataacaatctatggcaagcaact

SEQ ID NO: 56871 - DNA, 1723 bp, Homo Sapiens
ggtcgcggtccccccctcaacatggcggcagcggtgctctaggcgccggaagggggcgtgaatcggtgcgaccgcgcgcgtgcgcagtaccgggtccgcgcctgtccccgaaacttcgcaccccgtcgaactctcgcgagagcggtatctgcgtgtcgggacgtgcggaggctctcactttccgtcatggcgctgaaggtagcgaccgtcgccggcagcgccgcgaaggcggtgctcgggccagcccttctctgccgtccctgggaggttctaggcgcccacgaggtcccctcgaggaacatcttttcagaacaaacaattcctccgtccgctaagtatggcgggcggcacacggtgaccatgatcccaggggatggcatcgggccagagctcatgctgcatgtcaagtccgtcttcaggcacgcatgtgtaccagtggactttgaagaggtgcacgtgagttccaatgctgatgaagaggacattcgcaatgccatcatggccatccgccggaaccgcgtggccctgaagggcaacatcgaaaccaaccataacctgccaccgtcgcacaaatctcgaaacaacatccttcgcaccagcctggacctctatgccaacgtcatccactgtaagagccttccaggcgtggtgacccggcacaaggacatagacatcctcattgtccgggagaacacagagggcgagtacagcagcctggagcatgagagtgtggcgggagtggtggagagcctgaagatcatcaccaaggccaagtccctgcgcattgccgagtatgccttcaagctggcgcaggagagcgggcgcaagaaagtgacggccgtgcacaaggccaacatcatgaaactgggcgatgggcttttcctccagtgctgcagggaggtggcagcccgctaccctcagatcaccttcgagaacatgattgtggataacaccaccatgcagctggtgtcccggccccagcagtttgatgtcatggtgatgcccaatctctatggcaacatcgtcaacaatgtctgcgcgggactggtcgggggcccaggccttgtggctggggccaactatggccatgtgtacgcggtgtttgaaacagctacgaggaacaccggcaagagtatcgccaataagaacatcgccaaccccacggccaccctgctggccagctgcatgatgctggaccacctcaagctgcactcctatgccacctccatccgtaaggctgtcctggcatccatggacaatgagaatgtgaggttcccctcgcaccctaccctgctgccccgcccagtctccccctgcagcctcctgtagcccgcctcatgcactgaccacagcccccaggggaggatggtactggatctggccccatcttctggcccttagctggtgccacttccctcctgtggcaatcccagtcctgcacgtcacaggagacagcggggggtggcagggcctggtgtgtgccgagcctgcctgtgtcctacagatgcacactccggacatcgggggccagggcacaacatctgaagccatccaggacgtcatccgccacatccgcgtcatcaacggccgggccgtggaggcctaggctggccctaggaccttcttggtttgctccttggattccccttcccactccagcaccccagccagcctggtacgcagatcccagaataaagcaccttctccctagaaaaaaaaaaaa

SEQ ID NO: 56872 - DNA, 1197 bp, Homo Sapiens
atggggacctgtgacattgtgactgaagccaatatctcatctggccctgagagcaacaccacgggcatcacagccttctccatgcccagctggcagctggcactgtgggcaccagcctacctggccctggtgctggtggccgtgacgggtaatgccatcgtcatctggatcatcctggcccatcggaggatgcgcacagtcaccaactacttcatcgtcaatctggcgctggctgacctctgcatggctgccttcaatgccgccttcaactttgtctatgccagccacaacatctggtactttggccgtgccttctgctacttccagaacctcttccccatcacagccatgtttgtcagcatctactccatgaccgccattgctgccgacaggtacatggccatcgtccaccccttccagcctcggctttcagctcccagcaccaaggcggttattgctggcatctggctggtggctctcgccctggcctcccctcagtgcttctactccaccgtcaccatggaccagggtgccaccaagtgcgtggtggcctggcccgaagacagcgggggcaagacgctcctcctgtaccacctcgtggtgatcgccctcatctacttcctgccgctcgcggtgatgtttgtagcctacagcgtcatcggcctcacgctctggaggcgcgcagtgcccggacatcaggcgcacggtgccaacctccgccatctgcaggccaagaagaagtttgtgaagaccatggtgctggtggtgctgacgtttgccatctgctggctgccctaccacctctacttcatcctgggcagcttccaggaggacatctactgccacaagttcatccagcaagtctacctggcactcttctggttggccatgagctctaccatgtacaatcccatcatctactgctgtctcaaccacaggtttcgctctgggttccggcttgccttccgctgctgcccatgggtcacacccaccaaggaagataagctcgagctgactcccacgacctccctctccacgagagtcaacaggtgtcacactaaggagactttgttcatggctggggacacagccccctccgaggctaccagtggggaggcggggcgtccccaggatggatcagggctatggtttgggtatggtttgcttgcccccaccaaaactcatgttgaaatttga

SEQ ID NO: 56873 - DNA, 3549 bp, Homo Sapiens
gcttgtacctgctgtgcagtgaggactccaggaactgatgatgaaccggcacggtcctcggcacgtggcaagttctccataagtgggctcagtaaaatccctctcccgggaaagcgccccaccgtgtttggtggggtgactgggacgcgaggatgcggctgggagtgtgatgagaagggcggggatcggcgaggactccaggctggggttgcaggcccagccaggggcggagccttctccgggtcgggcggggacagagcgctcccttggaggcgcccagggacctggccagccgtgcagctgcccaggcgctatggcgagtgcggtcagggggtcgaggccgtggccccggctggggctccagctccagttcgcggcgctgctgctcgggacgctgagtccacaggttcatactctcaggccagagaacctcctgctggtgtccaccttggatggaagtctccacgcactaagcaagcagacaggggacctgaagtggactctgagggatgatcccgtcatcgaaggaccaatgtacgtcacagaaatggcctttctctctgacccagcagatggcagcctgtacatcttggggacccaaaaacaacagggattaatgaaactgccattcaccatccctgagctggttcatgcctctccctgccgcagctctgatggggtcttctacacaggccggaagcaggatgcctggtttgtggtggaccctgagtcaggggagacccagatgacactgaccacagagggtccctccaccccccgcctctacattggccgaacacagtatacggtcaccatgcatgacccaagagccccagccctgcgctggaacaccacctaccgccgctactcagcgccccccatggatggctcacctgggaaatacatgagccacctggcgtcctgcgggatgggcctgctgctcactgtggacccaggaagcgggacggtgctgtggacacaggacctgggcgtgcctgtgatgggcgtctacacctggcaccaggacggcctgcgccagctgccgcatctcacgctggctcgagacactctgcatttcctcgccctccgctggggccacatccgactgcctgcctcaggcccccgggacacagccaccctcttctctaccttggacacccagctgctaatgacgctgtatgtggggaaggatgaaactggcttctatgtctctaaagcactggtccacacaggagtggccctggtgcctcgtggactgaccctggcccccgcagatggccccaccacagatgaggtgacactccaagtctcaggagagcgagagggctcacccagcactgctgttagatacccctcaggcagtgtggccctcccaagccagtggctgctcattggacaccacgagctacccccagtcctgcacaccaccatgctgagggtccatcccaccctggggagtggaactgcagagacaagacctccagagaatacccaggccccagccttcttcttggagctattgagcctgagccgagagaaactttgggactccgagctgcatccagaagaaaaaactccagactcttacttggggctgggaccccaagacctgctggcagctagcctcactgctgtcctcctgggagggtggattctctttgtgatgaggcagcaacagccgcaggtggtggagaagcagcaggagacccccctggcacctgcagactttgctcacatctcccaggatgcccagtccctgcactcgggggccagccggaggagccagaagaggcttcagagtccctcaaagcaagcccagccactcgacgaccctgaagctgagcaactcaccgtagtggggaagatttccttcaatcccaaggacgtgctgggccgcggggcaggcgggactttcgttttccggggacagtttgagggacgggcagtggctgtcaagcggctcctccgcgagtgctttggcctggttcggcgggaagttcaactgctgcaggagtctgacaggcaccccaacgtgctccgctacttctgcaccgagcggggaccccagttccactacattgccctggagctctgccgggcctccttgcaggagtacgtagaaaacccggacctggatcgcgggggtctggagcccgaggtcgtgctgcagcagctgatgtctggcctggcccacctgcactctttacacatagtgcaccgggacctgaagccaggaaatattctcatcaccgggcctgacagccagggcctgggcagagtggtgctctcagacttcggcctctgcaagaagctgcctgctggccgctgtagcttcagcctccactccggcatccccggcacggaaggctggatggcgcccgagcttctgcagctcctgccaccagacagtcctaccagcgctgtggacatcttctctgcaggctgcgtgttctactacgtgctttctggtggcagccacccctttggagacagtctttatcgccaggcaaacatcctcacaggggctccctgtctggctcacctggaggaagaggtccacgacaaggtggttgcccgggacctggttggagccatgttgagcccactgccgcagccacgcccctctgccccccaggtgctggcccaccccttcttttggagcagagccaagcaactccagttcttccaggacgtcagtgactggctggagaaggagtccgagcaggagcccctggtgagggcactggaggcgggaggctgcgcagtggtccgggacaactggcacgagcacatctccatgccgctgcagacagatctgagaaagttccggtcctataaggggacatcagtgcgagacctgctccgtgctgtgaggaacaagaagcaccactacagggagctcccagttgaggtgcgacaggcactcggccaagtccctgatggcttcgtccagtacttcacaaaccgcttcccacggctgctcctccacacgcaccgagccatgaggagctgcgcctctgagagcctcttcctgccctactacccgccagactcagaggccaggaggccatgccctggggccacagggaggtgaggtgggctggatgccacacagatggtctccgtgctggctcactgaagagctgagcctgtggctggcctcagaatcaggctgggtgcagtggctcacacctgtaatcccagcattttgggaggctgagtgagaggatcacttgagctcaggagttcgagaccagcctggccaacatggcaacaccccatttctacaaaaaatttgtaaaattagccaggcatggtggcgcacgcctgtagtcccagctgcttgggaggctgaggtgggagaatcacttgagcccaggagttcgaggctgcagtgagccaggatcatgccactgcactccagcctggtccacagagagacactgtcaccccctttcccccacaagactggcagaggctgggcagcctggggctgatgaagcagagatgttcgctggatcccaggccctggcacccctcaggaaatac

SEQ ID NO: 56874 - DNA, 1438 bp, Homo Sapiens
agcacttcctcatagaccttggatgtgggaggattgcattcagtctagttcctggttgccggctgaaataacctgaattcaagccaggaagaagcagcaatctgtcttctggattaaaactgaagatcaacctactttcaacttactaagaaaggggatcatggacattgaagcatatcttgaaagaattggctataagaagtctaggaacaaattggacttggaaacattaactgacattcttcaacaccagatccgagctgttccctttgagaaccttaacatccattgtggggatgccatggacttaggcttagaggccatttttgatcaagttgtgagaagaaatcggggtggatggtgtctccaggtcaatcatcttctgtactgggctctgaccactattggttttgagaccacgatgttgggagggtatgtttacagcactccagccaaaaaatacagcactggcatgattcaccttctcctgcaggtgaccattgatggcaggaactacattgtcgatgctgggtttggacgctcataccagatgtggcagcctctggagttaatttctgggaaggatcagcctcaggtgccttgtgtcttccgtttgacggaagagaatggattctggtatctagaccaaatcagaagggaacagtacattccaaatgaagaatttcttcattctgatctcctagaagacagcaaataccgaaaaatctactcctttactcttaagcctcgaacaattgaagattttgagtctatgaatacatacctgcagacatctccatcatctgtgtttactagtaaatcattttgttccttgcagaccccagatggggttcactgtttggtgggcttcaccctcacccataggagattcaattataaggacaatacagatctaatagagttcaagactctgagtgaggaagaaatagaaaaagtgctgaaaaatatatttaatatttccttgcagagaaagcttgtgcccaaacatggtgatagattttttactatttagaataaggagtaaaacaatcttgtctatttgtcatccagctcaccagttatcaactgacgacctatcatgtatcttctgtacccttaccttattttgaagaaaatcctagacatcaaatcatttcacctataaaaatgtcatcatatataattaaacagctttttaaagaaacataaccacaaaccttttcaaataataataataataataataaaaaatgtattttaaagatggcctgtggttatcttggaaattggtgatttatgctagaaagcttttaatgttggtttattgttgaattcctagaaaagttttattggtagatgagtaaataaaatattgtaaaaaaacttattgtctataaagtatattaaaacattgttggctaataaaaaaaaaaaaaaa

SEQ ID NO: 56875 - DNA, 1791 bp, Homo Sapiens; identical to SEQ ID NO: 29760

SEQ ID NO: 56876 - DNA, 1931 bp, Homo Sapiens
atgaccctcttaccgggagacaattctgactacgactacagcgcgctgagctgcacctcggacgcctccttccacccggccttcctcccgcagcgccaggccatcaagggcgcgttctaccgccgggcgcagcggctgcggccgcaggatgagccccgccagggctgtcagcccgaggaccgccgccgtcggatcatcatcaacgtaggcggcatcaagtactcgctgccctggaccacgctggacgagttcccgctgacgcgcctgggccagctcaaggcctgcaccaacttcgacgacatcctcaacgtgtgcgatgactacgacgtcacctgcaacgagttcttcttcgaccgcaacccgggggccttcggcactatcctgaccttcctgcgcgcgggcaagctgcggctgctgcgcgagatgtgcgcgctgtccttccaggaggagctgctgtactggggcatcgcggaggaccacctggacggctgctgcaagcgccgctacctgcagaagattgaggagttcgcggagatggtggagcgggaggaagaggacgacgcgctggacagcgagggccgcgacagcgagggcccggccgagggcgagggccgcctggggcgctgcatgcggcgactgcgcgacatggtggagaggccgcactcggggctgcctggcaaggtgttcgcctgcctgtcggtgctcttcgtgaccgtcaccgccgtcaacctctccgtcagcaccttgcccagcctgagggaggaggaggagcagggccactgttcccagatgtgccacaacgtcttcatcgtggagtcggtgtgcgtgggctggttctccctggagttcctcctgcggctcattcaggcgcccagcaagttcgccttcctgcggagcccgctgacgctgatcgacctggtggccatcctgccctactacatcacgctgctggtggacggcgccgccgcaggccgtcgcaagcccggcgcgggcaacagctacctggacaaggtggggctggtgctgcgcgtgctgcgggcgctgcgcatcctgtacgtgatgcgcctggcgcgccactccctggggctgcagacgctggggctcacggcccgccgctgcacccgcgagttcgggctcctgctgctcttcctctgcgtggccatcgccctcttcgcgcccctgctctacgtcatcgagaacgagatggccgacagccccgagttcaccagcatccctgcctgctactggtgggctgtcatcaccatgacgacggtgggctatggcgacatggtccccaggagcaccccgggccaggtagtggccctgagcagcatcctgagcggcatcctgctcatggccttcccagtcacctccatcttccacaccttctcccgctcctacctggagctcaagcaggagcaagagagggtgatgttccggagggcgcagttcctcatcaaaaccaagtcgcagctgagcgtgtcccaggacagtgacatcttgttcggaagtgcctcctcggacaccagagacaataactgagcgcggaggacacgcctgccctgcctgccatctgtggcccgaagccattgccatccactgcagacgcctggagagggacaggccgcttccgagtgcagtcctggcgcagcaccgactcccacgcacccggggaaggacaccctcactcccacaccccgggaagaacactagaacatcagcagaggggccctgcccctccgcctgcagccgtgaaaggaagctgggtcatcagcccagccccgcccaccccagcccctatgtgtgtttccctcaataaggagatgccttgttcttttcaccatgcaaataacatgcccagcaaaaacttgctttatgggtctgcctggagaaaaaaaaaaaaaatacaaacagcagaaacagcaaaaaaa

SEQ ID NO: 56877 - DNA, 3580 bp, Homo Sapiens
ggaaaggaaaccggcactgcctgccggctttacatctgttgatctgacctgactggaagcgtccaaagagggacggctgtcagccctgcttgactgagaacccaccagctcatcccagacacctcatagcaacctatttatacaaagggggaaagaaacacctgagcagaatggaatcattatttttttcccaaggagaaaaccggggtaaagggagggaagcaattcaatttgaagtccctgtgaatgggctttcagaaggcaattaaagaaatccactcagagaggacttggggtgaaacttgggtcctgtggttttctgattgtaagtggaagcaggtcttgcacacgctgttggcaaatgtcaggaccaggttaagtgactggcagaaaaacttccaggtggaacaagcaacccaggttctgctgcaagcttgaaggagcctggagcgggagaaagctaacttgaacatgacctgttgcatttggcaagttctagcaacatgctcctaaggaagcgatacaggcacagaccatgcagactccagttcctcctgctgctcctgatgctgggatgcgtcctgatgatggtggcgatgttgcaccctccccaccacaccctgcaccagactgacacagcccaagccagcaagcacagccctgaagccaggtaccgcctggactttggggaatcccaggattgggtactggaagctgaggatgagggtgaagagtacagccctctggagggcctgccaccctttatctcactgcgggaggatcagctgctggtggccgtggccttaccccaggccagaaggaaccagagccagggcaggagaggtgggagctaccgcctcatcaagcagccaaggaggcaggataaggaagccccaaagagggactggggggctgatgaggacggggaggtgtctgaagaagaggagttgaccccgttcagcctggacccacgtggcctccaggaggcactcagtgcccgcatccccctccagagggctctgcccgaggtgcggcacccactgtgtctgcagcagcaccctcaggacagcctgcccacagccagcgtcatcctctgtttccatgatgaggcctggtccactctcctgcggactgtacacagcatcctcgacacagtgcccagggccttcctgaaggagatcatcctcgtggacgacctcagccagcaaggacaactcaagtctgctctcagcgaatatgtggccaggctggagggggtgaagttactcaggagcaacaagaggctgggtgccatcagggcccggatgctgggggccaccagagccaccggggatgtgctcgtcttcatggatgcccactgcgagtgccacccaggctggctggagcccctcctcagcagaatagctggtgacaggagccgagtggtatctccggtgatagatgtgattgactggaagactttccagtattacccctcaaaggacctgcagcgtggggtgttggactggaagctggatttccactgggaacctttgccagagcatgtgaggaaggccctccagtcccccataagccccatcaggagccctgtggtgcccggagaggtggtggccatggacagacattacttccaaaacactggagcgtatgactctcttatgtcgctgcgaggtggtgaaaacctcgaactgtctttcaaggcctggctctgtggtggctctgttgaaatccttccctgctctcgggtaggacacatctaccaaaatcaggattcccattcccccctcgaccaggaggccaccctgaggaacagggttcgcattgctgagacctggctggggtcattcaaagaaaccttctacaagcatagcccagaggccttctccttgagcaaggctgagaagccagactgcatggaacgcttgcagctgcaaaggagactgggttgtcggacattccactggtttctggctaatgtctaccctgagctgtacccatctgaacccaggcccagtttctctggaaagctccacaacactggacttgggctctgtgcagactgccaggcagaaggggacatcctgggctgtcccatggtgttggctccttgcagtgacagccggcagcaacagtacctgcagcacaccagcaggaaggagattcactttggcagcccacagcacctgtgctttgctgtcaggcaggagcaggtgattcttcagaactgcacggaggaaggcctggccatccaccagcagcactgggacttccaggagaatgggatgattgtccacattctttctgggaaatgcatggaagctgtggtgcaagaaaacaataaagatttgtacctgcgtccgtgtgatggaaaagcccgccagcagtggcgttttgaccagatcaatgctgtggatgaacgatgaatgtcaatgtcagaaggaaaagagaattttggccatcaaaatccagctccaagtgaacttaaagagcttatatatttcatgaagctgatccttttgtgtgtgtgctcctggtgttaggagagaaaaaaagctctatgaaagaatataggaagtttctccttttcacaccttatttcattgactgctggctgctttaaaaaaaaaaaaaaggatccattgtaccgttgtcttcatcactgggaaatgattattacatagtacagaagattctttgtttttctccactgagcacttaacaattgctttctctctggcctggacattctctggcagcacctccaggatacataaattcaatggatcaatttatttgtcttcaaatggccttaacttggattgtctgtttggccaaccatgaaaattaaagagtgaagcagatgtaatggcctgacattccaaaaactctgaattgggtttattagcacaaatgttgtgttcatttgttgagccatatctcagaagaaggaaagggagctacagaaaggaggtttaggattgcagagaagatgcaagagcactttggcccaattctccagctcaacccagcagctgaaaagcttcaagagatctaggaaaagacattttcatgttaatgagaatttccaccattgtagagaatttccttcctactgagaatctacctctattccccctgccctagctcttctctaacttggttaaccataaccataaccagattcccttgcaatcgatttctctttagtcgttggtgttagaagtaccagcacaatttgagcattcccattaacaaaggtgttcacagttgagaaactctcctgccgggcgcggtggctcatgcctgtaattccagcactttgggaggcagagttgggaggatcacctgatgtcaggggtttgagaccagcctggtcaacattgcaaaaccttgtctctactaaaaatacaaaaattagctgggcatggtggcgcatacctgtaatcccagctacttgggaggctgaggcaagagaatcgcttgaacccaggaggcagaggttgcagtgagctgagatcatgccattgcactccaacctgggtgacagagtgagactccatctcaaaaaaaaaaaaaaaaa

SEQ ID NO: 56878 - DNA, 1223 bp, Homo Sapiens
atggcgtctgcggcagcagcggaggccgagaagggatctccagttgtggtgggcctgctagttgtgggcaatatcattattctgctgtcaggcctgtccctgtttgctgagaccatatgggtgacagccgaccagtaccgtgtatacccactgatgggagtctcaggcaaggatgacgtcttcgctggtgcctggattgccatcttctgcggcttctccttcttcatggtagccagttttggtgtgggtgccgcactctgccgccgccggtccatggtcctcacgtacctggtgctcatgctcatcgtctacatcttcgagtgcgcctcctgcatcacgtcctacacccaccgtgactacatggtgtccaacccatccctgatcaccaagcagatgctgaccttctacagcgcggacaccgaccagggccaggagctgacccgcctctgggaccgcgtcatgattgagcaagaatgctgtggcacatctggtcccatggactgggtgaacttcacgtcagccttccgggcggccactccggaggtggtgttcccctggcccccactgtgctgtcgccggacgggaaacttcatccccctcaacgaggagggctgccgcctggggcacatggactacctgttcaccaagggctgcttcgaacacatcggccacgccatcgacagctacacgtggggtatctcgtggtttgggtttgccatcctgatgtggacgctcccggtcatgctgatagccatgtatttctacaccatgctctgagggacaggaggggaaggcaacatacacaccccggactcctccgcatcctcctcctgcttcctccgctgggcctggatggctgcctcacctctcacctcccaacgtccctagcccttacgtccttccacttccaagatctttttccaggttcctgagccctactgtgtctcaggtgtgccctgaaaccccagggcttgtgtgcacatatccttagcccatctttcaagggacctctccatgatcccacctcccattcacagatacctctcttgtagctctctgacctcctccttcatggcaggcatcgccattcttgctgaaccgtttgtgattgccatttgagctctggaagcctctattgccatgagagttctgtcacggtcactttactgtccccatcatcacccagcacggggctaagcatatactagatagtcaataaataa

SEQ ID NO: 56879 - DNA, 1409 bp, Homo Sapiens
gcgcgaaagtgcttcccttaagcttctgaaggttggctgcagttccggctacctgtgtagtccgagtttccacagccaggtactactccgccagtgaccctggacagtaacaaaacatataaagcccgagcccaaaccccgccaccatcataggtctgtagttactgtggaatcaataagccatggcatctaagaaatttgctgttaaatgtgggaattttgctgtcctcgtggatcttcatatcttgccacaaggttcaaacaaagatacaagctggttttctgaacagaagaaagaggaagtctgtttactgttaaaagaaaccattgattcaagagttcaggagtacttggaagttcgcaaacagcacaggccatcaaatgcagaattcacaagatccaatcccttgtccttaaaaggttatggctttcaaatcacagcctatttcctcaagagagggatacgccttcgctgcatcaggagcacacagaatgctgaactctgtgtattccctgacagatttgtggtttgtgtcagtcagcttgcattcagtcgtgatcttttagcaagtcagaatgaagatttgacagaaagagttctccatggagtgtctgattactttgctgagtgtgcagagagttcacttcctcccagtgcaaagctccggagaaatgctctgaaagaaattgtgaaaagaactgaaacaaaaagcagtgtcacgagcaaatcgcagaccagaagagacactgtggaaacatctagtgactcagtgattgcagagatagcaaggaggaggaatgatggtcaggcttcctccagtcccccatcagaatccatgggacaagcaaaggattccataaaggcagctgagagccactgggggcttcctgttcaaaagctggaaaaagttaatcagacccagccagaagacactagtggccagcaaaaacctcatcctggggagcggttaaagacagggcttctaagcaggagccccgtctgtagctgtgagtcagcatcaccatgtccaaaacaaagtccacgagtggccaaaacccaacagaaacgcaggaactgcagctctgcggaagacttcgaccaccacgggagagtttctcttggaagtgatcgattagtcccgagagaaataatagtggaaaaaagcaaagctgtcagggttttgccagcttcagagttgtcagatccagggttacttttgaaacaagatttggcaaaaaccacgtctaaggaagagttgcatgttttggaaagtctctcctccagacatcttatgaaaaataacccagggcaggcacagcaaaccggcttagccacaaacactgaaagattatctacaattcagaacagcccaaccaagaaaagaaagaaatacgaaagaggccattaa

SEQ ID NO: 56880 - DNA, 2402 bp, Homo Sapiens
gcccgcgccggctgtgctgcacagggggaggagagggaaccccaggcgcgagcgggaagaggggacctgcagccacaacttctctggtcctctgcatcccttctgtccctccacccgtccccttccccaccctctggcccccaccttcttggaggcgacaacccccgggaggcattagaagggatttttcccgcaggttgcgaagggaagcaaacttggtggcaacttgcctcccggtgcgggcgtctctcccccaccgtctcaacatgcttaggggtccggggcccgggctgctgctgctggccgtccagtgcctggggacagcggtgccctccacgggagcctcgaagagcaagaggcaggctcagcaaatggttcagccccagtccccggtggctgtcagtcaaagcaagcccggttgttatgacaatggaaaacactatcagataaatcaacagtgggagcggacctacctaggcaatgcgttggtttgtacttgttatggaggaagccgaggttttaactgcgagagtaaacctgaagctgaagagacttgctttgacaagtacactgggaacacttaccgagtgggtgacacttatgagcgtcctaaagactccatgatctgggactgtacctgcatcggggctgggcgagggagaataagctgtaccatcgcaaaccgctgccatgaagggggtcagtcctacaagattggtgacacctggaggagaccacatgagactggtggttacatgttagagtgtgtgtgtcttggtaatggaaaaggagaatggacctgcaagcccatagctgagaagtgttttgatcatgctgctgggacttcctatgtggtcggagaaacgtgggagaagccctaccaaggctggatgatggtagattgtacttgcctgggagaaggcagcggacgcatcacttgcacttctagaaatagatgcaacgatcaggacacaaggacatcctatagaattggagacacctggagcaagaaggataatcgaggaaacctgctccagtgcatctgcacaggcaacggccgaggagagtggaagtgtgagaggcacacctctgtgcagaccacatcgagcggatctggccccttcaccgatgttcgtgcagctgtttaccaaccgcagcctcacccccagcctcctccctatggccactgtgtcacagacagtggtgtggtctactctgtggggatgcagtggctgaagacacaaggaaataagcaaatgctttgcacgtgcctgggcaacggagtcagctgccaagagacagctgtaacccagacttacggtggcaactcaaatggagagccatgtgtcttaccattcacctacaatggcaggacgttctactcctgcaccacagaagggcgacaggacggacatctttggtgcagcacaacttcgaattatgagcaggaccagaaatactctttctgcacagaccacactgttttggttcagactcgaggaggaaattccaatggtgccttgtgccacttccccttcctatacaacaaccacaattacactgattgcacttctgagggcagaagagacaacatgaagtggtgtgggaccacacagaactatgatgccgaccagaagtttgggttctgccccatggctgcccacgaggaaatctgcacaaccaatgaaggggtcatgtaccgcattggagatcagtgggataagcagcatgacatgggtcacatgatgaggtgcacgtgtgttgggaatggtcgtggggaatggacatgcattgcctactcgcagcttcgagatcagtgcattgttgatgacatcacttacaatgtgaacgacacattccacaagcgtcatgaagaggggcacatgctgaactgtacatgcttcggtcagggtcggggcaggtggaagtgtgatcccgtcgaccaatgccaggattcagagactgggacgttttatcaaattggagattcatgggagaagtatgtgcatggtgtcagataccagtgctactgctatggccgtggcattggggagtggcattgccaacctttacagacctatccaagctcaagtggtcctgtcgaagtatttatcactgagactccgagtcagcccaactcccaccccatccagtggaatgcaccacagccatctcacatttccaagtacattctcaggtggagacctgtgagtatcccacccagaaaccttggatactgagtctcctaatcttatcaattctgatggtttctttttttcccagcttttgagccaacaactctgattaactattcctatagcatttactatatttgtttagtgaacaaacaatatgtggtcaattaaattgacttgtagactgaaaaaaaaaaaaaaaaaaaa

SEQ ID NO: 56881 - DNA, 5590 bp, Homo Sapiens
ttttaccacgatgtaaacaaacaaacaaaaaactctcggcattgcccccactccctggcagtgtctattgtgggaggagagaccgaaattctcaggacacacccaggcctcaagacttctcgcccaatccgtcaccacttcctggcgcagacatcggactgttaaggcccctccacttcccgctcaggttacagaccccagggcacatccccccatcctcacccgcctgcatgaccaggctgccccctgccccgcacacctctctctgagtagcctcctgtcttccctctggcagctgagtcagcttcaccacctcactgggtctggaacagccaactcctgacactttcacactcacagaggtggagcaggggcacgggggctgggcaccaccagtgtgtgggcagcacccaggcattaaacacagcagaggatggcgcaggcacccctgttctcctcccagagccaagcttcaggccatgtccagcgggggaggctgtgagtcacctctgcctcatgtgggtgatcataggagggtgtgagtcagctctgtccacatggttgctcatgggagggtatgagtcagctctgtcaatgtgggtggtgggtggtcacgggagggtgtgagtcagctctgtccacgtggttgctcataggaggttgtgagtcagctctgtccatgtggggtgctcacaggagggtgtgtgtcagctctgtctgtgtgggtggtcacgggagggtgtgagtcagctctgtctgtgggtggtcacaggagggtgtgagtcagctctgtctgagtgggtggtcacgggagggtgtgtgtcagctctgtctgtgtgggtggtcacgggagggtgtgtgtcagctctgtccgtgtgggtgctcacgggagggtgtgagtcagctctgtctgtgtgggtggtcacaggaggggtgtgtgtcagctctgtctgtgtgggtgctcacgggagggtgtgagtcagctctgtctgtgtgggtggtcacagaagggtgtgtgtcagctctgtgtgggtgctcacgggagggtgtgagtcagctctgtctgtgtgggtggtcacaggagggtgtgtgtcagctctgtctgtctgggtgctcacgggagggtgtgagtcatctctgtctgtgtgggtggtcacaggagggtgtgagtcagctctgtctgtgtgggtggtcacaggagggtgtgagtcagctctgtccatgtgggtgctcacgggaggttgtgagtcagctctgtctgtgtgggtggtcacaggagggtgtgagtcacctctgcctgtgggtggtcacgggagggtgtgagtcagctctgtctgtgtgggtggtcacaggagggtgtgagtcagctctgggtggtcacgggagggtgtgagtcagctctgtctgtgtgggtggtcacgggagggtgtgagtcagctctgtctgtgtgggtgctcacgggagggtgtgagtcagctctgtctgtgtgggtgctcacaggagggtgtgagtcagctctgtctgtgtgggtggtcacgggagggtgtgagtcagctttgtctgtgtgggtgctcacaggagggtgtgagtcagttctgtgtgggtggtcacaggagggtgtgagtcagctctgtgtgggtggtcacgggagggtgtgagtcagctctgtctgtgtgggtgctcacaggagggtgtgagtcagctctgtctgtgtgggtggtcacgggagggtgtgtgtcagctttgtctgtgtgggtgctcacaggagggtgtgagtcagctctgtccgtgtgggtgctcacaggagggtgtgagtcagctctgtgtgggttgtcacgggagggtgtgagtcagctctgtctgtgtgggtggtcacaggagggtgtgagtcagctctgtctctgtgggtggtcacaggcgggtgtgagtcagctctgtctctggggtggtcacaggcgggtgtgagtcagctctgtctctgtgggtggtcaccggcgggtgtgagtcagctctgtccgtgtgggtgctcacaggagggtgtgtgtcagctctgtctctgtgggtggtcacagtagcgtgtgagtcagctctgtctgtgtgggtggtcacgggagcgtgtgagtcagctctgtctgtgtgggtgctcacaggagggtgtgagtcagctctgtgtgtgtgggtggtcacaggagagtgtgagtcagctctgtgtgtgtgggtggtcacaggagggtgtgagtcagctctgtctctgtgggtggtcacgggagggtgtgagtcagctgtacgtcatgtagttggtcatctgtgtgttccacctgcatcctggggtagcctgttggccatttttgttgccactataaagccctgagtgtggctaggaagggggtgctgggtgggaccgtatgatcacgtgtgctcagtttggcatgtgtgatcgtcatgtgactgggctcacagaaaggagcttgtccctaatgatttccaaccttcggactgtgtcctgacctggcctgtagtcctgctgtctgggtttgcatggccccgagagcccttctgaacaaaggatgctgatggattcaagccagcttggtgggtgccgggccctccctcccacctcctttagtctttatgttgaccttgagctggggtggtcctgggaccccgaggttcgtgagcggaagggcttgcaggagggcacacagcaggggagctgggagagggggcttgtttgcctcagcattgggggagccgaggaaacgttcatgaaagcttctgaaagggaagcaggaaggattttcaccccagggctgcagcttcagggactacgtgagggtatgggtggggatgaggggaaggcccacagggtgttattcccatctcatcgtcctcctctggctttgctttgtgttgcgaacccgcatcctgaggctgacttcagaatgttaagaaaggcagccctgagcctttgatcaccccaggagttccagaaggcaccagggagtcctctcgggtcccatgcccctcccagccccttggggtcaccctgatcggcctggccaaggtcgccagctgcctggggactggggagcagccacatgccctctgcaggggagtagttgccaggaaggtgcaggcggaggccctgctctccatcacagcggtcctgtttatgagatcgtcactctcaagaggccaaaagttatgaccaaacttcaagagaaactcccagtaaagtagtatttccacagcagacagttgggatgcaggtccacccacagccagctctgagctgacacaggggccctggccagggttccaccctgctctgcctgcctggggccctggctagcctgcagataacatcaagtagtttcgtaatttccacacacagca[450 bp omitted]ctctcaggccaagaggagccctggggtgagcaacagccctgtggccttgctttcgggttcaggtggtgcagggaggcaccccggacctccgtgaaggccagtgaaatggacaggacaaggtgcttggcctgcggctggagagccatcttcttaccccctggccacatggttctgggaaggcactgacgctttgtaaaacttgcctggtgtggaaaatgatggcggtcatatgtagtaccttagaaggctgtgctgggagttaacgatataacatagcgcaaatgcctgacccctgggagaggggcagtgagagtttgttgaagttggcatgtgaagtcgaggctctcagtgaggtgcagacttttcctgtccaggaatgggagacaaggagctgtcattcactcaagcccttcgtctgccagcccctggcctgttatacaccccttttcaatcctgtaaggtaagtgttcttatctccaacttccaggtgggaagtctgaagctcagagagcctgggccaatggtacaggtcacacagcacatcagtggctacatgtgagctcagacctgggtctgctgctgtctgtcttcccaatatccatgaccttgactgatgcaggtgtctagggatacgtccatccccgtcctgctggagcccagagcacggaagcctggccctccgaggagacagaagggagtgtcggacaccatgacgagagcttgccacgaaatatgcagcttcctttccctgagaaaatggcaaagaaaattcaacacagaaggccagggagggtgtgtggaaacgattcacatgttcaaaagatttatatgtgtagaagaaagctgtgaagtgtgaagtatattttctattgtagaatggatgaaaatggaataaaaataatatcctttgctaggcagaataaataacttctttaaacaattttacggcatgaagaaatctggaccagtttattaaatgggatttctgccacaaaccttggaagaatcacatcatcttagcccaaggtgaaaactgtgttgcgtaacaaagaacatgactgcgctccacacatacatcattgcccggcgaggcgggacacaagtcaacgacggaacacttgagacaggcctacaactgtgcacggttcagaagcaggtttaagccatacttgctgcagtgagactacatttctgtctaaagaagatgtgagtcctaagcagacttaaagccaagaaaataagaagaggaaagagagaggggctgccttaaccagctgtggtgctgacttggacaattccaggtcaagaggaactgtctactttcgactttgtgtgatagtaactttttaagcagtggaccgggagcccaagactcagatgcagcaagctttgcaaggctgacgagagctgagatcttcagtggccgatgggtacagggctgctgggagcgtagccacgtctgctccaaggtggcttgaatgaggcagtgcccaagtccttttgactggctgaggtgagcctgtggctcagtcacagtttgtccctctcctaataagtgcatttcccagacagcagctccttggtgtcatgcaactgaggaacctaattggctgggtgggttgttcccatccaacttccacctgtcacgaaggatgctttttcagatcagtctccacagctaccatcttgtcgggcacagagccgggcatcaacaagtgtatgttgaataaagaatgaattgatg

SEQ ID NO: 56882 - DNA, 2128 bp, Homo Sapiens
atggccacagaaacaaaggatgaacaaatatctgggacagaacttaaagataatcactgtgagcaacttagagtaaaaattcgaaaactgaaaaataaggctagtgtactacaaaagagactatctgaaaaagaagaaataaaatcgcagttaaagcatgaaacacttgaattggaaaaagaactctgtagtttgagatttgccatacagcaagaaaaaaagaaaagaagaaatgttgaagagttgcaccaaaaagttagggaaaagttaagaatcacagaagagcaatataggatagaagctgatgtgacaaaaccaattaaaccggctctcaaatcagcagaggtggaattgaagacaggaggaaataattcaaatcaggtttctgaaactgatgaaaaagaagacctgctgcatgaaaaccgcttgatgcaagatgaaattgccaggctcaggctggaaaaagacacaataaaaaaccaaaacctggaaaagaaatacttaaaagactttgaaattgtgaaaagaaagcatgaagaccttcaaaaggctctaaaacggaatgaggaaacattagcagaaacgatagcctgttatagtggacagcttgctgctctgacggatgaaaacacaacgctccgttctaaactggagaagcaaagagagagcgggcaaagactggaaacagaaatgcaatcataccgttgtagactgaatgctgctctatgtgatcatgatcaaagtcactcatcaaaaagagaccaagagcttgctttccagggcacagtagataaatgttgtcatttacaggaaaatttgaattctcatgttctgattctttctctgcaactttctaaagctgagagtaagttcagagtcctcgaaactgagctccattacacaggagaggctctgaaagaaaaggctttggtttttgaacacgtgcaaagtgagctaaagcaaaaacagagtcaaatgaaggacattgaaaaaatgtacaaaagtggatacaatacaatggaaaaatgcatagaaaagcaggaaagattttgtcaactaaaaaaacaaaatatgttgcttcaacagcaactggatgatgctcgcaacaaagctgacaatcaagaaaaagcaatacttaatattcaagccagatgtgatgctagagtagaaaaccttcaagctgagtgcagaaagcaccgtctcttactagaagaagacaataaaatgttggtgaatgaattgaatcattcgaaagaaaaaaaatgccaatatgaaaaagagaaagcagaaagagaagtagctgtgagacagcttcaacaaaaacaagatgatgtcttaaacaaacgatcagcaacaaaagctttgctggatgcttcatcgcgtcactgcatctatttagaaaatgggatgcaggattcaaggaagaaattagaccagatgagaagtcaatttcaagaaatacaggatcaacttacagctactataagatgtactaaggagatggaaggcgacgcacaaaagcttgaagtagaaaatgtcatgatgagaaaaattattaaaaaacaggatgaacaaattgagcggtttgagaaaatcctgcagcattcaagtttgatgctgcaggtgtttgagagctagatgaagcatccagccaaactagactacatggagctccacagtgatcgtcttcacctccagctgtttgcatttacttcttccctctatcctacatgtgttttccttccccttcagatatcaacctatgaattgcctctaccaaaaagcctacaatattgacacaaacctgggctagtatcccttctatgtcttccaataagtgctgtcttatgcctgtcattgtatgtatgactctgtacgggaattgcctgtttgttttttcagattatagcatacagttgttgaggggtggactgtatcatctttatcttgtaattccagtgcttgtcctagtaccttagcacatggttgctgaatacatgaatgaagagtgagaaaccagaagctctgatacttaactgccatgataatgaattcagtgtgcaactatgggcaaattatatttaatagtaattgcatattgtacatatttttcattcttattaacact

SEQ ID NO: 56883 - DNA, 3082 bp, Homo Sapiens
atttggagtcaggcctggctgttgctcaggtgaccagcttgtgtctctgggagggcgctgctttccccggccacccggcgcgatgatccagaatgtcggaaatcacctgcgacggggcttggcctctgtgttctccaaccgcacatcccggaagtcagccttacgtgcggggaacgacagtgccatggcagacggcgagggataccggaaccccacggaggtgcagatgagccagctggtgctgccctgccacaccaaccaacgtggtgagctgagcgtcgggcagctgctcaagtggattgacaccacggcttgcctgtccgcggagaggcacgctggctgcccctgtgtcacagcttccatggatgacatctattttgagcacaccattagtgttggacaagtggtgaatatcaaggccaaggtgaaccgggccttcaactccagcatggaggtgggcatccaggtggcctcggaggacctgtgctctgagaagcagtggaatgtgtgcaaggccttggccaccttcgtggcccgccgagagatcaccaaggtgaagctgaagcagatcacgccgcggacagaagaggagaagatggagcacagtgtggcggctgagcgccggcgcatgcgccttgtctatgcagacaccatcaaggacctcctggccaactgcgccattcagggcgatctggagagcagagactgtagccgcatggtgccggctgagaagacccgtgtggagagtgtggagctggtcctgcctccccacgccaatcaccagggcaacacctttgggggccagatcatggcctggatggagaatgtggccaccattgcagccagccggctctgccgtgcccaccctacgctgaaggccattgaaatgttccacttccgaggcccgtcccaggtcggcgaccgtctggtgctcaaagccatcgtgaacaatgccttcaaacatagcatggaggtgggcgtgtgcgtggaggcctatcgccaggaggctgagacccaccggcgccacatcaacagtgcctttatgacctttgtggtcctggacgcagatgaccagccccagttgctgccctggattcggccccagcccggcgatggtgagcggcggtaccgagaggccagtgccagaaagaagatccgcctggacaggaagtacatcgtgtcctgtaagcagacagaggtgcccctctccgtcccctgggaccctagcaaccaggtgtacctgagctacaataacgtctcctccttgaagatgcttgtggccaaggacaactgggtgctgtcctcggagatcagtcaggtccgcctgtacactctggaggatgacaagttcctctccttccacatggagatggtggtgcatgtggatgcagcccaggccttcctgctgctctcggacctgcgtcagaggccagagtgggacaagcactaccggagcgtggagctagtgcagcaggtagacgaggacgacgccatctaccacgtcaccagccctgccctcggaggtcacacaaagccccaggacttcgtgatcctggcctcgaggcggaagccttgtgacaatggggacccctatgtcatcgcgctgaggtcggtcacgctgcccacacaccgagagacgccagagtacagacgcggagagaccctctgctcaggcttctgcctctggcgcgagggggaccagctgaccaaggtatcctactacaaccaggccaccccaggtgttctcaactatgtgaccaccaacgtggccggcctctcctctgagttctacaccaccttcaaggcttgtgagcagtttctcttggacaaccggaatgatctggcccccagcctccagaccctctagatgccctcagtggccacatcatgcccactcccactccatcctgtccccaaggactcacatacagtgcctggagaaagccaaagacctttatttcttcctgcctccccgtgggaagcctccgccctgaggtccgctggcccaccacccctgggtgctcagtttctaccaacatgagccagcaagtccttgtggtagccctggggtagcctgtagtagactcgggtcctgtccacagccctagctgccagcaatgctgtcctcacagaggcatagtcgcccccagctgggttgtgctccactgtgacggtggcccggggggaggatgccagcagcctgcctatggctccagctgtgctgtggcccagcagcatggcctgcatctggaaggacacaggttgccagagcccctggcacaactctagcatatctgtgagcagctgttccctgtagccactgcccagcacctcctcaggccagcctggtgccacagtcacgtgggggaagacctcagccacagctgtaagcagctctctgccagccacatggccggggaccgaaaaactcccgtgggagattttggccccaacccacacaggccaatgcaagaggccaaggctggagaggcgtgccagcaaggccagggatggccggagggctgcgggctccgctatttgcaaatggatgccccagtgtccgggatgtgtggccagctgctgcaggcaggactccagcgtcaggatgttgccacttggagtatgaacaatgggcacggggttttcagccacagttccctcgaggccagtgttcagcaggatcatgccttctgtgtctggaagaggcggcagaggcaacagtgtttaggatttgggttatcataaggtgttaagagtcccttgttaaaggggcagtgggagttatggggtcatcaaggaccttgcctctctggaatctgtcaacccagttttgggctccaggtggatgggttgctttataaatgtgcctggtgcatgagaaactcttgtttcagctcttggcctttacccatgactcagcctgggggctggtgccggccttgcctgcagcaatgtagctgaggactggtctgaaggccaggagccctgtgctcttgacatcactgtactccctctccctccccgcaaccctgccccaccttgcatccagggtatggtgtaaataaacctgtgttgccatggc

SEQ ID NO: 56884 - DNA, 3615 bp, Homo Sapiens; identical to SEQ ID NO: 30187

SEQ ID NO: 56885 - DNA, 3588 bp, Homo Sapiens
ggcgggcgcccctcccccagcgtcactgccgccttgcagtttgatctcagactgctgtgctagcaatcagtgagagtccgtgggcgtaggaccttccgagccaggctgttcacggaagaccaggatgtagatgagggacttgtctatgacactgtattcaagcacttcaaaagacataagctggagatatcaaatgcaataaaaaagacatttccattccttgagggcctccgcgatcgggaactcatcacaaataaaatgtttgaagattctgaagattcttgtagaaacctggtccctgtacaaagagtggtgtacaatgttctcagtgaactggagaagacatttaacctgtcagttttggaagcactgttcagcgaggtcaacatgcaggaataccccgatttaattcacatttataaaagcttcaaaaatgcaatccaagacaaattgtctttccaagaaagtgatcgaaaagaaagggaagagaggcctgacatcaaactaagtcttaaacaaggagaagtgccagaaagcccggaagcaaggaaggaaagtgaccaagcatgtggcaaaatggatactgtggatattgcaaacaactctactttgggaaaacccaagaggaaaagaagaaaaaagaaggggcatggctggagcagaatgggaacgagaacgcagaaaaacaaccaacaaaatgataacagcaaagccgatggccagctggtctcgagtgaaaagaaggcgaacatgaatctgaaagacctttccaagattagggggagaaagagaggcaaacctggaacccactttactcagagtgacagagctccacagaaaagagtccgatcaagagcttcaagaaagcacaaagatgaaactgtggattttcaggctcctttacttccagtgacctgtggtggggtgaagggaattttacataaggagaaattggaacaaggaaccttggcaaagtgtatacagactgaggatggaaaatggttcacccccatggaatttgaaatcaaaggaggctacgcaagatcaaagaactggaggctgagtgtgcgctgtggcgggtggcccctacgacggctgatggaggaaggatctctacctaatcctccaagaatatattacaggaacaaaaagagaatactgaagtctcaaaacaatagctcagttgacccttgtatgagaaacttggatgagtgtgaggtgtgccgggacggaggggagctgttctgttgcgacacttgttcaagagtcttccatgaggactgccacatcccacctgtggaaagtgagaagtaagtgacatgcaggcacctctctttcatcctttaagggaccttccacctgccatgcgcactctccagcagaatgtctgcttgtgtctagatggggaaggagcaggttcatcgggtactgggacccagcagtgtgatccagagagcagtgggagacgctggcagcaggaggtaaatgctctctgtgctctcagggacacctcctctgatatgctgaggccagtgttggggacctttgcctacatactggtattgtcctttccttgaagttttgcagtagggtctcctgtcccagggggttgaggaaaaaaaacaccagttgtttatattttgtgcttattcatacaagacaggaagcacggtcttaggcggatggaggcctgacgtccctggagttgaaagcccagtttctgacacacaggcctggcaggcaggactccttgtgctcccagcagctcagacagggaaaggatagtccccactcacggtgacaccaccttcctgaggcttccctcctgctgctaccactgatgcgagggaaaggccagtggctggagaccccatgtgcagttcttggatactctgggaggtgttcccctccctcccatgactgagcccatcagccattcctgaaggaagacagtggtagccacaggaacggtggccatttccaagctccctgccctctgctcacccatgtccaatctctcaggaccccgtggaattgcatcttctgcaggatgaaggagtctccgggaagccaacagtgttgtcaggaatctgaggtcctggagaggcagatgtgtcctgaggaacagttggtaaatcagatgcaaaccccaagccttctcctttcccctcacacgtgagaaccatgaacaagcgcaagggcaggggaatgtactgaaaggagcctgctcttccgcgccacacttcaatggcactgatagaacaccacaccttgtttgcacaaaaaataactcagccatgacatgtctgtttccaagagccacacatgttagagaaacttgaggaagaagggtgtgagtcgtgtgctgtgtctcatgcatgtgggctcattctctccaagctgcttttcatttacggcctctttcttttgcagaaatgtgagttcctcctcttgaaagtctattgctgttctgagagctccttttttgccaagattccatactattattatattagagaggcgtgtcaaggcctgaaggagcccatgtggttggataaaatcaagaaaaggctgaatgagcacggttacccccaagtggaggggtttgtacaagacatgcgcctcatcttccagaaccacagggcctcttacaagtataaggattttggccaaatgggacttagactggaggctgaatttgagaaggatttcaaggaagtgtttgctattcaggaaacaaatgggaacagttgactggtttagtggatgctgaaggccttcaggaaatatgctactggttgccactgacttcaaactgagagcacttgggaaatagcacatgcagggagaggcttttctctgagcctccctcatctgcccaaaaacaaatcctcaaaagaaatttgatcatcatgaatcccatccccaagaatctcatcaaccagggaagaggaactgagatcacagggaaggagattggaggtgataccagcacagacagactctcacctcttctcctgaggtctgctccagacaacatttattactcacaagacctttttcctccgttttttttttgagatggagtctcacacagtcacccgggattggaatgcaatggcgcgatctcagctcactgcaacctctgcctcccggattcaagtgattctcctgtctcagcctcccaagtagctgggattacagtgcctgccaccatgcccagctaattttttgcatttttagtagagacggggtttcactatgttggccaggctggtctcgaactcctgacctcatgagccgcccgccttggcctcccaaagtgctgggacgtgacaggagtgagccaccacacctggccactcgcaagaccttttatctgaaaaccagccaagctttattcacgacacacttcttcccttcactctcccacttctgtggtcaactccctgcagaactcccaaactgccgttcttttcgatagctcacgatggtgtatgagtgtcaatcatctgacccttcttggagtctcatatttcgtggaactcctgtgcaaacatatattattaaattttttttcctcctgtc

SEQ ID NO: 56886 - DNA, 13003 bp, Homo Sapiens
gcggcgcgcacggtatggcggcggcggcggcggcggcggcgcgcgcctgagaagaggggacgccagcccggtcaggcctcggcgcggcctacacgctccgctcgctcgctcgctcccgcctcccgccccgcgcccggccatggcggagccgtcgtccgcccgacgcccggtgcctctcatcgagtcggagctgtacttccttatcgcccggtacctatcggcgggcccgtgtcggagagcggcccaggtgctggtgcaggagctggagcagtaccagttgttgccgaagagattggactgggagggcaacgagcacaacaggagctacgaggagttggtcttgtccaataagcatgtggctcctgatcatcttttgcaaatctgccagcgcatcggtcctatgttggataaagaaattccacccagtatttcaagagtcacttctttacttggtgcaggaaggcagtctttgctacgtacagcaaaagactgcaggcacacagtttggaagggctctgcctttgctgctcttcatagaggaagacctcctgaaatgccagtgaattatggttccccaccaaatcttgtggagatacatcgaggaaaacaactcacagggtgttccacttttagtacagcatttccaggaactatgtatcagcatataaaaatgcacagaaggattctcggacatctatctgctgtttactgtgtagcatttgataggacaggacatagaatctttacaggttcagatgactgtttggtaaagatttggtcaacacataatggccgcttgttatctacattaagaggtcattctgcagaaatttcagatatggcagtaaactatgagaatacaatgattgctgcggggagctgtgataaaattattagagtgtggtgcttgagaacttgtgccccagttgctgtgctccaaggacacacaggatcaattacatctttacagtttagcccgatggccaaaggctctcaaagatacatggtttccactggtgctgatgggacagtttgcttttggcaatgggatttagaatccttaaaatttagcccacgtcccctgaagttcactgaaaagcctaggccaggcgttcaaatgctttgttcttcttttagtgttggtggtatgtttttagccacaggtagtactgatcatgtaatcagaatgtattttttgggttttgaagcacccgaaaaaatcgcagaacttgaaagccacactgataaagtagatagtatccaattttgtaacaatggtgatcggttcctaagtggtagcagagatggaacagcacggatttggagatttgagcagttagaatggaggagcattttattggatatggctaccagaatctcaggggacttatcttccgaagaggaaaggtttatgaaacctaaagtaacaatgatagcttggaatcaaaatgatagcattgttgtcacagctgtgaatgatcatgtcctcaaagtgtggaattcttacactggacaactgcttcataacttaatgggacatgctgatgaagtatttgttctggagacacatccctttgattccagaattatgttatctgcaggacatgatggcagcatatttatatgggatattacaaaaggtaccaagatgaaacattattttaatatgattgaaggacaaggacatggagctgtgtttgactgtaagttttcacaggatggacagcattttgcctgtacagattctcatgggcaccttctgatatttggttttggatgcagcaaaccatatgaaaagattcctgatcagatgttcttccatactgactatcgaccacttattagagattctaataattatgtcttagatgagcaaactcagcaggctcctcatcttatgcctccaccattcttggtagatgtagatggaaatcctcatccaaccaagtatcagagattagtaccaggccgagaaaattctgcagatgaacatttgattccacagctgggctatgtggcaacaagtgatggagaggtgattgaacaaattataagcctgcaaaccaatgataatgatgaacgcagcccagaatcgagtattcttgatggaatgataagacagttgcagcagcagcaagatcagagaatgggagcagatcaggatactattccaagaggactttcaaatggtgaagaaacaccccggagaggttttagaaggctgagcttagacattcagtcccctccaaatattggtctgcgtcgtagtggacaagttgaaggtgttcgtcagatgcatcaaaacgctccacgcagtcagattgctacagaacgtgacctgcaggcttggaaacgaagagtggttgtaccagaggtaccactaggcatatttaggaagctggaagacttccgattagagaaaggtgaagaggaaagaaatctttatataataggaagaaaaagaaagactcttcagctctcacataagtcggattcagtggttttggtatcacagtctagacaaaggacatgtaggcgtaaatatccaaattatggtagaagaaatcgtagctggcgtgagttatcttctggaaatgagtcttcaagctctgtaagacatgagacttcctgtgatcagagtgaaggttctggttcttcagaagaggatgaatggagaagtgacagaaaaagtgagagttacagcgaaagttcaagtgactcttcatctagatattccgattggacagctgatgcgggcatcaatttgcagcctcctttaagaacatcatgtcgtcgacgaattactcgattttgtagtagttcagaagatgaaatatctactgagaatttatctcctccaaaaagaagacgaaagagaaagaaagaaaataagcctaagaaggagaatttgcggaggatgactccagcagagcttgcaaatatggagcatttatatgaatttcaccctccagtttggattactgacaccacacttagaaaatctccttttgttcctcaaatgggtgatgaggtaatatattttcgacagggtcatgaagcttatattgaggctgtaagaagaaataatatttatgaactgaaccctaataaggagccatggagaaaaatggatcttagggatcaagaattggttaaaatagttggaatacgatatgaagttgggccccctacactctgttgcctaaaactagcatttatagatccagcaactggaaaacttatggacaaatctttctctattagatatcatgatatgccagatgttattgactttcttgtattgcgtcaattttatgatgaagcaagacagaggaattggcagtcttgtgacagattccgctctattattgatgatgcttggtggtttggaacagtgttaagtcaagagccatatcaaccacagtatcctgatagtcatttccagtgttatattgttaggtgggataatactgaaattgaaaaacttagcccatgggacatggaaccaattcctgataatgttgatccacctgaagaattaggagctagtatttctgtcacaacagatgagctagagaaattgctctataaaccacaagctggtgaatggggtcagaaatcaagagatgaagaatgtgatagaattatcagtggtatagatcaacttttgaatcttgatatagcagcagcttttgcaggccctgttgatttgtgtacatacccgaagtactgtactgtagtagcttatccaaccgatctttacacaattcgaatgagacttgttaatcgattttacaggaggctgtctgcgttagtttgggaagtcagatatatagaacataatgccagaacatttaacgaacctgagagtgtaattgcaagatcagctaaaaagataactgaccaacttttaaaatttatcaagaatcaacactgtacaaatatctcagaactttctaacacatctgaaaatgatgagcaaaatgctgaggatttggatgatagtgatcttcctaaaacatcttctggaaggaggagagtccatgatgggaaaaaaagcatcagagctacgaactatgttgaaagcaactggaagaaacagtgtaaggaactagtgaacttaatttttcagtgtgaagattctgaaccatttagacaacctgttgatttggttgaatatccagactacagagatattatagataccccaatggattttggaacagtaagggaaactctagatgcgggaaattatgacagccctttggagttttgcaaagacatccggctgatatttagcaatgcaaaagcgtatacaccaaacaaaagatcaaagatttatagtatgaccttgagattatctgccttatttgaagaaaaaatgaagaaaatctcttctgattttaaaattggtcaaaaattcaatgaaaaacttcgaagaagccagaggttcaagcaacggcaaaattgtaaaggtgacagtcagcctaacaaaagtatcagaaacctcaagccgaagaggttaaaatctcagacaaaaataattcctgagttggtaggttctcctacccagtctacctcaagtaggacagcttatcttggaacccacaagacaagtgctggtatctcttcaggtgttacttctggtgactcttcagattcagcagaatcatcagaaaggaggaaaagaaatagacctataacaaatggttctacattatctgaaagtgaagtggaagattctttagctacctctttgtcatcgtcagcttccagtagttctgaggaaagcaaagagagttccagagctcgtgaatcctcctcacgcagtgggctatccagaagcagcaatctcagggtaaccagaactagagctgctcaaagaaaaactggtcccgtttcattagcaaatggatgtggcagaaaagccactcgaaagagagtctatttaagtgattctgataacaattcattggagactggtgaaattctaaaagccagagctggaaataaccgaaaagtcttaaggaagtgtgctgctgtggctgccaataaaataaagctaatgagtgatgtagaagagaattctagctctgaaagtgtctgttctggtcggaagctgcctcaccgcaatgcttctgctgtagctagaaaaaagttattacataattctgaagatgaacagagcttaaagtcagaaattgaagaagaggagctaaaagatgaaaatcaactattaccagtgtccagttctcacactgcccagagcaatgttgatgaatctgaaaacagagactcagagtcagaaagtgatttgcgggtagcccggaaaaattggcatgctaatggttacaagtcccatactccagcaccttcaaagacaaaatttcttaaaatagagtcttctgaggaagactctaaaagtcatgattcagatcatgcatgtaacagaactgctggcccatcaacgtctgtgcagaaacttaaggcagagagcatctcagaggaagcagattctgaaccaggaagatctggtggtaggaaatacaatacatttcacaagaatgcgagtttctttaaaaaaaccaagattctgagtgactcagaagactctgaatctgaagagcaagatagagaagatgggaaatgtcataaaatggaaatgaacccaatttcaggaaatctgaactgtgaccctattgctatgtcccagtgttcctcagatcatggatgtgaaactgatttagattcagatgatgacaaaatagaaaaaccaaacaattttatgaaagattctgcatcacaagacaatggactaagcagaaaaatttccaggaaaagggtctgttccagtgactcagacagtagtttacaggtggttaagaaatcatcaaaagccagaacaggtctcctgaggattactcgaagatgtgcagctacggctgccaataagatcaagctcatgagtgatgtagaagatgtcagtttagaaaatgtgcacactagaagcaaaaatggaaggaaaaaacctctccatcttgcttgtactacagctaagaagaaattgagtgattgtgaaggaagtgtacattgtgaagtaccaagtgaacagtatgcctgtgaaggcaagccacctgatcctgactccgaaggtagtacaaaagtgcttagtcaggctctaaatggagactcagactctgaagatatgttgaattcagaacacaagcacaggcataccaatattcacaaaatagatgcaccttctaaaagaaaaagttcctctgttacatcttcaggagaagattcaaaaagtcatattccagggagtgagactgataggacattttcttcagagtcaaccttggcacaaaaagctactgcagagaataattttgaagtggaactgaattatgggctgcgcaggtggaatggcagaagactcaggacctatggaaaggctccttttagtaagacaaaagtgattcatgattcacaggaaacagcagagaaggaagtaaaaaggaagagatcgcatcctgaattggaaaatgtgaaaatctctgaaacaactgggaattcaaagtttagacctgatactagttccaaatcatcagatttgggatctgtaactgaatcagatattgactgtactgataatacaaaaaccaaaaggaggaaaacgaaaggaaaagcaaaagtagttagaaaaggtaaaacttttacagctaacatatctaaaactgtgagacgtcaaagacaaagcaaacgccctaggttaagtgtggatgataatgactgggaggatttggactatgcaaaatctaaaagagttcttcgacgttcaaaaataaaaacgagaaatcagggtagaaggactgtgagataccatgatggggatgatgacagaagtttagaaaatgtgttagatttcaatggttgcaccttatgaccttgagggaaagccagttcatttaagaggaaatggactggcatttatggtgaaagctggctgttaaaattatttttttgtcttacaattcagggaatatatttatatttttctatgaaaagttatgaatgtgactaaatcatgactgttatttttatttgcacttgctggtctttgtagcagcattcagcacaggtgccaaaatatgcttcattttgggggcagatctattttgacagtatttgactacatatagcaagagtttgaaatatgttaaacactagacatcctggttatcaaaaccaatgagcattactttcatggcagcaagtgtcatgcagttattttctgaatttgtcaaagaggcagtagtttctaacccctgttctatagtagttacaacaatttcacaacctatgtttacagattcttcataaatacatgcatactgacactataatcatgggaggtgtaaccatgattagtaggcgaggtacctaccacttttttttttttcttcccctggctacttgagtagaatgcattataccagatctggtcactttcattgaaatggtttctaattttcttcccaagtgctgttgggtttttttcttcttaaggaaaacgttgtcacttttatgttataaacttgaatttataaagtgctggtaaattatttttaatgatttgagtgcatgttttaaacctctaggaccagagcatagtcagagcattttcttttaaattgtgcactaacaaaatgctatataatctgtcttctgtccaagatctcctggtttccattgtaagggatttaaccaaaatcttgctcttccataatcttactctgtgaaatagaggaattcgtgtgccttagatttagaagtgtgttctttaatagagtgtacagggctaaaagagtatttaagttaatatgtaggtttcccccatctgtattccaattgtagaggtgagttttgttaagagtacaattgcaaatcttatctatataggaaaatagctaaatgtcattctccatctctttgttttagtttactgcttccatgtgcaatcctaagcattctttgctggggcaactaaatgtatctttattagtgacttctagtccaaatataagaaactgtcatgttttgtgggaaaataattttataatccatttaaagtgaaagtttatcacacaaatagtacacttattttctaaccaaatacttgataggttatgctactccagtgtagatggccattcctaacttgtttgtgcctgaagatggacttgattcaaatggtttacatatttagtgggtaagggatatgttacagtaccccacctgtaagttatttattagccctaattgtgtttgatttcagacaaaattaacccttttctcctgtgtatctttgaagtggcagataaggtgaagcatcagactggtatcaatattagacaatgttatttattagccctaattgtgtttggtttcagacaaaaccttttctcctgtgtatctttgaagtggcagacaaggcgaagcatcagactggtattaatgttagagaatgttctgaagtgttcctattttgtagttatctattccatttgacatagtagaaggtacattttctttctactctgatgcatggggaaggatgtttttggacattatcaactgagataggtgggaaacctcctctcatttgtggcttagagagctatcaccatttcagaactatgatgcttttcttctcagaacttgtgttaagtagatagtaaacagattgattcatgataattgtccttgactaagactgaaaagactaatgggatgccttttactttgctaattttaaaaactggtgatagatgtcaaatccattaatttatttaaactcttcttaaccttctcttttataatctgttctcaggttttaactccatgtttaccatcatttgcaaaaaggtaccaaaaaaatccataaataaatatggaatacattcataagtacatacattcttttggtataaaacaatattttgacagtttaggcttcattaatagaactattctgattatttggactgcattaattggtcattgactggccatccaattaccattttttctttcagtccaaaatagttagacccttgcatacagaagtggtattttggtttttaatcagatttggtttcatcagaagcagcaagaatggacctgatgtctttaaaagcatagccgacaatggtagcttctcaagttatgaaataaaactgagagataatggagaaaataatttttatgggtttttttggttatggtgctattcctaaggttaactttgaatatgtgacacacacactcctaagtacctttaaggaaaattaataaatcattaatagttaaaatgtttacattgagcactagaacatgtttggccttttttttctacgttatgcaaaatgcccagggatttaatgcacaggtgtactttaatgtttagggtcagtttgtagtattcttgagaaaaagataaagggttataatttgaatgtgaactgatccagaaataagtgctgtacctttccactgcacttgaagttcaacttaatggtgtatgtgaaaaacaaaaactactttggttgtgtatgtccaaagtcctatggttttattcatttatggttttacaggctttgaagtactcagatttgatttttgctttcttggaaagactcactttaccaagcatataaaggaaaaatgatttcaaacattgacaagatagatgagtgttaacaaagctttcttttttcgtgtcctccttatttaaaaaggtatacttacaatgtgaagtaacttatgaataaaaggaaaagtttatcccatattcaaataattcctaaggtcagcctccctttttgtaagtggcaaatatctgattaaatcatttctcagtttattaatccttggaaacaatgatatagcagttactcacagcttgtaaattacaacagaaaggttcctttcaaatagtagagctgcacctaaagaggaaattgggtttataagaaaatggaggcaaagaacttaagttttaagaaaaagcacttcaaaacagaagggcaaatggaaaaggggaatataaaacaaaccaataaaaataccatctgagggtgttactgtccaaaagtaaagaataagatgcatcactaagccctttgcactcgttatgacctcgtaagtaaaaattatcacttagaataaggggtgcacactacattccctctgtcttctagacttttttttttgtagaagaatcagaaaacaatttactaacctccctgtttgatattaaaaataggaagaattttaatattttctgttagtacaagttgaacttgattgtgccaactgaaaccccagaggtttgtatatcagtagaatgcaagaacattgttaaaggtgcttacgatcttttttgttttcctttccactccattgtatcaattttttgagtaacttttaaatggctagaaaatggtctttttgctttgcccttttaaagctgaaataaccagctccattcttttcatgaatagtaagttgatatatttatttatcaggtatcttgcagttgtcaccaaatactgtagttttcttatgttgtatggaaattatagttcaattattttaatgtgatagagtgcaacaagtcattgtagaacttttcacctgttaatgttgaagttatacctctgaatttctgctgtggatatcaaggaaataataaagcagaaaccccaagaaatttgcaacttaacagtttgagactgtctcttatcctagtatttgggaagagaaggaataaatttgtcaaaactaggtgagaaaatagagcattgtgggaaaaactgagtccaactagattagcaaatgttaattcctagctcaaactgtgaatagtaaggattgaaaagtaaagtatgtaatgctaagggctgtgttgtcttttcttacgattttaagttttaaaggctgttaaattacagagatgttgcccaaggatacatggggattctcaaaagtaagagatttttacctttttcataatctgccaagctggttcctaatatattgttaaattggtagaaaaatatctttaaattggtgtctgctcaagaattgcttttctagatttgatggagggagggggagagtcacatcatttggattctaccaatctgcaggctctatctttggcaacatgtaaataattagactatacatctgtttctcaagtatggcaagaccaatagtttgaatttaattatcaatgctatggtatactttctggtcatattttagttatgtcagttttaaggtaagttttttcatttattaaagcccttaaatgagattttagactgccaaagagaagaggcagtccaattgacctaactgaaatgagatgaccagtatatagagcctagatggactgtagcagctctacccctttgttttacaaggtaaatcattttaaaaattaccttttttgatcagtgggtaaaagttaaagggatctttaatttttgatatattcaagttaattttctaaatgtgaatcagtccttggactgcaactatatattcacctacaaaatcccaatcaaaaaattacatgagcctgtcaagcagatctttagttttccacttcacataagatcgttaatgttctaaattaatctattcatttagatgatttttgtcagttcttaaatgggatataataaatttagcattttcatcttaacaagcaaaagagttaaaaaacaaaacaaaacactactccaagccaaatacattctagctggttaattccagacttgtcccaagtggttccccaacctcttttccactggtaatttcttttcatgcaggcagaatataggggtgcgagcgctgtgagttttacatatgagcttggataggggaactgaagcgagtcaggagccctgctggaaaaggggtttgccattggattgtctgtggcctggtttctttccagtagtacagtaatagggtagattgaaaacaagtatttacttctgattctgcctgcatttagtgtgaaatgctcttaaggtattgcttctaaaaagcaaattaagcagttaagtataaagtccctgcacgaggatttcaaaataaggcttttatgagatttttattaaaaattgcaatagccatcacaaatctgagtttttctaggggtgagagaaaactgtattgtgatgagctagattagttgtagttccagaataagaacaaaaattcagagttgtgtggtgcccatcattgagtaaatgaaccctaaaaatgaataagctaatgaactagttcatggaattatttctgatggtcttttgacctgatgctgccatactgcagtgttaccagctccccctagaaaacggaactgtttaaaaacacagcaagttacagaaaccattttattctacagccattggggtacttcagtttatgggatgtttttggaaacttctgctttgggagggatgaagatcattgataaatgttatttgctttctgagttttggggtcatttcattgcttatcaatgaagggcagacagaggagagaatatctcaagtcttttctgataaaaggcttgcttgagggagcttataacttgcacctagagggtttacccactttgtggatttgatttatccaccaaccacagcaaccaataatgtcaagattctaggagtttatgaaagaggctagtatgttttcattttgagtcagacattcttttctcattctcaaatctgttttaaatgctccaattttaaaaatgccaatgaaaattttataatgcttctgtagtaaccatatgcagtttactttgaatttaggaaaacagttttgtatgatgaaatattgtgcagaatctgtaaataaggtagcttaaaaattaaaaaaaagtctaattaaaaaaaaaaaaaaaaaa

SEQ ID NO: 56887 - DNA, 4838 bp, Homo Sapiens
agtgtaagggagtgggagctggtccgtgccgcggcggccgcgcagggagctctcgaggcaacgccggggcgcccgaggtctggaaggcgcagaaatggagcaagagccacaaaatggagaacctgctgaaattaagatcatcagagaagcatataagaaggcctttttatttgttaacaaaggtctgaatacagatgaattaggtcagaaggaagaagcaaagaactactataagcaaggaataggacacctgctcagagggatcagcatttcatcaaaagagtctgaacacacaggtcctgggtgggaatctgctagacagatgcaacagaaaatgaaagaaactctacagaatgtacgcaccaggctggaaattctagagaagggtcttgccacttctctgcagaatgatcttcaggaggtgcccaagttatatccagaatttccacctaaagacatgtgtgaaaaattaccagagcctcagtcttttagttcagctcctcagcatgctgaagtaaatggaaacacctcaactccaagtgcaggggcagttgctgcacctgcttctctgtctttaccatcacaaagttgtccagcagaagctcctcctgcttatactcctcaagctgctgaaggtcactacactgtatcctatggaacagattctggggagttttcatcagttggagaggagttttataggaatcattctcagccaccgcctcttgagaccttagggctggatgcagatgaattgattttgataccaaatggagtacagattttttttgtaaatcctgcaggggaggttagtgcaccttcgtatcctgggtaccttcgaattgtgaggtttttggataattctctcgatacggttctaaaccgtcctcccgggtttcttcaggtttgtgactggttatatcctctagttcctgatagatctccggttctgaaatgtactgcgggagcctacatgtttcctgatacaatgctacaagcagcaggatgctttgtgggggtcgtcctgtcctctgagttaccagaggatgatagagagctctttgaggatctgttaaggcaaatgtctgaccttcggctccaggccaactggaacagagcagaagaagaaaatgaattccaaatccctggaagaactagaccctcctctgaccaactaaaagaagcctctggcactgatgtgaaacagttggaccaaggcaataaggatgtacgtcataaaggaaaacgtggaaaaagggctaaagatacttcaagtgaagaagttaacctgagtcacattgtaccatgtgagccagttccagaagaaaagccaaaagaattacctgaatggagtgaaaaagtggctcacaacattttgtcaggtgcttcctgggtgagttggggtttagtcaaaggtgctgagattactggtaaggcaatccagaaaggtgcttctaaactccgagagcggattcaaccagaagaaaaacccgtggaagttagtccagctgtcaccaagggactttatatagcgaagcaagctacaggaggagcagcaaaagtcagtcagttcctggttgatggagtttgcactgtagcaaattgcgttggaaaagaactagctccacatgtcaagaagcatggaagcaaacttgttccagaatctcttaaaaaagacaaagatgggaaatctcctctggatggtgctatggttgtagcagcaagtagtgttcaaggattttcaactgtctggcaaggattggaatgtgcagctaaatgcatcgttaacaatgtttcagcagaaactgtacaaactgtcagatacaaatacggatataatgcaggagaagctacccaccatgcggtggattctgcggtcaatgttggcgtaactgcctacaatattaacaacattggtatcaaagcaatggtgaagaaaactgcaacacaaacaggacacactctccttgaggactatcagatagttgataattctcagagggaaaatcaagaaggagcagcaaatgtcaacgtgagaggggagaaggatgagcagacgaaggaagtaaaggaggcaaagaagaaagataaatgatgaagtgctgggaatcacttataccaaagccttatgaaatggatgaaattttgttaaataggcaaatgtggaattcctcacagattaaccagtattttttaaatgtattcattcctacaaattaactttcataaattttatggcatgtcttctatttaaaaggaaaagaataagtattcttgcatctggccttagaaatgtgaagttatattctcaagtttatttttttccaagtgtagctaaaatatttttgcaggtaaaataaagctgatagtacatgtgttgttcaaaccttgttaaacctaatattgaactatttttatatctgctgtctttcagaaggcaaataggaaactatatatttgcttaaaaattggcatttagtaaccttaattctttttatagaaggaatgacttaaagtattgtcccctctttttgcactaattgtggatttttttagatgcttctcaaaattttcagtgtgtaagctaaacaaaaactaaaactaagaattctcaaaaaaacttgttcaaaacagggaaagactgatgaaaagtaaaatggactacttttgtaacttacctgtttgttaggaaatggaatggtctctttgatttaaaataaataaaaatagattattacgtcttttgtattgagactgtattgttatgagcctaggaaatttgggaacatgattgtattgtattaaaattcgaagtgattattatcagcttaattggattaaaaaagtacttcaagaaattattttatcatatctgcttctgtttttccaaaaggttaaaacttgtaaaaaaaatatatataaacaattgagtttactaatggtaaacatttttattctgggattcggtcattggaatttatattaaaagacaagttattaaaaaggaaaggttctattcataatcagggtaaagaatatgaaaaccttagacgtaatccatggtggataggcattatggtttccactttggcagaaggcagactattcacagccctatttacttacataggctaaaaaactatgtaactaaatacctaatggtatttaatttttgtttattgaatttaagagattggtattagttttcatagctgtagtccattctaataatttctgatcttctagtggctacttaattagacattatttgaagctgtctgaagaatgcactttatgaattaaaaaactgaattgcctgacctcgttatcacatgagcttatattttgggaacacatagaactgatggaggcttttcctaaggccaaggataatgtactagttgttaaaatggaaataaaagtgaagtggtaaatagcttacagacagtctatgctttgtttaagaaatggaatggcacttcatatattctcatttgtgggagctaaaaattacaataatcaaacttaaggagatagagagtagaatgatggttaccagaggctgggaggcattgaagggatggggagggaagtgaggttgattaatgggtacgaaaatatagttagaacgaatttgttgtagtatttgatagcccaacagggtgactacagtcaacaataactttatacatttaaaaataaaagagtgtaattgggacgtttgtaacacaaatgaatgcttgaagcagtagatacaccctgatgtaattattataaatcgcatacctgtatcaaaatatctcatgtatcccataaatatatacacctaccatgtacccataaaaatttaaaaagaaatggaatggcaaataatggaacataaactttaaacagttagctttgaccagaggtcagcaaatatcctccatgggctaaatccagatgtccacctgttttcataaataacgttttattggagcatagctgtacccatttgtttacatattggctatggctgctgtctagttcaacgtgagagttgaatagttgcatcagagagtatatggtccacaagcctaacttattcactctctggccctttgcagaaaaagtgtgctgccttagtctatagaaaatggacttttcccaccattcactgactcattaggagataggcatcttctaaagattttttttatattgtgtaatgattgatatatagataaaattatatattacttgtaaggtatgatgaataacaacacttaaaaactcatcacacctaaagacatggaaagctgccaattacctatatgtatgttcttcctattttcttacctctttccccatgtcattttttattgttccttgccattttttaatcacacatgtatgttctccaaacatactgtttcattttttgaagctttctacatatagtgtctgaatgtgaagtcttactcaacttgcttttttgagtttatgtttaaaattcattcttgcgcttatatgcatggatggtttacttgctctatagtattctgtgtgagtataccacaatttaagtgttcattttcctatcagttgacatttgtttttagtttttgttggtagaaacagtacactcaaaacatccttgactgtcccctggtacacatatgcaagagactttatgcgtaagagtggagttgttggcttgtcaagttttgcaaaataatgccaggtattttccaaaatgatgatattctcttgagtattacttccctttgcaatgtttttattgttaatgtagcatatataaaaaagtatctcataattttaaaaaaaaaaaaaaaaaa

SEQ ID NO: 56888 - DNA, 2108 bp, Homo Sapiens
gggccgcctgagctgggccagccgcgcggcgggcgcgggcgcgggcgcgggcgcgggcgcgggcgggtggggagccccagccccggggttgcgggggcgcgtgaccggctgtctgcgtggggcccgcgcgcggtgcctctgcctgacggtgcccgagcctagcgcggagcctggcgcgggggctgcgagcacaggcccggggctgatcgtaatcggaagaggactgtcagaaggacgtagaaggcacggttttactgtgaggagcaaagattctttacctacgcattttacaagaaatgtgcagaaagccattgataaatatacctgcggaagccatacacccacgggagcccacacctcttggtctgggtcggccacacagagctctaccaccggctcatccacggagaggggctccgtttattcctggagagatgacgaatttgacgaagccagttcacagtcagtgcagcggttactctgggaggtggaggaaatgttatttgaagggaaagtgaaccctcagacccagagtctgctggccgaatgcggggagtggacaagaagatccctccatttgagagtattaggaagacagctgatcctgcccactgacaaaggcgtccagcatttccagggcagcactcctgcctccgcagtccacagacccccgctcagtgcctgcggacacagcagcaacatcagagagttgtgcatttctggctctcaaatagtcccagcagcactctcagcctctgccctgccaggccctgatgacacaggggttgctgacctaacggcacgttcatccctggaagaagaggtttaccatgtggatggaaagattgaggagtatttcgcttttgacagaaaagaggatgatgatgaatgtcttgaacaaaaaccagctcagcccggtaggaaatggcgcaaactcggacttcctcctgtttccccgcgtgactgtgtcaaagatgccgtggcagcagaagtgtttgatcacgtctggacaaatatggtagaacttttggaagagctgattagaaaacactgggaaactacactcacagaagggaaaaaacagagagaaacattgaaagtggctggaaacagatttccgcacgtcctcgttccacacgctcacgccgatggagccagtggccccccgtccggacacgccgaggctcacggcatctccctggcttctcgtctgaacccgccccagattcatcacttctccagcagtttttatagtgacatgaatggtgtcatgacaattcaagcaaaaccgcttcagcggagacctgcctattttgctgacagaacgcagaatgagaaggaggacaaagcatcgggtggaggggcaggtgctctctcctccgcaccgcacagactgggacgggcctcagacactcatggattatcaccttctgcaaagaaaacaccagtgccctggaggctgccttctcttgcttcagattcacagagactaaaaactcccaacatctatagtgacgaagttcttcggggaacaaaactgccgactggcgtggaccacatggcttccccactggttcaaacgtcacggagcaggttccccccgctagtcacggagaccagggggcagaatacagcagttcctggatgccgccttgtttcttacagaggaaggcatctacaaaaccgtgtgttgagtgccatgcctgacggtacagaacgatcgcgtcttcgagaaagaacagccaccctggaacggttgtcaaggcccagcacaacccacacgttccggcagtcggatacgcctcgaaaaagttcattgacacaaatggaatttgctgctcacacatggacaggtcaaagtattttgacaggttcacaatatgtgcctaaatcttttcagaggacaactttgactttcaagaggagattccaagtgacatcttgaaaccacctcaccagaaccattggagcacctgtggcctcggcacactgcttatcacttgaaaaatggaggaacaagtgttatatttatctgtgtgtctgacagtgtgagatgttagaccgagagaaaagcaaacaaataaatcacttaatcttgaacacttaaa

SEQ ID NO: 56889 - DNA, 5821 bp, Homo Sapiens
gctttgcccagtagttggaaagtgaactcgactcgtgatggttctcctgtcactttggttgatagcagccgctctggtagaggttaggacttcagctgatggacaagctggtaatgaagaaatggtgcaaatagatttaccaataaagagatatagagagtatgagctggtgactccagtcagcacaaatctagaaggacgctatctctcccatactctttctgcgagtcacaaaaagaggtcagcgagggacgtgtcttccaaccctgagcagttgttctttaacatcacggcatttggaaaagattttcatctgcgactaaagcccaacactcaactagtagctcctggggctgttgtggagtggcatgagacatctctggtgcctgggaatataaccgatcccattaacaaccatcaaccaggaagtgctacgtatagaatccggaaaacagagcctttgcagactaactgtgcttatgttggtgacatcgtggacattccaggaacctctgttgccatcagcaactgtgatggtctggctggaatgataaaaagtgataatgaagagtatttcattgaacccttggaaagaggtaaacagatggaggaagaaaaaggaaggattcatgttgtctacaagagatcagctgtagaacaggctcccatagacatgtccaaagacttccactacagagagtcggacctggaaggccttgatgatctaggtactgtttatggcaacatccaccagcagctgaatgaaacaatgagacgccgcagacacgcgggagaaaacgattacaatatcgaggtactgctgggagtggatgactctgtggtccgtttccatggcaaagagcacgtccaaaactacctcctgaccctaatgaacattgtgaatgaaatttaccatgatgagtccctcggagtgcatataaatgtggtcctggtgcgcatgataatgctgggatatgcaaagtccatcagcctcatagaaaggggaaacccatccagaagcttggagaatgtgtgtcgctgggcgtcccaacagcaaagatctgatctcaaccactctgaacaccatgaccatgcaatttttttaaccaggcaagactttggacctgctggaatgcaaggatatgctccagtcaccggcatgtgtcatccagtgagaagttgtaccctgaatcatgaggatggtttttcatctgcttttgtagtagcccatgaaacgggccatgtgttgggaatggagcatgatggacaaggcaacaggtgtggtgatgagactgctatgggaagtgtcatggctcccttggtacaagcagcattccatcgttaccactggtcccgatgcagtggtcaagaactgaaaagatatatccattcctatgactgtctccttgatgacccttttgatcatgattggcctaaactcccagaacttcctggaatcaattattctatggatgagcaatgtcgttttgattttggtgttggctataaaatgtgcaccgcgttccgaacctttgacccatgtaaacagctgtggtgtagccatcctgataatccctacttttgtaagactaaaaagggacctccacttgatgggactgaatgtgctgctggaaaatggtgctataagggtcattgcatgtggaagaatgctaatcagcaaaaacaagatggcaattgggggtcatggactaaatttggctcctgttctcggacatgtggaactggtgttcgtttcagaacacgccagtgcaataatcccatgcccatcaatggtggtcaggattgtcctggtgttaattttgagtaccagctttgtaacacagaagaatgccaaaaacactttgaggacttcagagcacagcagtgtcagcagcgaaactcccactttgaataccagaataccaaacaccactggttgccatatgaacatcctgaccccaagaaaagatgccacctttactgtcagtccaaggagactggagatgttgcttacatgaaacaactggtgcatgatggaacgcactgttcttacaaagatccatatagcatatgtgtgcgaggagagtgtgtgaaagtgggctgtgataaagaaattggttctaataaggttgaggataagtgtggtgtctgtggaggagataattcccactgccgaaccgtgaaggggacatttaccagaactcccaggaagcttgggtaccttaagatgtttgatataccccctggggctagacatgtgttaatccaagaagacgaggcttctcctcatattcttgctattaagaaccaggctacaggccattatattttaaatggcaaaggggaggaagccaagtcgcggaccttcatagatcttggtgtggagtgggattataacattgaagatgacattgaaagtcttcacaccgatggacctttacatgatcctgttattgttttgattatacctcaagaaaatgatacccgctctagcctgacatataagtacatcatccatgaagactctgtacctacaatcaacagcaacaatgtcatccaggaagaattagatacttttgagtgggctttgaagagctggtctcagtgttccaaaccctgtggtggaggtttccagtacactaaatatggatgccgtaggaaaagtgataataaaatggtccatcgcagcttctgtgaggccaacaaaaagccgaaacctattagacgaatgtgcaatattcaagagtgtacacatccactctgggtagcagaagaatgggaacactgcaccaaaacctgtggaagttctggctatcagcttcgcactgtacgctgccttcagccactccttgatggcaccaaccgctctgtgcacagcaaatactgcatgggtgaccgtcccgagagccgccggccctgtaacagagtgccctgccctgcacagtggaaaacaggaccctggagtgagtgttcagtgacctgcggtgaaggaacggaggtgaggcaggtcctctgcagggctggggaccactgtgatggtgaaaagcctgagtcggtcagagcctgtcaactgcctccttgtaatgatgaaccatgtttgggagacaagtccatattctgtcaaatggaagtgttggcacgatactgctccataccaggttataacaagttatgttgtgagtcctgcagcaagcgcagtagcaccctgccaccaccataccttctagaagctgctgaaactcatgatgatgtcatctctaaccctagtgacctccctagatctctagtgatgcctacatctttggttccttatcattcagagacccctgcaaagaagatgtctttgagtagcatctcttcagtgggaggtccaaatgcatatgctgctttcaggccaaacagtaaacctgatggtgctaatttacgccagaggagtgctcagcaagcaggaagtaagactgtgagactggtcaccgtaccatcctccccacccaccaagagggtccacctcagttcagcttcacaaatggctgctgcttccttctttgcagccagtgattcaataggtgcttcttctcaggcaagaacctcaaagaaagatggaaagatcattgacaacagacgtccgacaagatcatccaccttagaaagatgagaaagtgaaccaaaaaggctagaaaccagaggaaaacctggacaacctctctcttcccatggtgcatatgcttgtttaaagtggaaatctctatagatcgtcagctcattttatctgtaattggaagaacagaaagtgctggctcactttctagttgctttcatcctccttttgttctgcattgactcatttaccagaattcattggaagaaatcaccaaagattattacaaaagaaaaatatgttgctaagattgtgttggtcgctctctgaagcagaaaagggactggaaccaattgtgcatatcagctgactttttgtttgttttagaaaagttacagtaaaaattaaaaagagataccaatggtttacactttaacaagaaattttggatatggaacaaagaattcttagacttgtattcctatttatctatattagaaatattgtatgagcaaatttgcagctgttgtgtaaatactgtatattgcaaaaatcagtattattttaagagatgtgttctcaaatgattgtttactatattacatttctggatgttctaggtgcctgtcgttgagtattgccttgtttgacattctataggttaattttcaaagcagagtattacaaaagagaagttagaattacagctactgacaatataaagggttttgttgaatcaacaatgtgatacgtaaattatagaaaaagaaaagaaacacaaaagctatagatatacagatatcagcttacctattgccttctatacttataatttaaaggattggtgtcttagtacacttgtggtcacagggatcaacgaatagtaaataatgaactcgtgcaagacaaaactgaaaccctctttccaggacctcagtaggcaccgttgaggtgtcctttgtttttgtgtgtgtgtgttcttttttaattttcgcattgttgacagatacaaacagttatactcaatgtactgtaataatcgcaaaggaaaaagttttgggataacttatttgtatgttggtagctgagaaaaatatcatcagtctagaattgatatttgagtatagtagagctttggggctttgaaggcaggttcaagaaagcatatgtcgatggttgagatatttattttccatatggttcatgttcaaatgttcacaaccacaatgcatctgactgcaataatgtgctaataatttatgtcagtagtcaccttgctcacagcaaagccagaaatgctctctccagggagtagatgtaaagtacttgtacatagaattcagaactgaagatatttattaaaagttgattttttttcttgatagtatttttatgtactaaatatttacactaatatcaattacatattttggtaaactagagagacataattagagatgcatgctttgttctgtgcatagagacctttaagcaaactactacagccaactcaaaagctaaaactgaacaaatttgatgttatgcaaacatcttgcatttttagtagttgatattaagttgatgacttgtttcccttcaaggaaacattaaattgtatggactcagctagctgttcaatgaaattgtgaattagaaacatttttaaaagtttttgaaagagataagtgcatcatgaattacatgtacatgagaggagatagtgatatcagcataatgattttgaggtcagtacctgagctgtctaaaaatatattatacaaactaaaatgtagatgaattaacctctcaaagcacagaatgtgcaagaacttttgcattttaatcgttgtaaactaacagcttaaactattgactctatacctctaaagaattgctgctactttgtgcaagaactttgaaggtcaaattaggcaaattccagatagtaaaacaatccctaagccttaagtcttttttttttcctaaaaattcccatagaataaaattctctctagtttacttgtgtgtgcatacatctcatccacaggggaagataaagatggtcacacaaacagtttccataaagatgtacatattcattatacttctgacctttgggctttcttttctactaagctaaaaattcctttttatcaaagtgtacactactgatgctgtttgttgtactgagagcacgtaccaataaaaatgttaacaaaatat

SEQ ID NO: 56890 - DNA, 7096 bp, Homo Sapiens
gtgttgaggcagcaggatgcagagtgctgttcaagttttccagtggggtccctcaaagggacaactttgaaagatagctagcttccaaagaataagaaatagatagagttactgtacctgacttggggctgctcttaatcaagttctgcattgcaaggaagataatattcgagcgttatgaaggcggagaaggatcctgaagacgaagaaaatatcgttagagatccaagctaagtgtagcacagcatgtgagggactgagtcacttgtcaggagtttgtctgagagtttgctttgtgagcttacagagatttgtaacttaatgcaaagtagtttgccattagcaacaagaaactaaatcctgtctatgatgaactgttggttttcttgtactcctaagaacagacatgcagcagattggaataaatatgatgaccgattgatgaaagcagcagaaaggggggatgtagaaaaagtgacctcaatccttgctaaaaagggggtcaatccaggcaaactagatgtggaaggcagatctgtcttccatgttgtgacctcaaaggggaatcttgagtgtttgaatgccatccttatacatggagttgatattacaaccagtgacactgcagggagaaatgctcttcacctggctgctaagtatggacatgcattgtgcctacaaaaacttctacagtacaattgtcccactgagcatgcagacctgcagggaagaactgcacttcacgatgccgcaatggcagattgtccttctagcatacagctgctttgtgaccatggggcctctgtgaatgccaaagatgtagacgggcggacaccacttgttctggctactcagatgagtaggccaacaatatgtcaactgctgatagatagaggagcggatgttaattccagagacaaacaaaacagaactgccctcatgctaggttgcgaatatggttgcagagatgcagtagaagtcttaattaaaaatggtgctgatataagcttgctggatgcgcttggccatgatagttcttactatgcaagaattggtgacaatctggacattctaaccttgttgaagactgcatcggaaaataccaacaaagggagagaactttggaagaaagggccatctttgcaacagcgaaatttgacacacatgcaagatgaagtaaatgtgaagtcacatcagagggagcatcaaaatattcaggatttggagattgaaaatgaagatttgaaagagaggttgagaaaaattcagcaagaacaaagaatacttttggataaagtcaatggtttacagttacagctgaatgaggaagttatggttgctgatgatctggaaagcgagagagaaaagctgaagtcccttttggcagctaaagaaaagcaacatgaagaaagcttaaggactattgaggctctgaaaaatagatttaaatattttgagagtgatcatttaggatcaggaagtcatttcagtaaccgaaaagaagatatgcttcttaaacaaggtcagatgtatatggcagactcacagtgtacttccccaggtataccagcccatatgcaaagcagatctatgttaagacctctggaactatctttacccagtcaaacgtcatactctgaaaatgaaattttaaagaaagagttagaagcaatgcgaactttctgtgagtcagcaaaacaagaccgactgaagctccaaaatgaactggcacacaaagtggcagaatgcaaagctttagcattagaatgtgaaagggtcaaggaggattcagatgaacagataaagcaattagaagatgcattaaaagatgtgcagaagaggatgtatgagtcagaaggtaaagttaaacaaatgcagacccattttcttgcccttaaagaacacttaacaagtgaagcagcctcagggaatcacagactaaccgaggaactgaaggatcagttgaaagacttgaaagtaaaatatgaaggtgcttcagcagaagtggggaaattaagaaaccaaatcaaacaaaatgagatgatagtagaagagtttaagagggatgaaggcaagctgatagaagaaaataagcgattacagaaggaacttagtatgtgtgaaatggagcgagagaagaaaggaagaaaggtcacagagatggaaggccaggcaaaagaattgtcagcgaagttggccctttccattccagctgaaaaatttgaaaacatgaagagctcattatcaaatgaagtgaatgagaaagcaaaaaaattagtagaaatggaaagagaacatgaaaaatcacttagtgaaattagacagttaaagagagaacttgagaatgttaaggccaagcttgctcagcacgtcaaaccagaggaacatgaacaggttaagagcagattagaacagaaatcaggagaacttgggaagaagatcactgagttaacattgaaaaatcagacactacaaaaggaaattgaaaaagtttatttggataataagctcctcaaggagcaagcacataacttaacaattgaaatgaaaaatcattatgttcctttaaaagtaagtgaagacatgaaaaagtcacatgatgcaattattgatgatcttaatagaaagcttttagatgtaacacaaaaatatacagaaaagaagttggaaatggagaaattgctactggaaaatgacagcttaagtaaggatgtaagccgcctagaaactgtgtttgtacctcctgagaaacatgaaaaagagataatagctctgaaatccaatattgttgaacttaagaaacagctgtctgaacttaagaaaaaatgtggtgaagaccaggagaaaatacacgctctcacatctgaaaacactaacttgaagaagatgatgagtaatcagtatgtgccagttaaaacccatgaagaggttaaaatgacactgaatgacacgttagccaaaactaacagagaattattagatgtgaagaaaaaatttgaagatataaatcaggaatttgtaaaaataaaagataagaatgaaatattaaaaagaaacctggaaaacactcagaaccaaataaaagctgagtacatcagcctggcagagcacgaggcaaagatgagctcgctaagtcagagcatgagaaaggtgcaggatagtaatgctgaaatcttggccaactacagaaaaggccaagaagagattgtgacactgcatgccgaaattaaagcccagaagaaggagctcgacacaatacaagaatgcattaaggtaaaatacgccccaattgtcagctttgaggagtgcgagagaaaatttaaagcaacagagaaagaactaaaagaccagttatcagagcagacacaaaagtatagtgtcagtgaagaagaagtcaagaaaaacaagcaagagaatgacaagttaaagaaggagatttttacccttcagaaagatttgagagataagacagttctcattgagaagtctcatgaaatggaaagagcattaagcagaaaaacagacgagctaaacaaacagttaaaagacttgtcacagaaatacacggaagtaaagaatgtgaaagagaagctagtagaagaaaatgccaaacagacttctgagatacttgcagtgcaaaatcttttgcaaaaacaacatgttccattggaacaggttgaggctctgaaaaaatctcttaatggcacaattgaaaatctaaaggaagaactgaagagtatgcaaaggtgttacgagaaagagcagcagacagtgaccaaactgcatcaattgttggagaatcaaaagaactcttctgtacccctggcagagcatttgcagattaaagaagcatttgagaaagaagttggaatcataaaagccagcttgagagaaaaggaagaagaaagccaaaacaaaatggaagaagtctccaaacttcagtcggaggttcagaatactaaacaagcattaaaaaaattagagactagagaggtagttgacttgtctaaatataaagcaacaaaaagtgatttggagacacagatttctagcttaaatgaaaaattggccaatctgaatagaaagtatgaggaagtatgtgaggaagttttgcatgccaaaaagaaggaaatatctgcaaaagatgagaaggaattactgcatttcagcattgagcaagaaattaaggatcagaaggaacgatgtgataagtccttaacaacaatcacagagttacaaagaagaatacaagaatctgctaaacaaatagaagcaaaagataataagataactgaactgcttaatgatgtggaaagattaaaacaggcactcaatggcctttcccaactcacctacacaagtgggaaccccaccaagaggcagagccagctgattgacactctgcagcaccaagtgaaatctctggagcaacagctggccgatgctgacagacagcaccaagaagtaattgcaatttatcggacacaccttcttagtgctgcacagggtcacatggatgaagatgttcaggaggctctgctccagatcatacaaatgcggcaggggcttgtgtgctagccgttagcactgactgccagtatctgttttatcttgctggtgctgaacattctttgtgcaactccatggtctttctgggccttactgtgctggtataattaaaataaaatatattttgttctattggtaggtttttttttaaaattagatgaatatgttagtctttttcaatatcagtttgaatcttattttctgtatgtgttaattttacaaataggcaaacaacataactttgccctggattgactacatatttttaaaccttcaagtccctaataaaacatgagccatctgagtgagtccatatgaagcgaggttaggctgaaataattgcttaaagatgtctttcagagaaattaatttggttggtggccacttttaggtggatcaaaagacctttcagatcctcagaaccttgagacataatacagttgtgaggaatgtgttgtaacttggctggccaagttacatgttacagtatctttactgaggtaacttcattagtgtctttggccttttttgtaggtatagatattttttctttttacactaataacttttatgccttttaaaataaatttattttcataaatggtttgcagtgctaaattacatttagattaagaacaggcaggggtggaatatatcaggaatttataataaaattgccttaatctctacaacagtatcttaatttttacttgcggtgactattcttgccacaatattggagaataatgatagatgatatactagatttttcaaagtgtgaaaacctttagactttttttagcaattagtttgacattcgctactatagtaaccaagcactcattatatatgcatcctccaaatgtttcatgcttatttataggaaagttatattaatgagattaataatgtgaaatacagttttcctgcaaaattagcattagagaattgattttagataacagatttttaaagttttagagaaaagtacagtaatacagtaaactgaaagagtatatagatagcaataaaataacataagtggacatgtttatagtaaatactctgaagtaaacaaccgtttttattaactgcatctcattagggaaagtttatatgtcttgttattttttattaacattttatttaccattcagagtgaaaattactaatttgagtattaacaaataactgaataaatggatcattacagttaggttttctcaaattgcaaaatttgccttagcaattatctttgaacatcccgaaccagatttttaaatcccatttttgtttaatagggtaaaaataccatcaaaatgacttctcataccaaagaataagccatcatattttttcggtgttgaaacaacattgaaagtcagaattggatttgtttttaattctttatacggtttacataagcaatatctgtctctttaattattatgattaatgtcgtccttcagcatgagttctgtttcacaagttttgggccacctatttcaataaaaaataaaatataaattaaaaaagttgccgggggtggtggctcatgcctgtaatcccagcactttgggaggctgagggaggtagatcacctgaggtcagaagttcgagaccagccttaccaatatggtgaagccccatctctactaaaaatacaaaaattagccctgcatggtggcaggtgcctgtagtcccaggtactcgggaggctgagacaggagaatcgcttgaacctgggaggcggaggttgcagtgagccaagatctcgccactgcactccagcttgggcaatagcaagactccatctcaaaataaaataaaataaaacttagagcaaagtttaaaactgagtattcatattaagtgttttattttccatattagagatgggaagggaaccttatgtgtattttattttgttttcaaccatcaataaagttttctctagaatattgttttgaacatccttgtaaaagatttgcgagttaaactattttatttactgtctgtgagagcattgggagtaggaaacgatggactccaaagtacaagggagaatacccattttcattcagctatctggagtaaaatatcaagtacttccttcaactaatcttgtctcattcactcaccttttgatatcgaaggcagaaattgcgtttacaacactgaagaccaaagctttttaattagtaaacaagcggaacatagataatggacaatgctggccactgccattctgtgttcagaaagactatgagacctgaacatatggccaagaggaaagaagagtgacgttgtctaagatgtaatgagtgctctctgagagaatcactcaattcctattggagtgcaatccttacttgagaactttattactcttgttctgtgtagttttttttttttgtcacttccccatcagaaaagcatattctttttgatagagggtcagtgttataaataattgtcttttgaaataaaatcaaatattcatgcattgaaaaaaaaaaaaaaaaaa

SEQ ID NO: 56891 - DNA, 1845 bp, Homo Sapiens
gcggatggatccaacatggcggcgccgagcctgagccgagagaagagacctgggaaattaagtttcttgcggagtacggtggggattgcagctgctgagcagggattctggaaagcattgcgtacctgagcccccagcatggcgggcctaaagcggcgggcaagccaggtgtggccagaagagcatggtgagcaggaacatgggctgtacagcctgcaccgcatgtttgacatcgtgggcactcatctgacacacagagatgtgcgcgtgctttctttcctctttgttgatgtcattgatgaccacgagcgtggactcatccgaaatggacgtgacttcttattggcactggagcgccagggccgctgtgatgaaagtaactttcgccaggtgctgcagctgctgcgcatcatcactcgccacgacctgctgccctacgtcaccctcaagaggagacgggctgtgtgccctgatcttgtagacaagtatctggaggagacatcaattcgctatgtgacccccagagccctcagtgatccagaaccaaggcctccccagccctctaaaacagtgcctccccactatcctgtggtgtgttgccccacttcgggtcctcagatgtgtagcaagcggccagcccgagggagagccacacttgggagccagcgaaaacgccggaagtcagtgacaccagatcccaaggagaagcagacatgtgacatcagactgcgggttcgggctgaatactgccagcatgagactgctctgcagggcaatgtcttctctaacaagcaggacccacttgagcgccagtttgagcgctttaaccaggccaacaccatcctcaagtcccgggacctgggctccatcatctgtgacatcaagttctctgagctcacctacctcgatgcattctggcgtgactacatcaatggctctttattagaggcacttaaaggtgtcttcatcacagactccctcaagcaagctgtgggccatgaagccatcaagctgctggtaaatgtagacgaggaggactatgagctgggccgacagaaactcctgaggaacttgatgctgcaagcattgccctgacctattccctcttctcactttggggactgttcccatcacccacctctggagcttacactgttctggggtttgttctctacccttccaaccaatcacacccctccctgcacccatgtgcctgggcttcccctttatttcccttttccatttaccccgtaatgtgtctctacagctaccttaccactgagccgtaagacaaatgtataggaagaagcaaagtctacagcacatagtctttgtaagggattgatgtgaacactttttttggatgcactgaggagttatcaatacttctggctttatgagagctcttaaattttgtctaaaaaaccaaagggctgtgagtaagggagctatgtggaaagtgggactctgaagtgtattttgaaaattaatcgccaccctcttccaaattatagaattttttaaaaacaagctgtggccctttccactctctcctggcctctggtgctgctcctctctgccgcctttcctccattccatggcttgaaacctctgcctgatgtggctccttcctttttcccatttgtcaaaccctcttcaaaggaggaacagataagactgggtctgcctagtcatgcctcccaactgtggtggtatatgtgtacacacatacacagggtggatggagaagaggttgctgattaaaatacactccccctataaaggggaagggggagtgtgacactttctttccatgttcaagtgaaaataaataatgtaccctgc

SEQ ID NO: 56892 - DNA, 4344 bp, Homo Sapiens
gggatctgctagaagttggtcttccgccaggactagagtttcctcgcggtaacagcctccgtggcctccggaggaccatgtcattagactttggcagtgtggcactaccagtgcaaaatgaagatgaagagtatgacgaagaggactatgaaagagagaaagagttgcagcagttactcacagaccttccccatgacatgctggatgacgacctctcctctccagagctccagtattcggactgcagcgaggatggcacagacggacaaccacatcatcctgagcaattggagatgagctggaatgagcaaatgctgcccaaatctcaaagtgtaaatggtcccagttgtcaaggtttggaaccgtataataaagtgacatataaaccttatcagtcttctgcccagaataatggctcaccagcccaggagataacaggaagtgacacattcgaaggcctgcaacaacaatttttaggagctaatgagaactctgcagaaaatatgcagattattcaacttcaggttcttaacaaagcaaaagagagacaactggagaacttaattgaaaagttaaatgaaagtgaacgtcaaattcgatatctgaatcaccagcttgtaataataaaagatgaaaaggatggtttgactctcagccttcgagaatcacagaaactctttcagaatggaaaagaaagagagatacagcttgaagctcaaataaaagcactggagactcagatacaagcattaaaagtcaatgaagaacagatgatcaagaagtccagaacaactgaaatggctctggaaagcttgaagcagcagctggtggaccttcatcattctgaatcacttcaacgagctagagaacagcatgagagcattgttatgggcctcacaaagaagtacgaagagcaagtattgtccttacaaaagaatttggatgccacagtcaccgcacttaaagaacaggaagacatttgctctcgtctgaaagatcacgtgaaacaactggaaaggaatcaagaagcaatcaagttagaaaagactgagatcattaataagttgacaagaagtctagaggagagtcaaaagcagtgtgcccacttgttgcagtccgggtcagtacaagaggtggctcagctacagttccagctgcagcaagcacagaaggcacatgctatgagtgcaaacatgaacaaggctttgcaagaagaattaacagaactaaaagatgaaatttctctctatgaatctgctgcaaaactaggaatacatccaagtgactcagaaggagaattaaatatagaactcactgaatcgtatgtggatttgggtattaaaaaggtcaactggaaaaaatccaaagttaccagcattgtacaagaagaagacccaaatgaagagctttcaaaagatgagttcattctgaagttaaaggcagaagtacagcgtttgctgggtagcaactcaatgaagcgtcatctggtgtctcagttacaaaatgacctcaaagactgtcataagaaaattgaagatctccaccaagtgaagaaggatgaaaaaagcattgaggttgagactaaaacagatacctcagaaaaaccaaagaatcaattatggcctgagtcttctacttctgatgttgtcagagatgatattctgctgcttaaaaatgaaattcaagttttacaacaacaaaatcaggaacttaaagaaactgaaggaaaactgagaaatacaaatcaagacttatgtaatcaaatgagacaaatggtacaagattttgaccatgacaaacaagaagctgtggataggtgtgaaaggacttatcagcagcaccatgaagccatgaaaactcaaatacgtgaaagcctattagcaaagcatgctttggagaagcagcagctctttgaggcttatgagagaactcatttgcaactgaggtctgagttggataagttgaataaggaggtgactgctgtgcaggaatgttacctagaagtgtgcagagagaaggataatctagaattgactctcaggaagaccactgaaaaggagcaacagactcaggagaagatcaaagaaaaactcattcaacagcttgaaaaggagtggcagtctaagctggatcaaactataaaggcaatgaaaaagaagaccttagattgtggcagccaaactgaccaagtaaccaccagtgatgttatttccaagaaagagatggcaattatgatagaagagcagaagtgcacaatccagcaaaacttagaacaagagaaggacatagccatcaagggggctatgaagaaactcgaaattgaattggaactcaaacattgtgaaaatattaccaaacaggtagaaatagctgtgcaaaatgctcatcagcgatggctgggagaactaccagagctggcagagtatcaagcacttgtgaaggcagaacagaaaaagtgggaagaacagcatgaggtctctgtgaacaaaaggatatcatttgctgtttctgaagctaaagagaaatggaagagtgagcttgaaaatatgaggaaaaatatacttcctggaaaggaattggaagagaagattcattctcttcagaaggaacttgagttaaagaacgaagaagtccctgtggtcatcagggctgagttagctaaggctcggagtgaatggaacaaagaaaagcaagaagaaatccacagaatccaagaacaaaatgagcaagattaccggcaatttttagatgatcaccgaaataaaattaatgaggtgcttgcggcagctaaagaagactttatgaaacaaaaaactgaactacttcttcagaaggagacagaattacaaacttgtctagaccagagtcgtagagaatggactatgcaggaagccaagcggatccaactggaaatctatcagtatgaggaagacatcctgactgtacttggggttcttttaagtgatacccaaaaggagcacatcagtgattctgaggacaagcagcttttggaaatcatgtcgacttgttcttcaaaatggatgtctgtgcaatattttgaaaaactaaagggctgcatacagaaagcatttcaagatacacttcctctgcttgtagaaaacgctgacccagaatggaaaaagagaaatatggccgagctctctaaggattctgccagccagggcactggccaaggagaccctggacctgctgctggacaccatgctcagcccttggccttacaagcaacagaagcagaagctgataagaaaaaggtccttgaaattaaggatttatgctgtggacactgcttccaagaacttgaaaaggcaaagcaggaatgtcaagatctgaaaggaaaactggagaaatgctgtaggcatcttcagcatttagaaaggaagcacaaagctgtagtggaaaaaattggagaagagaataataaagttgttgaagaattaatagaagaaaacaacgacatgaagaataaattggaagaattgcaaacactttgtaaaacaccaccaaggtcattgtcagcaggggccattgaaaatgcttgcctgccatgcagtgggggagccttggaagaacttcgtgggcagtacattaaagctgtaaaaaaaattaaatgtgacatgcttcgttatattcaggagagtaaggaacgagctgcagaaatggtaaaagcagaggtactgcgagaacgtcaagaaaccgcccgaaagatgcgcaaatattatttgatttgcctccaacagattttgcaggatgatggaaaagaaggggctgagaaaaagattatgaatgctgctagcaaacttgctacaatggcaaaattactggaaacacctatttctagtaagtcccaaagcaaaactacacagtcaggtatgtcaaagtgagtcgccaaatggtttttctatcttttcttctttagctatttaatattttcagtatgaagaaggcagggaaggtaaggagtgagagttaatttgtgaagttttgtatgttttacttaaactagaagtttacgcaaaaagagtacacagtttccaatttaagtaggcagactgagcatgcccatcagtttcctattgctgcttccatccctcgaaatgatagaaaagattttaaacagcaaataaagaatgagaaaaagaagaaattataagtgggttttaaaaagttgcagtgggccaggcatcatggctcacacctgtaatcccagcactttgggaggctgaggtgggaggatcccttgatcccaggaatttgaggttgcagtaagctatgattgtgccactgtactccagcctgggtgacagagtgaggccctgtctc

SEQ ID NO: 56893 - DNA, 2644 bp, Homo Sapiens; identical to SEQ ID NO: 29955

SEQ ID NO: 56894 - DNA, 4282 bp, Homo Sapiens
ctctctctctttcgggcggagtcgcccaccactgccagcccagcgctggggggacctgctccaggctgtagccgcaggaccccaccaccccccatggctcccctggccttggtgggggtcacactcctcctggcggctcccccatgctccggggcagccaccccaaccccctccctgccgcctcccccggccaatgacagcgacaccagcacagggggctgccaggggtcctaccgctgccagccgggggtgctgctgcccgtgtgggagcccgacgacccgtcgctgggtgacaaggcggcacgggcagtggtgtactttgtggccatggtctacatgtttctgggagtgtccatcatcgccgaccgtttcatggcggccatcgaggtcatcacgtcaaaagagaaggagatcaccatcaccaaggccaacggtgagaccagcgtgggcaccgttcgcatctggaatgagacggtgtccaacctcacgctcatggccctgggctcctccgcacctgagatcctgctgtcagtcatcgaagtctgcggccacaacttccaggcgggtgagctgggcccaggcaccatcgtgggcagcgctgccttcaacatgtttgtggtcatcgccgtgtgcatctacgtcatcccagccggcgagagccgcaagatcaagcacctgagagtcttctttgtcactgcctcttggagcatcttcgcctatgtctggctttatctcatccttgctgttttttcccccggtgtggtccaggtgtgggaggcgctgctgaccctggtcttcttcccggtgtgcgtggtattcgcctggatggccgacaagcggctgctcttctacaagtacgtgtacaagcgctaccgcaccgacccacgcagcggcatcatcataggcgccgagggcgaccccccgaagagcatcgagctggacggcacgttcgtgggcgccgaggccccaggtgagctgggcggcctgggcccgggccccgccgaggcgcgcgagctggacgccagccgccgcgaggtcatccagatcctcaaggacctcaagcagaagcacccggacaaggatctggagcagctggtgggcatcgccaactactacgcgctgctgcaccagcagaagagccgcgccttctaccgcatccaggccacgcggctgatgaccggcgccgggaacgtgctgcgcagacacgcggcggacgcctcgcgcagggcggcgccggccgagggcgcgggcgaggacgaagacgacggcgccagccgcatcttcttcgagcctagcctctaccactgcctggagaactgcggctccgtgctgctgtccgtcacgtgccagggcggcgagggcaacagcaccttctacgtggactaccgcactgaggacggctctgccaaggcgggctccgactacgagtacagcgagggcacgctggtgttcaaaccaggcgagacgcagaaggagctgcgcatcggcatcatcgacgacgacatcttcgaggaggacgagcatttcttcgtgcggctgctgaacctgcgcgtgggcgacgcgcagggcatgttcgagccggacggcggcgggcggcccaaggggcggctggtggcgccgctgctggccaccgtcaccatcctggacgacgaccacgcaggcatcttctccttccaggaccgcctgctgcacgtgagcgagtgcatgggcaccgtggacgtgcgcgtcgtgcgcagctcgggcgcgcgcggcaccgtgcgccttccctaccgcacggtggacggcacggcgcgcggcggcggcgtgcactacgaggacgcgtgcggagagctggagtttggcgacgacgagaccatgaaaactcttcaggtgaagatagttgatgacgaggaatatgagaaaaaggataatttcttcattgagctgggccagccccagtggcttaagcgagggatttcagctctgctactcaatcaaggggatggggacaggaagctaacagccgaggaggaggaggctcggaggatagcagagatgggcaagccagttcttggggagaactgccggctggaggtcatcatcgaggagtcatatgattttaagaacacggtggataaactcatcaagaaaacgaacttggccttggtaattgggacccattcatggagggagcagtttttagaggcaattacggtgagcgcaggggacgaggaggaggaggaggacgggtcccgggaggagcggctgccgtcgtgctttgactacgtgatgcacttcctgacggtgttctggaaggtgctcttcgcctgtgtgccccccaccgagtactgccacggctgggcctgctttggtgtctccatcctggtcatcggcctgctcaccgccctcattggggacctcgcctcccacttcggctgcaccgttggcctcaaggactctgtcaatgctgttgtcttcgttgccctgggcacctccatccctgacacgttcgccagcaaggtggcggcgctgcaggaccagtgcgccgacgcgtccatcggcaacgtgaccggctccaacgcggtgaacgtgttccttggcctgggcgtcgcctggtctgtggccgccgtgtactgggcggtgcagggccgccccttcgaggtgcgcactggcacgctggccttctccgtcacgctcttcaccgtcttcgccttcgtgggcattgccgtgctgctgtaccggcgccggccgcacatcggcggcgagctgggcggcccgcgcggacccaagctcgccaccaccgcgctcttcctgggcctctggctcctgtacatcctcttcgccagcctggaggcgtactgccacatccggggcttctagggcctcgcgcagagactcgtccccaccgcccgcccggggctagggactcggctgcacctgctcttggaccctggtctccttttccccccagactcggcctcctctcctgggactcggcctcccttctccgccccctcccctggctttgattgcccctgttctgtgtccccagtagctcagccttccctcttcctctcgggagcctccccggttcctcccctgcggtgaccccaactccagcccatcctgttggtgaccgtctatatccctggggaaatttccaccccagtcccctccccagggaaccacccccagtaaccatcctggggagtttaaggtctctctccttggtcacccagcctggctttgcccccaaagtctcccttcccctagtgacccccccccacttcaccccatgtcccagagcctcagaacccaccctccctgggggaccctcgaaggaggctgtcagaggccgtctcagctcccagcccttccccccagccctcagggagctccgctcagccccggcggggaggagcgggtgggtgtgcgcgcaaggaggccgcacacctttccttccaatccctccactcgggttcttgggaggacactcattctccaggctcggagacgaggggagaagtttggggtttcagtcccagggcttagccggaggaagcacattttgaacctgcaacttcagacattccagctcccccactcgccctccactacctctgagagcccagccacgccttggagggaggggcttgtgtgtgtatatagtgtgtttgggggaggggggacgcgggagggtgcatgtcttgggaaaagggggtgacagacaacttttgagagggcagcagactccctcagccatgagaaccagctttggggaggaggccgggaatcaaagcgagtccagttgatctcccctgacaatctggaaggttcattttgccctcagtgccagccaatccgggcaggaccctcgaagaggagaccgagggtcccagaggaccaatgctacaagccagcaaatgctgccacatctctgcctgatggggggtggggatgggtggggggatgggactgggccaagggatctgggtgggcatttttaactttggaggccttccatctgtcggtaggccatctgcattttcttactgttgatgtttcctgcccaaaggacacatttgggcagtgccacccactccttgggcccctaggatgacccaactacccccataactttctgcttcccacaggttttcagcattctatcgtcctgttgtgctcagccccaacatcccagacccgttacccgctacccttctctcccccagctcatcatcagtcgctgtctcttttctgtgatttctgtaaaagttgccataaaactttgaaattctgcctg

SEQ ID NO: 56895 - DNA, 6216 bp, Homo Sapiens; identical to SEQ ID NO: 30124

SEQ ID NO: 56896 - DNA, 5662 bp, Homo Sapiens; identical to SEQ ID NO: 29584

SEQ ID NO: 56897 - DNA, 2611 bp, Homo Sapiens
agtgttactgcggtgaccgccagagcagcctcgacgctatggaggagcctggtgctacccctcagccctacctggggctggtcctggaggagctacgcagagttgtggcagcactacctgagagtatgagaccagatgagaatccttatggttttccatcggaactggtggtatgtgcagctgttattggattttttgttgttctcctttttttgtggagaagttttagatcggttaggagtcggctttacgtgggaagagagcaaaaacttggtgcaacgctttctggactaattgaagaaaaatgtaaactacttgaaaagtttagccttattcaaaaagagtatgaaggctatgaagtagagtcatctttagaggatgccagctttgagaaggcggcagcagaagaagcacgaagtttggaggcaacctgtgaaaagctgaacaggtccaattctgaacttgaggatgaaatcctctgtctagaaaaagacttaaaagaagagaaatctaaacattctcaacaagatgaattgatggcggatatttcaaaaagtatacagtctctagaagatgagtcaaaatccctcaaatcacaaatagctgaagccaaaatcatctgcaagacatttaaaatgagtgaagaacgacgggctatagcaataaaagatgctttgaatgaaaattctcaacttcagacaagccataaacagctttttcagcaagaagctgaagtatggaaaggacaagtgagtgaacttaataaacagaaaataacatttgaagactccaaagtacacgcagaacaagttctgaatgataaagaaaatcacatcaagaccctgactggacacttgccaatgatgaaagatcaggctgctgtgcttgaagaagacacaatggatgatgataacctggaattagaagtgaacagtcaatgggaaaatggtgctaacttagatgatcctctgaaaggagctttgaagaaactgattcatgctgctaagttaaatgtttctttaaaaagcttagaaggagaaagaaaccacattattattcagttatctgaagtggacaaaacaaaggaagagcttacagagcatattaaaaatcttcagactcaacaagcatctttgcaatcagaaaacatatattttgaaagtgagaatcagaagcttcaacagaaacttaaaataatgactgaattctatcaagaaaatgaaatgaaactctacaggaaattaacagtggaggaaaattaccgaatagaggaagaagagaagctttctagagtggaagaaaagatcagccgtgccactgaagagctggagacctatagaaagctagccaaagatcttgaagaagaattggagagaactgttcatttttatcaaaagcaggttatttcctacgagaaaagaggacatgataattggttggcagctcggactgctgaaagaaacctcagtgatttaaggaaagaaaatgctcacaacaaacaaaaattaactgaaacagagttgaaatttgaacttttagaaaaagatcctaatgcactcgatgtttcaaatacagcatttggcagagagcattccccatgtagtccctcaccattgggtcggccttcatctgaaacgagagcttttccctctcctcaaactttgttggaggatccactcagactctcacctgtgcttccagggggaggaggaagaggcccaagcagcccagggaatcccctggaccatcagattaccaatgaaagaggagaaccaagctatgacaggttaatcgatcctcacagggctccttctgacactgggtccctgtcatctccggtggaacaggaccgtaggatgatgtttcctccaccagggcaatcatatcctgattcaactcttcctccacaaagggaagacagattttattctaattctgaaagactgtctggaccagcagaacccagaagttttaaaatgacttctttggataaaatggataggtcaatgccttcagaaatggaatccagtagaaatgatgccaaagatgatcttggtaatttaaatgtgcctgattcatctctccctgctgaaaatgaagcaactggccctggccttattcctccacctcttgctccagtcagcggtccattgtttccagtggatacaaggggcccgttcatgagaagaggacctcctttccccccacctcctccaggaaccatgtttggagcttctcgaggttattttccaccaagggatttcccaggtccaccacatgctccatttgcaatgagaaacatctatccaccgaggggtttacctccttaccttcatccgagacctggattttaccccaaccccacattctgaaggtagaagcgagttcccttcaggattgattccgccttcaaaggagcctgctactggacatccagaaccacagcaagaaacctgacaatattgttgctttcttcaaaagtaattttgactgatctcattttcagtttaagtaactgctgttacttaagtgattgcacttttctcaaattgaagtttaatggaataatagttctcaggatagtattttgtaaataaagatggtttgaata

SEQ ID NO: 56898 - DNA, 1057 bp, Homo Sapiens
acatgaagatggtgacaccttcctgatttgacctgatggggctgagtccagatgccccagaggacgaggctggcatcaagaaggcagcagagaacatcaaggccttgattgagcatgaaatgaagaacgggatccctgccaatcgaatcgtcctgggaggcttttcacagggcggggccctgtccctctacacggccctcacctgcccccacccgctggctggtatcgtagcatcgagctgctggctgcctctgcaccgggccttcccccaggcagctaaaggcagtggcaagggcctgaccatcctccagtgccatggggagctggaccccatggtgcccgtacggtttgggaccctgacggctgttgtcacacctgccagggtccagttcaagacatactcgggtgtcatgcacagctgctgtcctcaggagatggcagctgtgaaggaatttcttggagaagttgctgccttctgtctaactagtcgctggccccagtgcggtgccccagctcatgggggactcagcaagcaagcgtggcaccatcttggatctgagccagtcgagcccctgtccccacccttcctggcctgtccttttcccacaggcctctggggcaggtggcaaggcctggccgggctttccttcctggcctcagccacctgcctccactcagctacttctcagtcatgaaggtggccatggccctgaggtccccttgctgctgtgggctccctgtccctgggcaggagtgctggtgaggaggtggagccttttgaggggggccttccctcagctgtttccccaaactggggggctgggccctgcctccccattaccctccttccctgcaggcctggagcctgtagggctggactgaggttcaggtctcccccaagctgtctcactctgactttgtccccactctagagcagggaaggggtgggggaggagttgtgtctcatcttctgtctccatgtggtttttgggtgcttttcttgttgtgtcctggattctgataaaattaaagaaattgcttcctcaaaaaaaaaaaa

SEQ ID NO: 56899 - DNA, 1295 bp, Homo Sapiens
gtgaaagagcaggttctgcttctttggtgtagtcctgaagcttcctaagaaacttcacatcaggtgatggataggagcaaccctgtaaaaccagccttagactatttttcaaacaggctggtgaattaccagatctccgtcaagtgcagtaaccagttcaagttggaagtgtgtcttttgaatgcagaaaacaaagtcgtggacaaccaggctgggacccagggccagctgaaggtgctgggtgccaacctctggtggccgtacctgatgcacgaacaccccgcctacctgtactcgtgggaggatggtgattgctcacaccaaagccttggacccctcccagcctgtgacctttgtgaccaactccacctacgcagcagacaagggggctctgtatgtggatgtgatccgtgtgaacggctactactcttggtatcgcaactacgggcacctggagttgattcagctgcagctggccgcccagtttgagaattggtgtaagacatcacaatcccattattcagagcgcgtatggagtggaaacgcttgtagggtttcaccaggtaagcggtgttgaactttctgcttgtgtattctctctgggcagagatgccacttgcctcccccaccatgccatctctgaagaatattacagaccattttggagcatggtgaataagaaattttcaccttaggagttcagttgaatagtcatttttatatttgtgactgcaagtcactcttaggggctgtacttccttagtactggtagcattattatccaatggacttttatagctttcattaggttttcttttgtttttgttctttaaagaacgttttacttatcttagtatttcatttttcatctatattatgaggcagtaagagtcttctgtttttccaaagttgagactgctttatatttatttcgtattgtctacagctgtagtgttcaatacattagccactagccacatgtggttatttaaataagataaaataaaaattggccgggcgtggtgggtcacgccggtaatcccagcactttgggaggccgaggcgggcagatcattaggtcaggagatcgagaccatccttactaagacggtgaacccccatctctattaaaaatacaaaaaattagccgggcgtggtggcgggcgcctgcagtcccagctactcaggaggctgaggcaggagaatggcgtgaacctgggaggcagagtttgcagtgagccgagatggcgccactgcactccagcctggggacagagcgagactccatctcaaaa

SEQ ID NO: 56900 - DNA, 1750 bp, Homo Sapiens
gatgcctgatctcatcaatctagcgggagagacaggataacctgtccgagagtatagcgccacttatgactccgccggaaaaattactttaaaaatcgccaaaaattacttggagcaaagggcagtccggcggcgttcgccaaggtggcgcagtcggttttgacctgtagcagagaaccaattctggagaacagcctcacttctttgattgaatacttacataatgcattggaacatgacatgagattaaggtttaataatgatagaatgaagaccacaataaaagagaccacaatccttagctcagcaattcttacctttcttacctatttgatgaagatgtcttttgaaaggtgtactgcaaggaacaaaatgtttgtaaattctcccttttacccaagggtggataattactgtacctcctcatggaaaaagttttatttaaagtgttatttctcattgaatactatcaaaaaggaaaaaaaaatgacctaaacttttgagatagatttggctctagtaagtatttagttatatcacttgcatatctgggagaagaaataagagactatcatcagtacattcccatctactaaaaaaatttattttacacatgtcaagggattacttataacttccattttattactaatagcttgaacccttttaatgaagacctaactcctccaccagaaatttaagtttatgttcttactttgtttacttataaaatacatctcaggtatttcggatgtcttttttttttctaagcctatatgaaatgaaaaatatattggcaaagtaaatgtttaaaccttttacgttaaaattactttgaaagatgaaaagttagtgctgtttttgtcacgttatactgaaattaaatgtttataatttatattttgggtttatgtataaatcatggaatttatgcaaaaatatgagtagtacagattctcctctaattctgtaggactttgaataatgtgatatttttcttataattggacccttgtgttttgaagaaatgccaactgcttgaagaatctccttgttatttgtattatttgctatagggttagatgttgagaaattctgctgacaaaaaattttaagccagttttacactaaatgttcctcagtctgattaatttgttattggatgtattctgtatctttcttttgtaatttgtgacttttatccacttagcacgaatgattctattaaagaaaatcattaggaagtggtagaaactttaaatcgccccagagtttgcctgtttccatattttattatcttataatcttcgggagtgcttacacttatggagctaacattttcagagatacagcttcttatagtaacactaaaactttcttcctctttggactgaatacctataattataactatatggtagtttaagtttccttgtgattagtcaaaaataccattttagtatgaagcaatgaagtctattatttgttgtcccataattgagaaagcttaaatacaccttttatgtaagagtttagtaagattctagcttagtctacacagatttttatatcaatttgtttatatttttattaatgtcatttctggaagtgtgaaaatgttaatgttcaacaagcaacattaaaaatagatttgaaacatttatatatagagaggtacacatttatttactgtttaggtactgaagattatcacttaataaaaaatatatatcccaaaaaaaaaaaaaaa

SEQ ID NO: 56901 - DNA, 3568 bp, Homo Sapiens; identical to SEQ ID NO: 31635

SEQ ID NO: 56902 - DNA, 6129 bp, Homo Sapiens
aattggaagcaaatgacatcacagcaggtcagagaaaaagggttgagcggcaggcacccagagtagtaggtctttggcattaggagcttgagcccagacggccctagcagggaccccagcgcccgagagaccatgcagaggtcgcctctggaaaaggccagcgttgtctccaaactttttttcagctggaccagaccaattttgaggaaaggatacagacagcgcctggaattgtcagacatataccaaatcccttctgttgattctgctgacaatctatctgaaaaattggaaagagaatgggatagagagctggcttcaaagaaaaatcctaaactcattaatgcccttcggcgatgttttttctggagatttatgttctatggaatctttttatatttaggggaagtcaccaaagcagtacagcctctcttactgggaagaatcatagcttcctatgacccggataacaaggaggaacgctctatcgcgatttatctaggcataggcttatgccttctctttattgtgaggacactgctcctacacccagccatttttggccttcatcacattggaatgcagatgagaatagctatgtttagtttgatttataagaagactttaaagctgtcaagccgtgttctagataaaataagtattggacaacttgttagtctcctttccaacaacctgaacaaatttgatgaaggacttgcattggcacatttcgtgtggatcgctcctttgcaagtggcactcctcatggggctaatctgggagttgttacaggcgtctgccttctgtggacttggtttcctgatagtccttgccctttttcaggctgggctagggagaatgatgatgaagtacagagatcagagagctgggaagatcagtgaaagacttgtgattacctcagaaatgattgaaaatatccaatctgttaaggcatactgctgggaagaagcaatggaaaaaatgattgaaaacttaagacaaacagaactgaaactgactcggaaggcagcctatgtgagatacttcaatagctcagccttcttcttctcagggttctttgtggtgtttttatctgtgcttccctatgcactaatcaaaggaatcatcctccggaaaatattcaccaccatctcattctgcattgttctgcgcatggcggtcactcggcaatttccctgggctgtacaaacatggtatgactctcttggagcaataaacaaaatacaggatttcttacaaaagcaagaatataagacattggaatataacttaacgactacagaagtagtgatggagaatgtaacagccttctgggaggagggatttggggaattatttgagaaagcaaaacaaaacaataacaatagaaaaacttctaatggtgatgacagcctcttcttcagtaatttctcacttcttggtactcctgtcctgaaagatattaatttcaagatagaaagaggacagttgttggcggttgctggatccactggagcaggcaagacttcacttctaatgatgattatgggagaactggagccttcagagggtaaaattaagcacagtggaagaatttcattctgttctcagttttcctggattatgcctggcaccattaaagaaaatatcatctttggtgtttcctatgatgaatatagatacagaagcgtcatcaaagcatgccaactagaagaggacatctccaagtttgcagagaaagacaatatagttcttggagaaggtggaatcacactgagtggaggtcaacgagcaagaatttctttagcaagagcagtatacaaagatgctgatttgtatttattagactctccttttggatacctagatgttttaacagaaaaagaaatatttgaaagctgtgtctgtaaactgatggctaacaaaactaggattttggtcacttctaaaatggaacatttaaagaaagctgacaaaatattaattttgaatgaaggtagcagctatttttatgggacattttcagaactccaaaatctacagccagactttagctcaaaactcatgggatgtgattctttcgaccaatttagtgcagaaagaagaaattcaatcctaactgagaccttacaccgtttctcattagaaggagatgctcctgtctcctggacagaaacaaaaaaacaatcttttaaacagactggagagtttggggaaaaaaggaagaattctattctcaatccaatcaactctatacgaaaattttccattgtgcaaaagactcccttacaaatgaatggcatcgaagaggattctgatgagcctttagagagaaggctgtccttagtaccagattctgagcagggagaggcgatactgcctcgcatcagcgtgatcagcactggccccacgcttcaggcacgaaggaggcagtctgtcctgaacctgatgacacactcagttaaccaaggtcagaacattcaccgaaagacaacagcatccacacgaaaagtgtcactggcccctcaggcaaacttgactgaactggatatatattcaagaaggttatctcaagaaactggcttggaaataagtgaagaaattaacgaagaagacttaaaggagtgcctttttgatgatatggagagcataccagcagtgactacatggaacacataccttcgatatattactgtccacaagagcttaatttttgtgctaatttggtgcttagtaatttttctggcagaggtggctgcttctttggttgtgctgtggctccttggaaacactcctcttcaagacaaagggaatagtactcatagtagaaataacagctatgcagtgattatcaccagcaccagttcgtattatgtgttttacatttacgtgggagtagccgacactttgcttgctatgggattcttcagaggtctaccactggtgcatactctaatcacagtgtcgaaaattttacaccacaaaatgttacattctgttcttcaagcacctatgtcaaccctcaacacgttgaaagcaggtgggattcttaatagattctccaaagatatagcaattttggatgaccttctgcctcttaccatatttgacttcatccagttgttattaattgtgattggagctatagcagttgtcgcagttttacaaccctacatctttgttgcaacagtgccagtgatagtggcttttattatgttgagagcatatttcctccaaacctcacagcaactcaaacaactggaatctgaaggcaggagtccaattttcactcatcttgttacaagcttaaaaggactatggacacttcgtgccttcggacggcagccttactttgaaactctgttccacaaagctctgaatttacatactgccaactggttcttgtacctgtcaacactgcgctggttccaaatgagaatagaaatgatttttgtcatcttcttcattgctgttaccttcatttccattttaacaacaggagaaggagaaggaagagttggtattatcctgactttagccatgaatatcatgagtacattgcagtgggctgtaaactccagcatagatgtggatagcttgatgcgatctgtgagccgagtctttaagttcattgacatgccaacagaaggtaaacctaccaagtcaaccaaaccatacaagaatggccaactctcgaaagttatgattattgagaattcacacgtgaagaaagatgacatctggccctcagggggccaaatgactgtcaaagatctcacagcaaaatacacagaaggtggaaatgccatattagagaacatttccttctcaataagtcctggccagagggtgggcctcttgggaagaactggatcagggaagagtactttgttatcagcttttttgagactactgaacactgaaggagaaatccagatcgatggtgtgtcttgggattcaataactttgcaacagtggaggaaagcctttggagtgataccacagaaagtatttattttttctggaacatttagaaaaaacttggatccctatgaacagtggagtgatcaagaaatatggaaagttgcagatgaggttgggctcagatctgtgatagaacagtttcctgggaagcttgactttgtccttgtggatgggggctgtgtcctaagccatggccacaagcagttgatgtgcttggctagatctgttctcagtaaggcgaagatcttgctgcttgatgaacccagtgctcatttggatccagtaacataccaaataattagaagaactctaaaacaagcatttgctgattgcacagtaattctctgtgaacacaggatagaagcaatgctggaatgccaacaatttttggtcatagaagagaacaaagtgcggcagtacgattccatccagaaactgctgaacgagaggagcctcttccggcaagccatcagcccctccgacagggtgaagctctttccccaccggaactcaagcaagtgcaagtctaagccccagattgctgctctgaaagaggagacagaagaagaggtgcaagatacaaggctttagagagcagcataaatgttgacatgggacatttgctcatggaattggagctcgtgggacagtcacctcatggaattggagctcgtggaacagttacctctgcctcagaaaacaaggatgaattaagtttttttttaaaaaagaaacatttggtaaggggaattgaggacactgatatgggtcttgataaatggcttcctggcaatagtcaaattgtgtgaaaggtacttcaaatccttgaagatttaccacttgtgttttgcaagccagattttcctgaaaacccttgccatgtgctagtaattggaaaggcagctctaaatgtcaatcagcctagttgatcagcttattgtctagtgaaactcgttaatttgtagtgttggagaagaactgaaatcatacttcttagggttatgattaagtaatgataactggaaacttcagcggtttatataagcttgtattcctttttctctcctctccccatgatgtttagaaacacaactatattgtttgctaagcattccaactatctcatttccaagcaagtattagaataccacaggaaccacaagactgcacatcaaaatatgccccattcaacatctagtgagcagtcaggaaagagaacttccagatcctggaaatcagggttagtattgtccaggtctaccaaaaatctcaatatttcagataatcacaatacatcccttacctgggaaagggctgttataatctttcacaggggacaggatggttcccttgatgaagaagttgatatgccttttcccaactccagaaagtgacaagctcacagacctttgaactagagtttagctggaaaagtatgttagtgcaaattgtcacaggacagcccttctttccacagaagctccaggtagagggtgtgtaagtagataggccatgggcactgtgggtagacacacatgaagtccaagcatttagatgtataggttgatggtggtatgttttcaggctagatgtatgtacttcatgctgtctacactaagagagaatgagagacacactgaagaagcaccaatcatgaattagttttatatgcttctgttttataattttgtgaagcaaaattttttctctaggaaatatttattttaataatgtttcaaacatatattacaatgctgtattttaaaagaatgattatgaattacatttgtataaaataatttttatatttgaaatattgactttttatggcactagtatttttatgaaatattatgttaaaactgggacaggggagaacctagggtgatattaaccaggggccatgaatcaccttttggtctggagggaagccttggggctgatcgagttgttgcccacagctgtatgattcccagccagacacagcctcttagatgcagttctgaagaagatggtaccaccagtctgactgtttccatcaagggtacactgccttctcaactccaaactgactcttaagaagactgcattatatttattactgtaagaaaatatcacttgtcaataaaatccatacatttgtgt

SEQ ID NO: 56903 - DNA, 642 bp, Homo Sapiens
atggagaaacagatgccaggatcacagcctacacactgcagccctgtgcccctcacacccagcaggttcctgctccagcgcggctcctggactggccccgggtgctggccccgggggtttcaatccaagcataattcagtgaagcatgtgtttggcagcgggacccagctcaccgttttaggtcagcccaaggccaccccctcggtcactctgttcctgccgtcctctgaggagctccaagccaacaaggccacactggtgtgtctcatgaatgacttctatctgggaatcttgacggtgacctggaaggcagatggtacccccatcacccagggcgtggagatgaccacgccctccaaacagagcaacagcaagtacatggccagcagctacctgagcctgacgcccgagcagtggaggtcccgcagaagctacagctgccaggtcatgcatgaagggagcactgcagagaagacggtggcccctgcagaatgttcataggttcccagcccccaccccacccacaggggcctggagctgcaggatcccaggggaggcgtctctctctgcatcccaagccatccagcccttctccctgtacccagtaaaccctcagtaaatatcctctttgtcaaccagaaa

SEQ ID NO: 56904 - DNA, 2583 bp, Homo Sapiens
gttcccacttcctcccgccccaggaaacctgccatggcctcctggtgagctgtcctcatccactgctcgctgcctctccagatcttcagttgcttcaggccactttgaatgtatatgagccggtcgtaggggatatcgatggcttagcttgggctcagaggcctgaaaatcgcccccaccaatcacctgtttcccccaatctaccctcctgaaggtcactgacaaagacttcattgtctcctaggagaggctgccatatatcagggctgacgtaattccatcttaatatcagttacattataaaaatttacctcgtgcctgaggccccagagcccaagggtgcaaagcagtaattagtcaaagttcaacttcccctcccactctgggctcaggctgtccctgagggcctgtgttttgagtctctttccagaaccttggtgtgaacttaggtcttggcgtcgggatcccttttcgtcacactcaggtgacctacaggctccgctcgacactgcaaggcttagaccagttcggtccaacagagaaagcaggcaaccaccatgtcatttgaaaacagtttcatcgggatataattcgcaacccatacagtgaatccatttaagatactctgacccatggatcccctgggtgcagccaagccacaatggccatggcgccgctgtctggccgcactgctatttcagctgctggtggctgtgtgtttcttctcctacctgcgtgtgtcccgagacgatgccactggatcccctagggctcccagtgggtcctcccgacaggacaccactcccacccgccccaccctcctgatcctgctatggacatggcctttccacatccctgtggctctgtcccgctgttcagagatggtgcccggcacagccgactgccacatcactgccgaccgcaaggtgtacccacaggcagacacggtcatcgtgcaccactgggatatcatgtccaaccctaagtcacgcctcccaccttccccgaggccgcaggggcagcgctggatctggttcaacttggagccaccccctaactgccagcacctggaagccctggacagatacttcaatctcaccatgtcctaccgcagcgactccgacatcttcacgccctacggctggctggagccgtggtccggccagcctgcccacccaccgctcaacctctcggccaagaccgagctggtggcctgggcggtgtccaactggaagccggactcagccagggtgcgctactaccagagcctgcaggctcatctcaaggtggacgtgtacggacgctcccacaagcccctgcccaaggggaccatgatggagacgctgtcccggtacaagttctacctggccttcgagaactccttgcaccccgactacatcaccgagaagctgtggaggaacgccctggaggcctgggccgtgcccgtggtgctgggccccagcagaagcaactacgagaggttcctgccacccgacgccttcatccacgtggacgacttccagagccccaaggacctggcccggtacctgcaggagctggacaaggaccacgcccgctacctgagctactttcgctggcgggagacgctgcggcctcgctccttcagctgggcactggatttctgcaaggcctgctggaaactgcagcaggaatccaggtaccagacggtgcgcagcatagcggcttggttcacctgagaggccggcatggtgcctgggctgccgggaacctcatctgcctggggcctcacctgctggagtcctttgtggccaaccctctctcttacctgggacctcacacgctgggcttcacggctgccaggagcctctcccctccagaagacttgcctgctagggacctcgcctgctggggacctcgcctgttggggacctcacctgctggggacctcacctgctggggaccttggctgctggaggctgcacctactgaggatgtcggcggtcggggactttacctgctgggacctgctcccagagaccttgccacactgaatctcacctgctggggacctcaccctggagggccctgggccctggggaactggcttacttggggccccacccgggagtgatggttctggctgatttgtttgtgatgttgttagccgcctgtgaggggtgcagagagatcatcacggcacggtttccagatgtaatactgcaaggaaaaatgatgacgtgtctcctcactctagaggggttggtcccatgggttaagagctcaccccaggttctcacctcaggggttaagagctcagagttcagacaggtccaagttcaagcccaggaccaccacttatagggtacaggtgggatcgactgtaaatgaggacttctggaacattccaaatattctggggttgagggaaattgctgctgtctacaaaatgccaagggtggacaggcgctgtggctcacgcctgtaattccagcactttgggaggctgaggtaggaggattgattgaggccaagagttaaagaccagcctggtcaatatagcaagaccacgtctctaaataaaaaataataggccggccagca

SEQ ID NO: 56905 - DNA, 3692 bp, Homo Sapiens
atggccgctaaatcagacgggaggctgaaaatgaagaaaagcagcgacgtggcgttcaccccgctgcagaactcggaccactcgggctcggtgcagggattggctccaggcttgccgtcgggggagcagcggcgctactcactgtgggactgcctctggatcctggccgccgtggccgtgtacttcgcggacgtgggcacagacgtctggctcgccgtggactactacctgcgcggccagcgctggtggttcgggctcacgctcttcttcgtggtgctcggctctctgtcggtgcaagtgttcagcttccgctggtttgtgcacgatttcagcaccgaggacagcgccacggccgctgctgcctccagctgcccgcagcctggagccgattgcaagacggtggtcggcggtgggtctgcagccggggaaggcgaggctcgtccttccacgccgcaaaggcaagcatctaacgccagcaagagcaacatcgccgcggccaacagcggcagcaacagcagcggggctacccgggccagtggcaagcacaggtctgcgtcctgctccttctgcatctggctcctgcagtcactcatccacatcttgcagctcgggcaaatctggagatatttccacacaatatacttaggtattcgaagccgacagagtggggagaatgacagatggaggttttactggaaaatggtatatgagtatgcggatgtgagtatgctgcatttgctagccacctttctggaaagtgctccacagctggtcctgcagctctgcattatcgtacagactcatagcttacaggccctccaaggtttcacagcggcagcttccctcgtgtccctggcctgggccttggcctcctaccagaaggccctccgggactctcgagatgacaagaagcccatcagctacatggccgtcatcatccagttctgctggcacttcttcaccatcgccgccagggtcatcacgtttgccctctttgcctcggttttccagctgtactttgggatcttcatcgtccttcactggtgcatcatgaccttctggatcgtccactgtgagacagaattctgtatcaccaaatgggaagagattgtgttcgacatggtggtggggattatctatatcttcagttggttcaatgtcaaggaaggcaggacacgctgcaggctattcatttactattttgtgatccttttggaaaatacagccttgagtgccctctggtacctctacaaggctccccagattgcagacgcatttgccattccagcgctgtgtgtggtgttcagcagctttttaactggcgttgtttttatgctgatgtattatgccttctttcatcccaatggacccagattcgggcagtcaccaagttgtgcttgtgaggacccagccgctgccttcactttgcccccagacgtggccacaagcaccctacggtccatctccaacaaccgcagtgttgtcagcgaccgcgatcagaaattcgcagagcgggatgggtgtgtacctgtctttcaagtgaggcccactgccccatccaccccatcatctcgcccaccacggattgaagaatcagtcattaaaattgacttgttcaggaataggtacccagcatgggagagacatgttttggaccgaagcctccgaaaggctattttagcttttgaatgttccccatctcctccaaggctgcagtacaaagatgatgcccttattcaggagcggttggagtacgaaaccactttataaagcaaaaggagttgcaggacccacaacatccagatgaaggggtgacagcagggctgtggccataatgacacttcatcctagagcagggcagtgagccgtgaagttcctagtgggaccgtcatcaccattatcatttgatcctgtcggctgggggcggctggtctccttccaaagcagctgcacccgagagtctctgactccacctgaaagaatgacgctggcttaataggactctccattgctaccaaactcctcctgcacggtcttgggtgcacccaccagagggtactactattatggaaaaattttgcctccaatcattagggtgtcttgatggcgttaactgatctttccataaaaatagattcagtcatacacacatacacacactaacacacataagttacaccagtcctctgtcaaaaaagcttaggtgacttttcttgatgcaaagctctgattcccacaggaatataaaaacaaagaaagagggaaacatccctcgagaaaaaaaatagtattgcttagaaaagaaaccattttctcatttggaaatccataccatgtgtgaaaatcctatccaacggacagcaaacccaaatgttgtctacacatgtgttagcattgatggagtggttcattttctacacatttcaggatttgttttatattttaaattttcagttgcgaacatcctttttgacagaaatcctatgcagcccatgtacggctttcaacaagaccaaggagctcaataacttcatgatgtaaattaaatagtaatcatgattcagtattcaattgcaaaaatgtaacaggtacacaaagaggaagtggggaaaaaggcaaaatgagagtctgattcccaggcatgtgcagcgcccattgggacataacggcagtgcggcgcgagccagaggaatgggctggaaccggatctgtttccagacgcagaatgagtggctctgtgtgaccataggcagatgctgactctggaagactccgtgccactcctttctagtgccaaacaccatccaaccacaggactgacgtggaagccccaaacaactgagaatgagtggcatgagccccctaaaagcaggcgagagaacgagcaatcaagttctccactgtgtacagacttttcctccccccaatccaaggtcaaagtgatgtgtcttttagaggctttgggacactttttagtaagtatgagcagacaaatgcaatgaatatgctatgaaaaaacccttctgaactgagagagggcttatcactatatccagctaagatttgtatttgaatcatctgtaaagtcgcactcttacaacaagcttctgggttttaaatacctccgtacagcaagtaaacgttccccgctttctgttctcagtgtcctcggtcatggtgcttttcgttgcattaaaagtgccggtcaaactttgatagtatttttttatagttggtgcagagtggaataactcatggattatttcaatatttttgtaataaaaaatatagggtatacacataggcatcatcacattttttatagacctggaatcgtttaaaatactttaagcatcataattacttgggatgtcagaaactggtccacaaattccatcagcctgcctcagcagattgaaaacatttgtctcttgcaagatcaccctactttgcaagttggtgcccccaggaacctggccaggggtgctatcagaatatcaggtgaagagagaatcagcttaaatagaaagggcttgtcaagactggccaatgtttcccaggaaatcaaagatgtaaatgattactttcatccatccattataacaaacctgaccacagtggaagctgtcttaaacttccttccctggttttatattaacccaactgatagattaagtattagtcaaaccact

SEQ ID NO: 56906 - DNA, 5079 bp, Homo Sapiens
atgtcctcggccgtggggccccgcggtcctcgcccacccacggtgcctccccccatgcaagagctgcccgacctgagccacctgaccgaagaggagaggaacattatcatggcagtgatggaccggcagaaggaagaggaggaaaaagaagaagccatgctcaagtgtgttgtcagggacatggcgaagcctgctgcctgcaaaacaccaagaaatgctgaaaaccagccccaccaaccttcaccgagattgcatcaacagtttgaaagctataaggaacaagtgagaaaaataggggaagaagcgcggcgttaccagggcgagcacaaagacgatgctccgacttgtggaatctgtcataaaacaaagtttgctgatgggtgcggtcatctctgctcctattgtcgcactaagttctgtgcgcgctgcggaggccgcgtgtctctacggtcaaacaacgaggacaaagtggttatgtgggtatgcaatttatgtcgaaagcaacaagaaatcttaaccaaatctggggcatggttctttggaagtggccctcagcagacaagtcaggatggaaccctgagtgatacagctacaggtgctggctctgaggtaccaagagaaaagaaagcacgactccaagagcgatcgcggtctcagacacccctaagcacagcagctgcctcctcccaggatgctgctcctcccagcgcaccaccagacaggagcaaaggggctgagccctcgcagcaagccttggggcctgaacagaagcaggcttcatccaggtctagaagtgaacctcctagagagagaaagaagaccccagggctttccgagcagaatggcaaaggagccctgaagagcgagcggaaacgcgtgccaaagacctcagcgcagcccgtggagggggccgtcgaagaacgggagcgcaaagaaaggcgggaaagccgaaggcttgagaaagggcgatcacaggattacccagacacgccggaaaaacgggatgagggcaaagcggcggatgaggaaaagcaaagaaaagaggaggattatcagaccaggtaccgcagcgacccgaacctggctcggtacccggtgaaaccgccgcctgaggagcagcagatgcgcatgcacgcccgggtgtcccgcgccaggcacgagcggcgccacagcgacgtggcgctcccgcgcaccgaggcgggcgcggcgctgccggagggcaaggccggcaaacgcgcgccggcggcagccagggcctcgccgccggactcgccgcgggcttactcggctgagagaactgcggagaccagggcgccgggcgccaagcagctaacgaaccacagcccgccggcgcccagacatgggccggttcccgcagaagccccggagctcaaagcccaggagcccctcaggaagcagagccgcctggaccccagctcggcggtcctcatgcggaaggccaagcgcgagaaggtggagaccatgctgcggaacgactctttgagctcagaccagtccgagtcggtgcggccgtccccgcccaagccgcaccggtccaagagaggcggcaagaagcggcagatgtcggtgagcagctctgaggaggagggcgtgtcgacgcccgagtacaccagctgcgaggacgtggagctggagagcgagagcgtcagcgagaaaggtgatttggattattactggttggatcctgccacgtggcacagccgggagacatcacctattagttcgcatcctgtaacgtggcaaccatctaaagagggggaccgattaattggacgtgttattcttaacaagagaacaaccatgcccaaagactcaggtgcattgctgggtctgaaagttgttggaggaaaaatgactgacttaggacgacttggtgctttcatcaccaaagtaaagaagggtagcctagcagatgtagttggacacctaagagcaggggatgaagttctagaatggaatggtaaacccctgccgggagctacaaatgaagaagtttacaacattattttagaatcaaaatcagaacctcaagttgaaattattgtttcaaggcctattggtgacattccccggattcctgagagctcccaccctccactggagtccagttcaagttcctttgaatctcagaagatggaaaggccttccatttctgttatttctccaacaagtcctggagctctaaaagatgccccacaagtcttaccagggcaactttctgtgaagttgtggtatgataaagtgggacaccagctgattgtaaatgttctgcaagcaacagatctacctgctagagtagatggacgtcctcgaaatccctatgtaaaaatgtattttcttccagatagaagtgataaaagtaaaaggaggaccaaaacagtaaagaaaatactagaaccaaaatggaatcaaacttttgtctattcacatgtacatcgtagagattttagagaacgaatgttagaaataactgtgtgggaccaaccaagagtgcaagaagaagaaagtgaatttcttggagagatcctcatagaattggagacagcgcttttagatgatgaaccgcattggtataaacttcagacacatgatgagtcttcactacctctgcctcagccatcacctttcatgccaaggcgacatattcatggagaaagctctagcaaaaagctacaaagatctcagcgaatcagtgatagtgacatctcagattatgaggttgatgatggtattggcgtagttcctccagtaggctataggtctagtgctagagaaagtaaatctacaacattaactgtgccagaacagcaaagaacaactcatcaccgctcacgttcagtatctcctcatcgcggcaatgatcagggaaagccgcgttcacgtttaccaaatgtgccattacagaggagtttagatgaaattcatccaacaagaaggtcacgttctccaaccagacaccatgatgcctcccgaagtccagttgatcatagaaccagagatgtggatagtcagtatttatcagaacaagacagtgagcttcttatgctgcccagagcaaaacgaggacgaagtgcagaatgcctacatactaccagacatcttgttaggcactataaaacattacctcccaagatgcctttattacagagcagttctcactggaatatttacagctcaattctgcctgcacatactaagaccaaatcagtgactagacaggacatttcccttcatcatgaatgctttaactcaacagtattgagatttactgatgaaatactggttagtgaactgcagccctttcttgacagggctaggagtgctagtaccaactgcttgagaccagatactagtttgcattcaccagaacgagaaaggggtagatggtccccctccctagataggagacgacctcctagtcccaggattcaaatccagcatgcgtctccggagaatgacaggcactccagaaagtctgaaagatctagcatccaaaaacagactaggaaaggcactgcctctgatgcagaaagggttctcccaacatgtctttctagaaggggacacgcagccccaagagcaactgatcagccagtcattaggggaaaacatcctgctcgctcaaggtcgagtgagcactctagtatcagaacactgtgttctatgcaccaccttgtccctggagggtcggcgccaccttctccgcttctgacaagaatgcaccgacagagaagtccaacacaatctcctccagcagacacatcgttcagcagtcgcaggggaagacagctcccacaagtgccagtgagaagcggcagtatagaacaagcaagcttagtagtggaggagcgaacaagacagatgaaaatgaaagtgcatcgatttaagcagacaacagggtctggttctagtcaagaacttgatcgcgagcaatattccaagtataacatacataaagatcagtacagaagctgtgataacgtctctgccaaatcatcagatagtgatgtcagtgatgtttccgccatttcccgaaccagcagtgcctcacgcctcagcagcacaagctttatgtcagagcaatctgagcgccccaggggtagaatcagttcatttacccccaaaatgcaaggcagacggatggggacttcaggaagatccatcatgaagagcaccagtgtcagtggagagatgtacacactggagcataatgacggcagccagtcagacacagctgtgggtacagttggagcaggtggaaagaaacggagatccagccttagtgccaaagtggttgccatagtgtctcgaaggagtagaagcacatcccagcttagtcaaacagagtcgggccacaaaaagttaaaaagtaccatccagagaagcacagaaacaggcatggcagctgaaatgagaaagatggtaaggcagccgagccgagagtctactgatggcagcatcaacagttacagctctgagggcaatttaatatttcctggagtgcgactgggagctgacagtcaattcagtgattttcttgatggattgggaccagcccagcttgttggccgccaaacccttgccacccctgcaatgggtgatatacaaataggaatggaggacaaaaagggccaattagaagtggaagtcattagagcacgaagcctcacacaaaagcctggttccaaatctacacctgctccatatgtcaaagtatatcttttggaaaatggggcctgtatagccaagaagaagacaagaattgcacgaaaaacccttgatcctttgtatcagcagtctctggtttttgatgaaagtccacagggtaaagttcttcaggtgattgtctggggagactatggcagaatggaccacaaatgctttatgggtgtggctcagatcttgttggaagaactcgacctgtccagcatggtgatcggatggtacaaattgttcccaccgtcctcactggtggatcccacactcactcccctcacccggcgggcttcccagtcatctctggaaagttcaactgggcctccctgtattcgatcatag

SEQ ID NO: 56907 - DNA, 5178 bp, Homo Sapiens; identical to SEQ ID NO: 24384

SEQ ID NO: 56908 - DNA, 2555 bp, Homo Sapiens; identical to SEQ ID NO: 31227

SEQ ID NO: 56909 - DNA, 5726 bp, Homo Sapiens; identical to SEQ ID NO: 30294

SEQ ID NO: 56910 - DNA, 4718 bp, Homo Sapiens; identical to SEQ ID NO: 27220

SEQ ID NO: 56911 - DNA, 2817 bp, Homo Sapiens
ttctacagatctcactcctcgccctttttttttttcctttggtgtgtgttttttgttttgttttgttttttaaaaaaattcttgctgtgttggaactagcgagtggtggagtctctgaagcctcatcagtcaccgggactgtcaggaatagtggtttaagaggaagctcggcctggggcactataccctgtcatccagttccctgcctcggagataaagattccagctacatgggcaaacgcctggatcagccacaaatgtacccccagtacacttactactatcctcattatctccaaaccaagcagtcctatgcaccagctccccaccccatggctcctcccagccccagcacaaacagcagcagcaacaacagcagcaacaacagcagcggggaacagttgagtaaaaccaacctgtacattcgaggcctcccaccaggcaccactgaccaggacctaatcaagctgtgccaaccgtatggaaaaattgtatctacaaaggcaattcttgacaaaaacacaaatcagtgcaaaggttatggttttgtagattttgacagtcctgcagccgcacagaaagcggtagcatctctcaaggcaaatggcgtgcaggcacagatggctaagcaacaagagcaagacccaacaaacctatacatctcaaatctccccatttctatggatgagcaggagcttgagaatatgctgaaaccctttggacatgtcatttccacaagaatactaagagacgctaatggagtcagcagaggtgttggctttgccagaatggagtctactgaaaaatgtgaagtggtaattcaacattttaatggaaaatatctgaaaacaccaccaggcatcccagcccccagtgagcctttgctgtgcaaattcgctgatggaggacaaaagaagcgacagaatcaaagcaaatatacccagaatgggaggccttggcccagggaaggagaggctggcatggctttgacctatgaccccacagctgccatacagaatggattttattcttcaccgtacagtattgcaaccaaccgcatgattccacagacatctatcacgccattcattgctgcttcccctgtctccacataccaggtccagagtacttcatggatgcctcatccgccatacgttatgcaaccaacaggtgctgtgattacaccaaccatggaccatcccatgtcaatgcagccagccaacatgatgggcccactgacacagcagatgaatcacctttcgttgggcacaacaggaacgattcaatcccaagacaggattatgatactccaccagctgttgtgtcagtatatgactgctgctgctcctatgcaagggacctacattcctcagtacacgcctgtgcctccgacagctgtttctattgaaggtgttgttgctgatacctctccccagacagtggcaccttcatcccaggacaccagtggtcagcagcaacagatagcagtggacacatccaacgaacatgcacctgcatattcttaccaacagtctaaaccataaacaggactgaagaatgtctgtctgaatctttgccttgaatgaagaaacttcattgaacaagaagttggcttccagtttgcacagacgtcaatggaatgcatttttttgttgttgttgttgttttttttttagtgttataccttacccaatgaaagcaaagtttttatgtgctgtgcaaatggtcttcatgtggtctgacaatttatttttgccatcatttttttaattaaagaaaaaatttccagaagaggaaaaaaaaactacaaaaaacaaaacattgaaggttgatattttatgtggaagaacatttgaattgaattcagaatttttctgaaggtgtagatactttttttttttttttaacagaaaacctgatgtcaagaggtgggcaatagaaatggaaacaaattgtcttcctcaataattaagctactttctctttttcccttcttgttttaatctagtgggttttttattttattttttcttagaaatatgtaggtaaggtttatcttgaatcttaattgccttaattttaaggacgtcaaaggctctcgaggcaagctgtcaacgtcttgttgaaaacaaaaatcaagaaagaattgaaatactgtgccggctttcactggcacagaagtttaagactatgagtttttagggtgaagaaaaaactgtacagtttaaatgaaaatgtttttcttcatttgaagaaaatttgttgataaaccatggcaactgcaagaattggaaaaatgctgggacttttcatgaactttgtcttaagtgttgacatgaatcattctaaaaggctaaaacattttacagtaaagttattaaggttggtttaaaaacaactgcattagaaataatgcgtgtttggggggcagaatgcagatttttttaatttacaaagcgtgatcgctagcaaaagcattagtgctttttatctgcagtcttttttatgagctttacaaagtttttagtcagctttgcttgtcacattgcaaaacctagcttaagagcattaaaaaaaaaaacttaagtagataggagcttatggtcaaaaagtgcaaaaaaaaaaacaaaaaaaaagcaatagatagagaaattgttgacaatttctgtagtctttcctagttgtgatcaaattcagcctatggatggcctattttataccaaagatgaagtgacaccctattacagtccagaagatagaggttgttttcgtttcttttctttttaaaaaaaaaaaaatttatttgaccgaaaaaaa

SEQ ID NO: 56912 - DNA, 994 bp, Homo Sapiens
ttacttgtttccgatttctcaacctcttttctaggcaaaaggtgtccaatctctacagacccacagaatctaacagatgtctctgtattcctcctcctagaactacagaggatccagaacggcagccggtcctcactgggctgttcctgtccatgtgcctggtcatggtgctggggaacctgctcatcatcctggccatcagccctgactcccacctccacatccccatgtacttcttcctctccaacctgtccttgcctgacatcggtttcacctccaccacggtccccaagatgattgtggacatccagtctcacagcagagtcatctcctatgcaggctgcctgactcagatgtctctctttgccatttttggaggcatggaagagagacatgctcctgagtgtgatggcctatgaccggtttgtagccatctgtcaccctctatatcattcagccatcatgaacccgtgtttctgtggcttcctagttttgttgtctttttttttctgtcctcagtcttttagactcccagctgcacaacttgattgccttacaagtgacctgcttcaaggatgtggaaattcctaatttcttctgtgacccttctcaactcccccatcttgcatgttgtgacaccttcaccaataagataatcatgtatttccctgctgccatatttggttttcttcccatctcagggacccttttctcttactctaaaattgtttcctccattctgagggtttcatcatcaggtgggaagtataaagccttctccacctgtgggtctcacctgtcagttgtttgctgagtttatggaacaggcgttggaggttacctcagttcagatgatgtgtcatcttcccccagaaatggtgcagtggcctcagtgatgtacacggtggtcacccccatgccgaaccccttcatctacagcctgagaaacagggatattaaaagtgtcctgcggcggccgcacggcagcacagtc

SEQ ID NO: 56913 - DNA, 3335 bp, Homo Sapiens
ggccctagcggcttggcggagctggagccctccctggcagtgcgtcggcgctgggctatggccccctcctctccgggggatcgtcgccttggtcccccgaccctaggagtcgggcagggcagaaccaggctaaagaaacgtccagcgtagcttcaaggatgcaccgcgtgatccctatcggatctccccgacgcgtcaggcctgcctagacggtgctgggagcgcgtctccttgaacgttgtcccgcctgggattgcgaggcttctcagaactttgcttctccagcagaataatcctgcggaagactgagcagttcttgtgagtgtaaaaccatggcccatgcattggtgacgttcagggatgtggctatagacttctctcagaaggaatgggagtgcctggacactacccagaggaaattgtacagagatgtgatgttggagaattataataacttggtctcactgggatattctggctcaaagccagatgtgattaccttactggagcaagggaaagagccctgcgtggtggcgagggatgtgacaggaagacagtgccccggtttgttatccaggcataagaccaagaaattatcttcagaaaaggacattcatgaaatcagtttatccaaagagagtataatagaaaaaagtaaaactcttcgtctgaaaggatccatttttagaaatgagtggcagaacaaaagtgagtttgagggtcaacagggacttaaagaaagatctatcagtcaaaagaaaatcgtctctaaaaaaatgtcaactgatagaaaacgtccctcttttactctgaatcagagaattcacaatagtgagaaaagctgtgactcacacttggttcaacatgggaaaatagattctgatgtgaaacatgattgtaaagaatgtgggagtacttttaataatgtctatcagcttactctccatcagaaaattcatactggtgaaaaatcctgtaaatgtgagaaatgtgggaaagtttttagtcatagctatcaacttactctgcatcagagatttcatactggtgagaaaccctatgaatgtcaagaatgtgggaagacctttactctttacccacaacttaatcgacatcagaaaattcacactggtaaaaaaccctatatgtgtaagaaatgtgataagggtttttttagtagattagaacttactcaacataaaagaattcatactggtaagaaatcttatgaatgtaaagaatgtggaaaagtttttcaacttattttctactttaaagaacatgagagaattcatacaggtaagaaaccctatgaatgtaaggagtgtgggaaagcttttagtgtatgcggacaacttacccgtcatcagaaaattcatactggtgtaaaaccctacgaatgtaaggaatgtggaaagacctttagacttagtttttaccttactgaacacagaagaactcatgcaggtaagaaaccttatgaatgtaaggagtgtgggaaatcatttaatgtgcgtggacagcttaatcggcataaaacaatccatactggtataaaaccttttgcatgtaaggtgtgtgagaaggcttttagttatagtggtgacctcagagtacattctagaattcatactggagagaaaccatatgaatgtaaggaatgcgggaaagcctttatgcttcgttcagtccttactgaacatcagagacttcatactggtgtgaagccctacgaatgtaaggaatgtgggaagacctttcgagttcgttctcaaattagtctacataagaaaattcatactgatgtgaagccctacaaatgtgtacgatgtgggaagacctttagatttggtttctaccttactgaacaccagagaattcacactggtgaaaagccctataaatgtaaagaatgtggaaaggcctttattcgtagagggaatcttaaagaacatctgaaaattcattctggtttaaaaccctatgactgtaaagaatgtgggaagtcctttagtcggcgtgggcagttcactgaacatcagaaaattcatacgggtgtaaaaccatacaaatgtaaagaatgtgggaaggcctttagtcgtagtgtagaccttagaatacatcaaagaattcatactggtgagaaaccctatgagtgtaaacaatgtgggaaggcctttagacttaattcacaccttactgaacatcagagaattcacactggtgagaaaccctatgagtgtaaggtatgtagaaaggcctttagacaatattcacatctttatcaacatcagaaaactcataatgtaatttaatataagaaaaggtttccatgtcatgctctatttatagaatatcaaaatatttatggccagaagttctgtcaatgtgttgatgtttttttacacatattaacttaataaatgtatgagtcttaaatacctcttagttctcattaaatttaggaaaattcacactagaaaataaagctgttaatgtaacagttgtggaaaagtgttctagcaacagcatatacttatcatcattgcctttccactactctactatctgtgtgatattagacaaaatatttgcttcttggtacctcagctgtaaaatgaaacacacctaaaagtgtggttgtttccaacatgtataatacagcaacaactatctggcccaaactgctttggattaatattggatattactgtttttattatcatcaacattattattagtggatttcttaataggaagatgcaatggagatgacaaatttggaaaaaccactcatcacttacatttcatgaagtacttctttgataaaatctgttatgggctgaatgtttgtgttcccgtaacaattcctatgttgaaacacgaatcccaaggtgatggtatttgaaggtagggcctttaggaggaaattaggtcatgagggtggagccttcatgagtggaattactgcctttataagaagaagccaaagagccagctagctctttcaaccacatgaggttacagcaagaagtcagcagtctacagtgcaaaagagggccttcaccagaacccaagcatgctggcaccttgaccttggactttcagcctccaaaactgtgagaaataaacctcagttgtttataaaaaaaaaaaaaaaaaaaaaaaaaaaaaaaaaaaaaaaaaaaaaaaaaaaaaaaaaaaaaaaaaaaaaaaaaaaaaaaaaaaaaaaaaaaaaaaaaaaaaaaaaaaaaaaaaaaaaaaaaaaaaaaaaaaaaaaaaaaaaaaaaaaaaaaaaaaaaaaaaaaaaaaaaaaaaaaaaaaaaaaaaaaaaa

SEQ ID NO: 56914 - DNA, 3461 bp, Homo Sapiens
caggtgcgggggccctcgccgccaccctgcttatctggggacagtcccggaacccggtgacccggctccgccccaacccgcgccctcgtccacccgcagcagccaaggcctcttccccggccccgggagcccgcgccacgcccgtcgctcgcgcgttccagtccaggctacagcaggggctctccagcctgcattccatggccaacagcagtgcagctgcagaagcacttctggaagcctcctgacttgaactagaccttggacaccctctccagagcccagcaattgtgagggactgatggagaagtatgtggctgctatggtgctgagtgcagctggagatgccctggggtactacaatgggaagtgggagttcctccaggatggggagaagatacaccggcagttggcccagctgggcggcttggatgccctagacgtgggaaggtggagagttagtgacgacacagtgatgcacttggccacagcagaagctcttgtggaagctgggaaagcccctaagttgactcaactgtattacctccttgctaagcattaccaagactgcatggaagacatggatgggcgggcaccaggtggtgcctcggtgcacaacgccatgcagctgaagccgggcaagcccaatggctggaggattcccttcaacagccatgagggcggctgtggggctgccatgcgggccatgtgcatcggtctcaggttcccacaccatagccaactggacacactgatccaagtgagcatcgagagtggtcggatgacccaccaccacccaacaggctacctgggggcccttgcgtctgctctttttacagcctatgctgtgaatagcagaccacccttgcagtggggaaaaggactgatggagctgctaccagaagctaaaaagtacattgtccaatcaggctactttgtagaggaaaatcttcaacactggtcctacttccaaaccaaatgggaaaattacctaaaacttagagggattttggatggagaatcagcccctaccttccctgagtctttcggtgtgaaggagagggatcagttctacacctccctgagctactctggctggggtggcagcagtgggcacgatgcccccatgattgcctacgatgctgttcttgctgcaggagactcctggaaggagcttgcccaccgagcctttttccatggtggagacagtgattctacagctgccattgctggctgctggtggggagttatgtatggttttaaaggagtgagtccctccaactatgagaaactagaatacagaaaccggctggaagagacagctagggctttatattctctcgggtcaaaagaagacactgtaatttccctttagggagacgtgatgttcacttctgatggattcttcttttgtgtatttccttttctgctatttcttttcagtttttccaaagtcaagagtcttaaccttgtactcagggaattttgagataacaagtcccttgggcaccttaagctcagttttttcaggctcatcctgttcttccagaatctatcccttttcttacactgaagagtcctttagctcaattgatagggtcagcgtctcgcaagcaaaaaatctcatgacctcatatttgagtcttcattttcatcatctacttgttctaaaagttttttctgtttgtctcaagttgggttcccacaaagtggactttgagacaaagatctgaatgcaagcagtttatatgggagatgattccaggaaataccgatatgagaatggggaaatgaaaccaggaagggaagagagctagtatggggtatgttaatgagcaggtttccactgtgggcggttggcactctgccatctgagtcctctgcctaaagcattcctcagaactgtcccatttgaagggcaagcaaacctggggtatttatccactgacttccatctgacactggttgaggaccactgccagggatgctaactccctggtaattcttggcttaccctttgtacaaaccaaaccttagtgtcttcaggtaaagactcagagatacttgcaggggcaagctgtaaagggcatgggaacagtgagggacatatgtggggtcctaacaatatctgctaggctggtctacctcctaaatatactctgaatctatcacctctattgccttcttgcactgaggatttttcagctggatttctgcaatccaagctactcaagtctgggagatgctgctctgagctgctctcagtactctcctcatcatggcagttaacacattaccaattttgttattgtctgtttgcttgtttgcattatttctaaacagaacctagcacagtgcttgggcagccaataggcattaatcagtatctattgagtgttatgaactagcctcctagctcgtgcttccctcattaccctccagagttatgtttacgaataacaaattgaccatgctaaactaatcatgttccaatgaatacatcacctttcttcatttcttgatgctcttcccaatccttgtctacctgataataaattcttacttgtccttcaagacccaactcagatagatagagcttcctgagtgaaacctgctttgattgttcaggcacttggccaccttctcctcactcctcccacagccttctgtcttggccttgtcatcacatcaatcctgttgtgtggtgctgtgtgtcttctgggtcagtcctaggcacatgctgcccagcacatgtccacctgggaaatgagatgccatcgtcacattcatttggtcaccctcagtccagccagtgggcttgctctcatttggcctgttctcaggggtgggaaggaagagcgtcccttccttctccttttgagaaaaccacagaactatgactctcatgatttttcctttgtgaaatccctggttttcagctggaagcggtgggtaaatgaggtctgatgatagcagtcctgccaccttctagttcatcccataggaatgtttttccaagtccttccagtctttttagaacgtggtggaggagggttgtgtgtgccccagggggtcgggggtaggggatgcagggaggatcttagcatttgttgttttctagtgcagggctttagccacaattgtaaacaacaggaaaaggctctttagagatcctattagatttgctttgccgattgtcactcttcatcacaggcacatttcaaaaagaggttagactttcagacttcttttttctcaaacctcaaaacttccaccccaaacttcgctctcagctggtgactttgcttctttatgtgtgtgtatgtgtgtcagagaaagagagagagagagagagaagggaggatgagaacgaatggggggaagagataaactttatgcataacattagggtaaatcaataaagatggtctgacacatcgtaaaaaaaaaaaaaaaaaaaaaaa

SEQ ID NO: 56915 - DNA, 2006 bp, Homo Sapiens
cgcggccggagctgtgggctggcagccatgggtgccaggcagtgctgagagcagtggggcatggctgcagccctgcaggtcctgccccgcttggcccgagcccccttgcatccactcctctggcggggctcagtggcccgtctggccagcagcatggccttggcagagcaggccaggcagctgtttgagagtgctgtaggtgcagtgctgccgggccccatgctgcaccgggcactatccttggaccctggtggcagacagctgaaggtgcgggaccggaactttcagctgaggcaaaacctctacctggtgggctttggcaaggctgtgctgggtatggcagctgcagctgaggaactactgggccagcatcttgtgcagggcgtgatcagcgttcccaaggggatccgtgctgccatggagcgtgccggcaagcaggagatgctgctgaagccacatagccgtgtccaggtattcgagggtgcggaggacaacctcccggaccgcgatgcgctgcgggctgcactggccatccagcaactggctgagggactcacagctgatgacctgctgctcgtgctgatctcaggtgggggttcagctctgctgcctgcccccatcccacctgtcacactggaggagaagcagacactcactagactgctggcagcccgtggagccaccatccaggagttgaacaccattcggaaggccctgtcccagctcaagggtggggggctggctcaggccgcctaccctgcccaggtggtgagcctcatcctgtcagatgtggtgggggaccctgtggaggtgattgccagtggccccaccgtggccagttcccacaatgtgcaagattgcctgcatatcctcaatcgctacggcctccgtgcagccctgccacgttctgtgaagactgtgctgtctcgggccgactctgacccccatgggccacacacctgtggccatgtcctgaatgtgatcattggctctaatgtgctggcgctagctgaggcccagcggcaggccgaggcactgggctaccaggctgtggtgctgagtgcagccatgcaaggtgatgtaaaaagtatggcccagttctacgggctgctggcccatgtggctagaacccgcctcaccccatccatggctggggcttctgtggaggaagatgcacagctccatgagctggcagctgagcttcagatcccagacctgcagctggaggaggctctggagaccatggcatggggaaggggcccagtctgcctgctggctggtggcgagcccacagtacagctgcagggctcgggcaggggtggccggaaccaggaactggccctgcgtgttggagcagagttgagaaggtggccgctggggccgatagatgtgctgtttttgagcggtggcaccgatgggcaggatgggcccacagaggctgctggggcctgggtcacacctgagcttgccagccaggctgcagctgagggcctggacatagccaccttcctagcccacaatgactcacataccttcttctgctgcctccagggtggggcacacctgctgcacacagggatgacaggtaccaatgtcatggacacccacctcttgttcctgcggcctcggtgatggcataggtcacattttgggagttcagaggaggcctacaagggcaaggtcagatggcagagcaaggttggtcctcagggcctctctaagccttagggcccctcctctccttggccttggctgtttggttaactgtcaccttccactcagggcctctgctctatatctattcccttccagccagactggcagatgggggcttccccctacccctgaggatgaggacaagcccctcggccagttcagcgttcccgtgcttctcccttgggcagcctctctcttgagcccctcaccctgtttctttctgtgaagcgagaatgtctgaaaataaataggaccatgccatgggtaaaaaaaaaaaaaaaaaaaaaaaa

SEQ ID NO: 56916 - DNA, 1362 bp, Homo Sapiens
aaaaccttgaggtgattcatcttccaggctctccttccatcaagtctctcctccctagcgctctgggtccttaatggcagcagccgccgctaccaagatccttctgtgcctcccgcttctgctcctgctgtccggctggtcccgggctgggcgagccgaccctcactctctttgctatgacatcaccgtcatccctaagttcagacctggaccacggtggtgtgcggttcaaggccaggtggatgaaaagacttttcttcactatgactgtggcaacaagacagtcacacctgtcagtcccctggggaagaaactaaatgtcacaacggcctggaaagcacagaacccagtactgagagaggtggtggacatacttacagagcaactgcgtgacattcagctggagaattacacacccaaggaacccctcaccctgcaggccaggatgtcttgtgagcagaaagctgaaggacacagcagtggatcttggcagttcagtttcgatgggcagatcttcctcctctttgactcagagaagagaatgtggacaacggttcatcctggagccagaaagatgaaagaaaagtgggagaatgacaaggttgtggccatgtccttccattacttctcaatgggagactgtataggatggcttgaggacttcttgatgggcatggacagcaccctggagccaagtgcaggagcaccactcgccatgtcctcaggcacaacccaactcagggccacagccaccaccctcatcctttgctgcctcctcatcatcctcccctgcttcatcctccctggcatctgaggagagtcctttagagtgacaggttaaagctgataccaaaaggctcctgtgagcacggtcttgatcaaactcgcccttctgtctggccagctgcccacgacctacggtgtatgtccagtggcctccagcagatcatgatgacatcatggacccaatagctcattcactgccttgattccttttgccaacaattttaccagcagttatacctaacatattatgcaattttctcttggtgctacctgatggaattcctgcacttaaagttctggctgactaaacaagatatatcattttctttcttctctttttgtttggaaaatcaagtacttctttgaatgatgatctctttcttgcaaatgatattgtcagtaaaataatcacgttagacttcagacctctggggattctttccgtgtcctgaaagagaatttttaaattatttaataagaaaaaatttatattaatgattgtttcctttagtaatttattgttctgtactgatatttaaataaagagttctatttcccaaaaaaaaaaaaaaaaaa

SEQ ID NO: 56917 - DNA, 8034 bp, Homo Sapiens
cttgagtgttagagctgagtagttttcccagaatctctaagtcctttttatgctcttttatgaatgaatagaattagtaaaagataaataaattttttcttttggatttcttaaccagtggaaaaaatgttgactttaaaagttcataaaatcaaattttgcttaagaatatgttatttccacttgtgaggccagcctggtagacctctgggatccttttctgttcactcacacaccactgagataaggagtgaagtgtgggctaaatagggctgaggcttgggcaagggcatttctgccagagcaccagagacgtcagcatctcaagggcactgtggtatggaaaaggacgccacatgagtaaattttaaaaatataaatattttaaagggtaaaaatgagggtccctgtatttgaggatataaaagatgaaactgaagaagaaaagataggggaagaagaaaatgaagaagaccaggtcttctataagcctgttattgaagacttaagcatggaattggccagaaaatgcacggaactcattagcgatatccgttataaagaagagtttaaaaagtccaaggataagtgtacatttgtgactgacagtcctatgctaaaccatgtaaaaaatatcggtgcttttatttctgaggcaaaatacaaaggcaccattaaagctgacctttctaattctctttataagcggatgccagccacaattgacagtgtttttgcaggagaagttacacagctccagagtgaggtggcctacaagcagaaacatgatgctgccaaaggattctcagattatgcccacatgaaggagccccctgaggttaaacatgccatggaggtcaataaacaccagagtaatatttcttataggaaagacgtgcaggacacccacacgtacagtgcagaacttgaccgaccagacatcaagatggcaacccagatctctaagatcataagcaatgcagaatacaagaaaggacaaggaataatgaataaagagcccgctgtaattggaagaccagattttgaacatgccgtggaagcttctaaactttctagtcaaattaaatacaaagaaaaattcgataatgaaatgaaggataagaaacatcattacaatcctcttgaaagtgcttcttttaggcagaatcagcttgctgctacactggcgagcaatgtgaagtacaagaaagacattcaaaatatgcatgatccagtttcagatctcccaaatttgttgtttttagaccatgttttgaaagccagcaaaatgctcagcggccgagaatataaaaagctctttgaggaaaacaaaggaatgtatcattttgatgcagatgctgtggaacatctgcaccataaaggcaatgccgtcctccaaagtcaggtgaaatataaagaagaatatgagaaaaataagggaaagccaatgcttgaatttgttgagacaccatcatatcaagcttcaaaggaggctcaaaagatgcaaagtgaaaaagtttacaaagaggattttgagaaggagattaaaggaaggtcatcactggatttagacaagactccagaatttttacatgtaaagtacatcaccaaccttctgagggagaaagaatataaaaaagatttggaaaatgagataaaagggaaaggaatggaacttaattcagaagttcttgatatccaaagagcaaagcgggcctctgaaatggcaagtgagaaagaatacaagaaagacctggagtcaataattaaagggaaaggaatgcaagctggcactgacacccttgaaatgcagcatgccaagaaggctgcagagatagcgagtgagaaagactataaaagagatctggagactgaaattaaagggaaagggatgcaggtgagcacagacactcttgatgtccagagagctaagaaagcatccgagatggccagccagaaacaatacaagaaggacttagaaaatgaaattaaagggaaaggaatgcaagtgagcatggatatcccagatatccttcgagccaagaggacatctgaaatctatagccagagaaagtataaagatgaagcagagaagatgctttctaactattctaccatagcagatactcctgaaattcagagaattaagacaactcaacaaaacattagtgcggtattttataagaaagaagtgggagctggcactgcagtgaaagatagcccagagatcgaacgagtgaagaaaaatcagcagaatattagttcagtgaaatacaaagaagagattaaacatgcaacagccatttctgatcctccagaactaaagagagttaaagaaaaccagaagaacatcagcaatctccagtataaagagcaaaactacaaggccactccggtaagcatgaccccggagatagagagagtgaggcgaaaccaggagcagctgagtgcggtaaaatataagggagaacttcaacggggaactgcaatttctgatccaccagagctgaagagggcaaaagaaaaccagaaaaacatcagcaatgtttattacagaggtcagctgggaagagctaccactttaagtgtaactcctgaaatggaaagagtgaagaagaatcaagaaaatattagctcggtaaaatatacccaggaccataaacagatgaaaggtagaccaagtctgattttagatacacctgctatgagacatgttaaagaagcacaaaatcatatttcaatggtaaaataccatgaagattttgaaaaaacaaaggggagaggctttactcccgtcgtggacgatcctgtgacagagagagtgaggaagaacacccaggtggtcagcgatgctgcctataaaggggtccaccctcacatcgtggagatggacaggagacctggaatcattgttgacctcaaagtttggcgcacagatcctggctccatcttcgaccttgatcccctggaagacaatattcagtctagaagtctccatatgctctctgaaaaggcgagtcactataggcgacactggtctcgatcccattccagcagtactttcggtacaggtctcggagacgacaggtcagaaatctccgagatttaccctagcttttcatgctgcagtgaggtaacaagaccgtctgatgaaggagcacctgttcttcccggagcctatcagcaaagccattcccaaggctatggctacatgcaccagaccagtgtgtcatccatgagatcaatgcagcattcaccaaatctaaggacctaccgagccatgtacgattacagtgcccaggatgaagacgaggtctcctttagagacggcgactacatcgtcaacgtgcagcctattgacgatggctggatgtacggcacagtgcagagaacagggagaacaggaatgctcccagcgaattacattgagtttgttaattaattatttctccctgccctttgagctttattctaatgtatcccaaacctaatctttttaaaagatagaagatacttttaagacaacttggccattattttacaatgatgtatccttcctttgacaattagacacacaggtaccaggaagaaggaatgacctctgggctgaaaacagcagcattttcagtaattcctacaaacaaaaatctttgtgtctggacgcctggtgctgctaattgtgttcatggtttcctttgattggctattgaacccttctgggaaatgtatttttgtagactttaatagagaagttgattgtcccttaaatgtagcgtgtgtttgaaacttcttagctgtcactttggaatcaccccaagccaattctcttaactctgtaatgcagccaataatacaaacccgttttgcttttgagtcatgaggcaatttccaatattagtgaaaattgcccaatataataagtgtaaacagtggcagaaggacagtctggttaaaattatattgactggtggccttagggatctagaaacttctactaaacagagaaatttccttgttccctaggctgactggtatctatttatttctcatttgtaccaaggcatctcctactctccatttatattctatggacccaagtctatgctcagttccacagaatgtcaggaccaaataacttcacagctactctgcaaagggcaaattataatgtcattgatataatttccctagtagcatttaccctgttgcatgtcatgtagattcaagcttctgtaacataggcagctgcactgcgcgttcctattattgaagcaaaaagggtgactgatacctaaaagccctttcttcctctagtcgccagctcatcagaaaaacatactttgaaaagatgcttgagattttcctgctgcatcgcactctagtttggaaggatttacatcttaggaaataacatgtatactctagtaaataagcgatttaggtgttccattgaacagctttgattaacttaatgccaccattgatttcaaagtgaagaaaatgtaacagaagccagtgaagcaatggaagctggagtgtgactggaaaaatactcagcaaacaaagttaccaattccatacagagatgatctggtgtcttcttttggaaaatggtattcaaattctggaatggaaatctagccaccaaaacgggttaatcaaaagacgtccttttccgttttttttgcttttattttctaaatcatttttaagggaatgaaacaggaatgtcatcagagattttttagtacaggcccaagagcctgtactctaagaaagaaatttttgccatgtatgaattttcgaataagtgactttgcaggcttttgctagcccttgctggtgggtctggaaattacatccagagtctgcagtccaggtcaccaagccagcggcacccgtcggcaaccctgtgtttaacggattgtgccgtttactgtgacctgcaacggggtggcattcacttagggtctgacttcacagctatgacaaaaccgaaaaagcaaaactgcgaggaagtgctaagatgtacgggtcttggggatatctgccttatatgttatattcaaggaaattaacgaaacatcctgtgaaacatcgtttaaggaaacgtttactagtccaaaggccaaagctaatttatttccactttagaaaagttagcacatgcttttgaaaatctgtgatttcattttattaggctaaaagggtaaataggctttattacactgaagctgcatctatatgtcactgacataaagttgaaaaaataaatgcaggcaaataactagagacttcttttaagggggtttggctggtttctctcactgaaatggccagtcgtgattaaagtgataaaaccccatatctgttttggtatattgtacacaaacctacaaaaataaactgaacttgcaatatttttgcaataaaatctgtcgttaaaactgaggataaaatacctgctcaattttattttactaagtatatatttacatttcacccaggcaggccattttcttttgtgattataagaaagagtagttgttgattaaattttcagactaaatataggacaggtacaattttggataaatagcagatttataagaaccgcaatgaaaactgacttgaaataatgcttgtaatcaggaaagtaatttcatccaccgatttcaaaaccagattcactgagcataaaagtcaatacatatttgaggaataagtctcctaaaattttaagcttcacgtaataatgtttgcatagcaaaatatttctgcttcaagcctttaggaattaagatctgatcagaatttaactaaagggtagttgttttacaatgaagactaaaactgaacaagatgttgcatgcgcttaggccataatttggtagtgttggcagttgttaataaagcttgtcaggatgttaagcatctcaggagaaatattggaaaattatatgtataaaaccaaagtgctgtttttaaaagcatcatttaaaaaaaaatgacatgcctgaacaacttttccactttccacgtgcttccctcccacctttggtttggcaacaggtatctcgtgcatgaagctgacagctaaagaagattttaaaaattgagttaaagatgactgtgtaaatgtccaagcacagagagcatgcacctgactttctaaagtttgatgtgttctcaagcctgacagaagcacaaggaacagtttgatacacttttaaaaggttctgaaaacaaagctgtatagggatcctctctctcttgagcaaagtatagcaacagaatatattgcttttgttgtaagcttttgtagtacatgtttttactaataattcttgttctctagaaagctttctatttctaacctatggcaaaatgaatccttcatgtcttcttgttattgtttacacacttgcagtgtagcccagtttgaaatatttatttggttatcaactgcccatggaggaggctcttgatgatcccaggtctcctcgacctccatacaccacacaggcatttgtaagcacagtttccacaagcaccttgtaggaatatggataagattagaccagcccctctctgtccactgggtttatttcttgaagaagatgcagatctggtttttccaatgtgccacagtctttccttatcctctccatgctgagcttgacaacactctgggaatgaggaacaagactttttctaaaaagatagtggaagttcaagggatgtacctcgttttcaggttcatccatctccagtggaatgttttcaataaaagatgaagaaaatgtgtgtgatctttaataacacatccctatagaaagtggataaaagatataccaaaactgtaatacagatatatacaaatataggtgcctttttgattactcttgtttgtctagtatgctcttggaaagaaaaccaagcaagcaagttgctgcctattctatagtaatattttattacacatgattgatatttttgtggtagggaagtgggatgctcctcagatattaaaggtgttagctgattgtattttatctctaaagatttagaactttagaaaatgccgacttcttccatctatttctgaaaggttctttgtggatttatatagagttgagctatataaacattaactttagatttgggatttaaaatgcctattgtaagatagaataattgtgaggctggattcactacacaagatgaacttcacttcataaattaattataccttagcgatttgcttctgataatctaaaagtggctagattgtggttgttttggttaaggtgatatggaggtgggagagcttttagttaagtaagaagctatgtaaactgacaaggatgctaaaataaaagtctctgaagtattccatgccttttggaccctttcctcgcaactaactgtcaactgttgatcaaaaaagtcaaggcattgtatgttgcttctgtggttattattctgtgatgcttagactacttgaacccataaacttggaagaatctttgagcaaattttctcagttgtctgtatgacttcagtatattcctgggaatgccataggattttttgtgcttgatacatggtatccagtttgcatagtatcacttctttgtaatccagttgctgttaagaatgatgtactttaaaggaaaagagaaaactgcatcacagtcccattctccagtgtccatgcaatgaattgctgagcatttaggaagcagcaccaagtctattacaggcatggtgtgaaacttgatgtttgacctgtgatcaaaattgaaccattgtacagtttggcttctgtttgcttcaaaatatgtagaattgtggttgatgattaatttgcgagactaactttgagagtgtaacagttttgaagaaaacattgaatgttttacaaatgaaggggcttcacggaatgttacaatgttactaatataatttggcttttgttatgcaaattgttaacaccagctattaaaatatattttagtagaaaaaaaaaaa

SEQ ID NO: 56918 - DNA, 3431 bp, Homo Sapiens; identical to SEQ ID NO: 32090

SEQ ID NO: 56919 - DNA, 6496 bp, Homo Sapiens
tgttttccgttagcgctttgctgcacggacaaatgcatttaagagcccacagaacaaggcgtggaaaagtctcccccacggcaaaaacgaaatcacttcttcattttattgtactatgtgtggctggggtggttgttcatgcacaagaacaaggcatagatattcttcatcaactaggccttggaggcaaagacgtaagacactcatcaccagtgactgctgtaccatcagcatctacaccgttacctcagggggtccatttaacagaatcaggagtcatttttaaaaatgatgcttatatcgagacacctttcgtgaaaattttaccagtcaacttggggcagccgtttacaatattaactgggttacagtcacatcgggtgaacaatgcatttctcttcagcattagaaataaaaatagactgcaattaggagtacaattactacctaaaaaattagtagtacacattagaggaaagcagcctgcagttttcaactacagtgttcatgatgagcaatggcactcatttgccattactattagaaaccaaagtgtctcaatgtttgttgagtgtggaaagaaatattttagcacagagactattccagaagttcagacctttgattctaatagtgtgtttactttaggaagtatgaataataattctatccattttgaaggaatagtatgtcagttagatattattccttctgcagaagcatctgcagactactgcagatatgtgaaacagcagtgtcgccaagcagacaaataccaacctgaaacaagcattccttgtacaactctcataccaacaaagataccggaacactctcccccgcccaaactatttgctgaaaaagtactgtcagaggatacatttactgaaggcaaaagcattccaaatatcataaaaaatgattctgaaaccgtgtataaaagacaagaacaccagatatcaagatctcagttatcttctcttcagtcaggaaatgtctctgctgtggatctcacaaaccatgggattcaggccaaagaaatgatcactgaggaagatactcagacaaatttcagcctgtcagtgaccactcatcgcatcagtgaggcaaaaatgaataccaaagagaaatttagttctctcctaaacatgtctgacaatatcacacaacatgatgatagagtaactggtctgtcactgtttaagaagatgccatctattcttccacaaattaaacaagatacaattactaatctcaagaaggctatcacagcaaatctacacactaacgaactcatggaaatgcaaccaattttaaacacaagcttgcatagagtgacaaatgagccatctgtggataatcaccttgatctaaggaaagaaggtgaattttatcctgatgctacttatcccatcgaaaatagctatgaaactgagctttatgattattattattatgaggatctaaatacaatgcttgaaatggagtatctgagagggccaaaaggagacactggacctcccggtccacctggtccagcaggtatcccaggtccgtcagggaagagaggtccacggggcataccagggccacatggaaatcctggtttacctggattacctggtccaaagggccccaaaggagatccaggattttccccaggtcaatctgttcctggagaaaagggtgatcaaggcctttctggattaatgggcccccctggtatgcaaggtgataagggtctcaaaggacatcctggactcccaggacttccaggtgaacaaggaattccaggatttgctggtaatattggttcacccggttaccctggcaggcagggtttagctggaccagaaggtaatccaggtcctaaaggtgcacaaggttttattggctctcctggagaagcgggacaactgggacctgaaggagaacggggcattcctgggatccgtggaaagaagggttttaaggggagacagggttttccaggtgactttggagacagaggccctgctggtcttgatggcagtcctggacttgtaggtggcactggtcctccggggtttcctgggcttagaggcagtgttggccctgtgggaccaattggacctgctggaattcctggcccaatgggcctttcagggaataaaggactacctggaatcaaaggtgataagggtgaacaaggcacagcaggagagctaggagaacccgggtattctggagacaagggtgctgttggtttaccaggaccaccagggatgagaggaaagtcagggccttcaggccaaacaggtgacccaggactccaaggaccatctggccctccaggaccagagggttttccaggagatattgggattcctggacaaaacggccctgaaggaccaaagggactccttggaaatagaggacctcctggacctcctggtctcaaaggaactcagggagaagaaggaccaattggagcctttggggaactggggccaagaggaaaaccaggtcaaaaggggtatgcaggtgaaccaggaccagaaggcttaaagggagaagtaggagatcaaggaaatattggaaaaattggtgaaacaggacctgttggcttacctggagaagttgggatgactggaagcattggcgaaaagggagaacgtggaagtccaggcccactaggtccccagggagaaaaaggtgttatgggatatccaggtcctcctggggttccaggacctatcggtccattgggattacctggtcatgtgggggcaagaggaccacctgggagtcaaggtcctaaaggacaaagaggatcaagaggaccagatggtctcttaggggaacaaggtatacaaggtgccaagggtgaaaaaggagatcaaggaaaaagagggcctcatggtcttattggtaagactggaaaccctggagaaagaggatttcaagggaaaccaggtttacagggattgcctggaagtacaggtgacagaggacttccaggagagccaggactgcgaggactgcaaggtgatgttggacctcctggagaaatgggcatggagggacctccaggcactgagggagagtctggtctgcaaggtgaaccaggtgcaaagggagatgttggaactgctggcagtgttggaggaactggggaaccaggtttacggggtgaaccaggagctcctggagaagaaggtctccagggaaaagatgggttaaagggagtaccaggaggaaggggacttcctggagaggatggagaaaaaggagagatgggcttaccaggaattataggacccttgggtagatcaggccaaacaggccttccgggacctgaaggaattgtgggaattccagggcaaagaggtcgtccaggaaaaaagggtgataaaggacaaataggacccacaggagaagttggaagcagaggtcctcctggaaaaattgggaaaagtggtcctaagggtgccagaggaactagaggtgctgtgggacatttaggattgatgggacctgatggagaaccaggaattccagggtacaggggccatcagggccaaccaggaccctctggattgccaggacctaaaggagaaaagggctacccaggagaagatagcacagtcctaggaccacctgggcctcgaggtgaaccaggtccagtgggggaccaaggagagagaggagagcctggagcagagggatataagggccatgtgggtgtaccaggactaagaggtgccactggacaacaaggacccccaggcgaaccaggtgaccagggtgaacaaggactaaaaggagagagaggatctgaaggtaataaggggaaaaaaggagctcctggtccttctgggaaacctgggattcctggacttcaaggcctacttgggccaaaaggcatacaaggataccatggagcagatggcatttcaggaaaccctggaaaaattgggccaccaggaaaacagggacttcctggcatcagaggcggcccaggaagaacaggtcttgctggggctccaggtcctccaggagtaaagggttcatcaggcttgccaggaagcccaggaattcaaggcccaaagggtgaacaagggctacctggtcaacctggaattcaaggtaaaagaggtcaccgaggagcacaaggtgatcaaggaccatgtggagaccctggcctgaaagggcagcctggagaatatggtgttcaaggtttgacaggtttccaaggattcccaggccctaaaggtcctgaaggggatgctggcattgttgggatatcaggtcctaaaggtcctattggacacagaggaaacactggtccccttggcagagaaggtataataggcccaacaggtagaactggacccagaggtgaaaagggctttagaggtgaaactggtcctcaaggaccaagaggtcaaccagggcctccaggtccacctggagcaccaggcccaagaaagcaaatggatatcaatgctgctattcaagccttgattgaatcaaatactgccctacagatggagagctaccagaatactgaagtgactttaattgaccacagtgaagagatattcaaaaccctgaactaccttagcaatttattgcacagcatcaagaatcctcttggcacacgagataacccagcacgaatctgcaaagatttacttaactgtgaacaaaaagtatcagatggaaaatactggattgacccaaatcttggctgtccttcagatgccattgaggttttctgcaatttcagtgctggtggccagacatgcttacctcctgtttctgtaacaaagttggagtttggagttgggaaagtccagatgaacttccttcatttactgagttcggaagccacccatatcatcaccattcactgtctaaacaccccaaggtggacaagcacacaaacaagtggcccaggattgcctattggtttcaagggatggaatggccagatttttaaagtaaacactctacttgaacctaaagtgctttcagatgactgcaagattcaagatggcagctggcataaggcaacatttctttttcacacccaggaacctaatcaacttccagtgattgaagtacaaaaacttcctcatctcaaaactgaacgaaagtattacattgacagcagttctgtatgctttctgtaaagtctctgaattagttccgaattcaggctgttggccaggtaattgctgcagagggagaaataagacagacagatacagtcattatgaaatgcatgtaataaagcattggctaaatcttaaagaatctcaggaagaacagacttcctcctaagaaggagaaaaggcatttttaaaggactatgattgataaagtatttaattcttttaaaaattatattcatctcagctttcttagagaattccctagaactaaaaatttataaatatggaattcttcagggtatcttatatttttgactgagtgcgtagtacccattagacagctggagatgcagagcactatggagcaatactggctaatgcttccagatgtgcactgcttctgtctaaaaattacaagccacagtctaatatgtcttattttccaaaacactaagctgtattcaggtccccgatgggcatatacatcttagccggtgatacactacctcttacgtgttgcctctttgtgttgcttggtgctctttcgaaaacaaggtgcttatggctttcatagactatttcctttttcatctttgtcattctttaaaagtgtatgtactggttacatcaagatatgttttggttgttagtacttattttaatttgtttggtcacacacttaataacacgtgaaactatttatgtgaagtccttgttttattttaaaattctctttgtgtatttggaatcaaagccagcacattgtaacctgtgcttgtacgcaaaagaattagatttctttgtttttgttttattttttaaattgttgtaaaaattattataggccagctacatctagtagtaggtttggggtacagattgggggttgtgccatactgtttttaaagttcatgatcatctggaatgatacttagtgtatatatattttgtaaagttttaattcagcaaattttttgaaattgctgctgttttaaattataaaacctttatatttctgctttgtagaaattatatgttttgtagtattcattgattttctttcactgtacttaaatttagtgttagtactttaaaatttttaatttaccagtctttaaagcaacatccagaaaaaaaaagtcttttcccatttaaaataggctcagccagttcaatgtctccttgttatcagagaaatgttagttcaatactgaaagaaaaatattatacctcttggtatctagaaaagcttgttcatccattataaatatatctttagccacagcaaaccacacttaacctatctataataaaaatgtgctttaaataaaaaaaaa

SEQ ID NO: 56920 - DNA, 6414 bp, Homo Sapiens; identical to SEQ ID NO: 31089

SEQ ID NO: 56921 - DNA, 1939 bp, Homo Sapiens
atggcccaaggcttccatcgttcctctgtccctgaatcaactctgtccagacccgagctttggatctaccaaggcctcaagccaccaaggaaaatgaagggcctctaccaggctgctggccggattcttgttactctggggatcctcagtgtatgctctggagttattgctttctttcctgtcttttcttacaagccttggttcacaggatggagtgttcgaattgcttgtcctatctggaatggagctttggccatcacaactggtgtgcttctactgttggcttacagagagtggacccagaggtacctgggggaagctactttcacctttgtgattctgagcattatgggatgtccacttcattttgcaatagccttggaatctgctctcctgggcccatattgcttctattcattttcagggattgcagggactaattaccttggctatgcagttacctttccttatccatatgcaaaattcccattagcctgtgtggacccaccacactacgaagagtaccacctgacacttcaagccctagacctgtgcctaagctttaccctactctgtacatccttgacagtgttcatcaaactttctgcaagacttatccagaatggacacataaacatgcaactccctgctgggaacccaaaccctttttcaccataaaagaattggaaaaaactaaagttcatatgggaccaaaaaagagcccgcatacccaagacaatcctaagcaaaaagaacaaagctggaggcatcacactacctgacttcaaactattctacaaggctacagttaccaaaacagcatggtactggtaccaaaacagatatatagaccaatggaacagaacagaggcctcagaaataacaccacacatatacaaccatctgatctttgacaaacctgacaaaaacaagaaatggggaaaggattccctttttaataaatggtgctgggaaaactggttagccatatgtagaaagctgaaactggatcccttccttacaccttatataaaaattaactcaagatggattaaagacttaaatgtaagacctaaaaccataaaaaccctagaagaaaacctaggcaataccattcaggacataggcatgggcaaagacttcatgactaaaacaccaaaagcaatggcaacaaaagccaaaatagacaaatcgtatctaattaaactaaagggcttctgcatggcaaaagaaactatcatcagagtgaacaggcaacctacagaacgggagaaaattttttcaatctacccatctgacaaacagctaatatccagaatctacaaagaacttaaacaaatttacaagaaaaaaacaaacaaccacatcaaaaagtaggcaaaggacatggacacttctcaaaagaagacatttatgaagccaacagacacacataatcccaaatcatgctactataaagacacatgcacacgtatgtttattgcggcactattcacaatagtaaagacttggaaccaacccaaatatccatcaatgatagattggattaagaaaatgtggcacatatacaccatggaatactacgcagccataaaaaaggatgagttcatgtcctttgcagggacatagatgaagctggaaaccatcattctccgcaaactgtcacaaggacagaaaaccaaacaccacatgttctcactcataggtgggaattgaacaatgggaacacttggacacagggtggggaacatcacacactggggcctttcagtgggtgggaggctgggggagggatagcattaggagaaattcctaatgtagatgatgagttgatgggtgtggcaaaccaacatggcacatatatacctatgcaacaaacctgcatgttgtgcacatgtaccctagaacttagagtataataaaaaaaaagaaaacagtg

SEQ ID NO: 56922 - DNA, 1501 bp, Homo Sapiens
cggccttttacacagcacagcacccagccctcggcagcccagagcaggaaccaacagggtaggtgcccaggggccccaaaggtcagagttcctcgcacagctgccagggagcacagggaccgcagcacagggtcttctgctcagcaccgggaccccgctcgctgcagctaaagaaacagatacgtccaagggctccacggccggggccgggcacctggaacagggtggtcctggggcggccacatccactccttccagctaacacttcacagagatgtctgactgatgtccactgctcagctgcacccctgagctggtgagcattcaggtagagcacccacctctacttttctcaccccgaaaatcagagactggttctcagctggtgcagccaccgccccagcgtaccggatgcaggactttccctgcgaacactggacagtcccagcaaagcagacggtgggtcgctctgtatctctgaagaacagctgggcctgcgtgtgtcattctcaggcatctggcccagggcttctcctccaggaaggtggctgctcagctccgggcactgccaggggccacggaccccgcctcctttccaggctgttccacagcatctgccttcatactcacagccaccgcggcgtgcgtcccagggattctcagaatagaattctgtgcctctctcgcctctggaagtgaccgcgctctgtaggaaaatatcacagcacgccggcctcgaaaggccacgacgtggctctaaactgctctaagtatgtcagttacttagaacaatcagaaaggggcagaacaagctggggtgtggagtcaggggtcagggcacagacagcacctcttgtcttgcagagagaatgctagcaatttgcaagttacttgaaaaggtttgtgattttccaacgccctgagtaattctagccaaaatgcgtgactcgcctcacactagatgcttgctgtaattgtgtctctgtattaaactgaccgttctttggagcttcagaatggaccaggaggaaaaggtaaataccaacctcgctacaacctcagaggcatcaacgccctcctgctacagacgcatctgttctcgcctggctcctgccggctgccctgggagaggccacaaaatgccctccacggagacaaggcctgagaaccttcgggacgcccgctgccgctcactgtgttgaagaactgcccgttccgcaccccgggccctagacacacggctctgtggaggacgaggaagtgccgtcaggtgagacttcaccgtgaaatatcttctgagacacaacaatctccctgaattaaaactacagactctaatttataaaaactgtgtgtttcaaaagctccaagtgtttacattctccgattcatcattccttcttctaatttattttaggaaataatgcaaagtactcacaaaaatttatatagaaagatgttcattgcagaattcattataataaaaacctttaaatgctct

SEQ ID NO: 56923 - DNA, 1132 bp, Homo Sapiens
ggaaatgcacaagcctcttgatgcataaaaacagctgggctcccttggagacagagcgccatgggaaaccgggtctgctgcggaggaagctggagctgcccatcaactttccagaagaaaaagaaaagaggaagccaaacaagacggacactgaagccgcagccacaacagctgcagcagaatctcccaaagggccatgaaacaacaggacatacgtatgaacgggtgttacagcagcaagggtctcaagagaggagtccaggcctcatgtcggaagacagcaacttacattatgctgacattcaagtgtgcagccgtccccatgcccgggaagtgaaacacgtgcatttagaaaacgctacagagtatgcgacccttcgcttcccccaggccacacctcgctatgacagcaagaacgggaccctggtgtgagcgcttgggaggaaggcccagtccatcgttaaccactacacctgtgggggagaacctactgctttggggaattgggtggcaacccagggatgttgtccacgttttaagcttaaagaactccaaagcccctggaattgtgggcgtcccattttctcccctggcctcttacttgccactgttaggttggagttaatagttggtttagctatgggtggatagctaaacttagctatccacatgaggttaggtggagtgtgcagggaggtaggtcttcgaccccaccattgttgctcctgctcttgcaaagtgcagaaagagcaggtaaaaagttagcccataagcacgtgggctgatcttgttggactttaattaatggtatcctttttcacacaccttaaactccaaagctgaaggggaggtgctccggaaaagcattctgagcttttacattcagacactagggctggcttgggccatttcctcagtggctgagtcaggttccagaccttaacagacaaatgggggaagggggctgaggcgtggaggaaacgctttcaggacctcaagtcagtgataaccgacagcacagtgaggcctggaaacttccctcggagggactgttggctctcgcaggtgcggggccgctaggatcaataaacggcctgagaaacaaaaaaaaaaaaaaaaaaaaaaaaaaaaa

SEQ ID NO: 56924 - DNA, 2792 bp, Homo Sapiens; identical to SEQ ID NO: 31059

SEQ ID NO: 56925 - DNA, 4684 bp, Homo Sapiens
atgaatgtagcagccaagtaccgcatggcctccctgtatgtgggtgacttacatgcagatgtcaccgaggacctgctgttcaggaagttcagcactgtggggcctgtgctgtccatccgcatttgcagggaccaggtcacccgccgctctctgggctatgcctacgtgaacttcttgcagctggctgatgcccagaaggcgctggacacaatgaactttgacatcataaaaggcaaatccatccgtctcatgtggtctcagcgcgatgcctacttgaggagatctggaattgggaacgtattcatcaagaatctggacaaatctatcgataacaaaaccctttatgaacatttttcagcttttggaaagatcctttcctccaaggtgatgagtgatgatcaaggctccaagggctatgcatttgtgcactttcagaaccagagtgctgcagacagggccattgaggagatgaatggaaaactactcaagggctgcaaggtgtttgttggcagattcaaaaaccgaaaagatcgtgaagctgaactcagaagcaaagccagtgaattcaccaatgtttacataaaaaactttggaggtgacatggatgatgagagattgaaggacgttttcagcaaatatggcaaaactctgagtgttaaggtgatgacagattccagtgggaaatccaaaggctttggctttgtgagttttgatagccatgaggctgccaagaaagctgttgaagaaatgaatggaagggacataaatgggcagctgatttttgtaggccgggctcaaaagaaagtcgagcgacaggctgagttaaagcaaatgtttgagcagctgaaaagggaacgaattcgtgggtgccagggggtaaaactctatattaagaaccttgatgacaccatcgatgatgaaaaactacgaaacgaattttcttcatttggatcaattagcagagttaaggtaatgcaggaagaggggcagagcaaagggtttggcttgatctgcttctcctctcctgaggatgctactaaagcaatgactgagatgaatggccgcatcttgggctccaaacctcttagcattgccttggcccagagacactaggaaagaaaaacgtacctttccagctagtatctgcagcaggtgggagaatgatagtgatctctgcctgaattgacctcagtaaatttcatattccacatgatgggtgcttagtttagtaaactttatgataaaacgttttttatacaaagccattttttttcttttgtggaaaaatagatggagcttagttcattttacagaggcacattttctaattttaatattgcacatttttcttattttgatatgttcatagcaataagtataaatagatatatttttacatttgaaccaaatgaaatgaggtaattatttgaatttattgcatatttattattttagtaatattgctagctttaatttcttctatgaaaatatgctcaaaatagttcttacaactaaagattccaaagtatttttaccaacagaaattttctaatttttcatccaagttttgagaaatcaaacttttagaaatttatagtacgaatttaaagacctaatttcattttgaattaatgcttaaaatagtcagatatagttgaatttcttttaaatttatatcctgacatgcttgtttttcggatggtttaaattaagatgatggaagtttttaatgttgcctaaaaactggctttatgtgttttgttctttccattagttgactataattcaggtacttactagttaatctaaattgtaacttgcactgtaaaaccttaacttctacattccttaagttataaatctgttatcaactcaggtgatccaaagttggcctggtcttaaatctcttcatacctatatggcttaatatattatcttaaatttttaccagatgctaatattatgaaaatcatacatacagattatagaaattctgtttaaaaacttttaaaatctcttttatattgttttgtgtagtgattttctcttagggttcagaaaagtaagttcctctatttttatgtactcacatctccttttattagaatgtggcagctatggaacccattaaggttcacttttagccttcattgatcagaaacactgattgattttctgatgaattgaagttacatcacttattctgttttctagcataatttttagtttagaaccattcccctattttccttgctctcctgcctttcatctatattcctcagctttttaaaatactttctaaaggatttttttatgttggcttttaatatgtgctgcttcaaatccatttggaaatcgaggcaagagttatttaattacatttaaataattgctttacaaattctgattcataccaaaggtatctagcaagcaagtgcttttgtttttactgttttcatatttttacttggcttagttttttctcataactattattcacattctctatttcatatattactaatataaaagaaatagtaaaatattttttggcaatacctcagcttatgaatgagaaaaatttgttgccttttatttttatagaaattatatgtatattctttgcacattttctaaaatgaaaatcttttagtccataaaaaattatggacaatgaaaaaattaaaagaatttgcatataattgtattatgcaaaccaattccctattataatttgttacatatttttctatttttttctctctctacatatatacacctaggtaatttaagaaaaataggataatattacaaatgttgtttgaaattgctttcttaaacaatatgctatggtcaacttttatgctcacaataattatttgtcttataatctgagtgacttttatgttttgttcaatgactgtaccaaaatataactaatttcttattgataaacttcttgttgctagataatttcttccttttttcttcttcctctgtcataaataacttggagattaacatccttgcgaacttatatatgcaaatatatctattttcttaagaaaatgtttagaagtagaattaatggttaaaaaagaatcaattttaaaaagtaattttgataaatattgcttaaatgctgtccagaatacttgtggcacttacatttccattgtcattgtaggagaatgcctatttccatatgctccaagaaacaagggttttttttaagctgttggtcaattcaacatgatatgtaaaacaaaccatttcatcattgctttatttcacttttgtaaattacaaaagttaaacagtatttgtgtactcactgaccatttgtattttcatacttataagttaatgtctcatgatcataatttattttcctgttggggtgttttttatttacatggatttttagatttctttgcatattatgactacattttagacttttccccctgatatttcactgtctttatagttttgaaggttattccaaaattgaatgttaagctggaaagttttagtattctactgaaatggctttgatgtcatgcttcaaaatattttgaacactttaaatacatatattcacacaaatatatatacacccacacaatttatctgtattgtgtttatgactttcagattttcatattctcaatgcttctaactaaaattttggttcataaaaagtatcttatataaaacctatagtaaatattttaaaaatgtgcttttccatttttaataacatgtattttggtaaatacttgattcagagagccaatgaattagagttggcatatgagtttcacatagattcttatactaggtaagtatttaccaaaacatgtatcagaagcagaaagttgttaaaaaggtttaccagacaacaagactggaaagtgtattaagtgtgcctggccttgacatcttgttctggataatctagtctacatcttaatttaggaaagctaatctgtaaaactgttcaaatatttgaacaatatttgataatgcttacataatctttcaagataatatcaggaaacagagttctttcatgtatgtaagtagttaataggacataacatcagatgtctagatgaattatagctatggcttaattacacaataatctgccttcttagtagaaattgcttatttccagcatttgctgtaaaaaaaaaaaagacagtcagtttacaaaaatatacaatcctatggatttaatttatttaaattttgttcattctaattttttttggtgcgtgataatagcaagttatcttagttgaaaatagagattcattcattaaagaatattaaatcttttgtgcccaagtgccttaataaataagtagaatcttaacttttctgataagcattccagtaaaagctaatgtacatagatatgccttgagccactgtttctactttcacccttctctccacacatattgccacgtctgctgtgtagttacctgcttacatgtacagccatttcaataaatgtattcttttaacattttatcttttaaatttcaaataggaatttatagttggtaaaaataaaaattttaaagtgatttaatattgtcattttcatgttctcaatattgttatagatccactgagaaaatgtcaaataaaatctaatatttcaaaggtg

SEQ ID NO: 56926 - DNA, 2694 bp, Homo Sapiens
ctcgggccgctgcgctcctggccagctccccccagcgcctgggaggcgacccccagtgcgcccgggttcaaaggcccggcgaggcagttccagcccctctggggggcggggaggcgacgggggtggtgcagaagccagaaaagcccgagccacagccggccagctccgcgcagggatgggcagcgcgctctgaaagtttatgaccgccgcagccaactcctggccggagctggagacgcagcgagcgatcggccggcctcgaacccccacagctggagggcgaggccagctgtacccggccccagtgccctttcgcggccacaagcggccgtcctcctggtccggtgctccggcgcctgatctaggttcatggagccggggctgtggctccttttcgggctcacagtgacctccgccgcaggattcgtgccttgctcccagtctggggatgctggcaggcgcggcgtgtcccaggcccccactgcagccagatctgagggggactgtgaagagactgtggctggccctggcgaggagactgtggctggccctggcgaggggactgtggccccgacagcactgcagggtccaagccctggaagccctgggcaggagcaggcggccgagggggcccctgagcaccaccgatccaggcgctgcacgtgcttcacctacaaggacaaggagtgtgtctactattgccacctggacatcatttggatcaacactcccgaacagacggtgccctatggactgtccaactacagaggaagcttccggggcaagaggtctgcggggccacttccagggaatctgcagctctcacatcggccacacttgcgctgcgcttgtgtggggagatatgacaaggcctgcctgcacttttgcacccaaactctggacgtcagcagtaattcaaggacggcagaaaaaacagacaaagaagaggaagggaaggtgagaggtgccaacagaggcctgtgtcaaaggaggttgaagtcaaggaccaacaaagcaagcaggctttagacctccaccatccaaagctcatgcccggcagtggactcgccctcgctccatctacctgcccccgctgcctctttcaggaaggagccccttaggaggacaggcctgcagcatcctggtctcgggaggcttctgtcattgctcacacacagttcagatttccacctctttatagacaagaagtgaatttgcctggggcagaacacccacccaaagagtccccacttaacaataccccccccccacggcaagaatgcccaaatccgaatgaccccagttttcctaatgagtaaaatgatcccagatgtgccccagagcatgacgcctgcagctccggtttcatgcaggaaattggttttggagagttttggcaagttggaaagccacttactggcttttgacatgacttctcttggagaataagtggactccaagctaactctttgcaaatgtaaacacatgtccatcttgtaataaatgcaaaatgcccgtgcagcagaagcatgcgactttcatatccttgcctagaataggctgcatggtgtatgtcagtgagggccacgaggcgtcggctttagacacagatcatagctctacaggagtttatgaatttgaagcttatgggattttggcagagaaattttcagctgtgcttgatacccaccaaaagaatgtatctcgaaagaatgaaggaagaagaaaaaaggatccttgatgtttgtgacaagaaaatgagaaagttagtatctgcaatacagagcttgttcctgttcagtgactgaccctctgtattctgtatagacaccaggccgatacacagtggagttcccaggccttgtttgcaggaagccgactgtaaagacagccccagctcaaggctattaggttgaatatttgctttcatgagtaaatgtggatctttggggaatggcttcaaaataagtcacgaacacaaattctttgtaaattatgtaaattcctgtttatataaattggcaacaacttataccgtctgacagttcaaaatctctttcagctgcgctcttcccaccgagccgagcttactgtgagtgtggagatgttatcccaccatgtaaagtcgcctgcgcaggggagggctgcccatctccccaacccagtcacagagagataggaaacggcatttgagtgggtgtccagggccccgtagagagacatttaagatggtgtatgacagagcattggccttgaccaaatgttaaatcctctgtgtgtatttcataagttattacaggtataaaagtgatgacctatcatgaggaaatgaaagtggctgatttgctggtaggattttgtacagtttagagaagcgattatttattgtgaaactgttctccactccaactcctttatgtggatctgttcaaagtagtcactgtatatacgtatagagaggtagataggtaggtagattttaaattgcattctgaatacaaactcatactccttagagcttgaattacatttttaaaatgcatatgtgctgtttggcaccgtggcaagatggtatcagagagaaacccatcaattgctcaaatactcagaaagtactgtcaaaagcctaataaaaaacctaaagtttgctctgaaaaaaaaaaaaaaaaaaaaaaaaaaaaaaaaaaaaaaaaa

SEQ ID NO: 56927 - DNA, 3562 bp, Homo Sapiens; identical to SEQ ID NO: 30714

SEQ ID NO: 56928 - DNA, 6357 bp, Homo Sapiens; identical to SEQ ID NO: 30867

SEQ ID NO: 56929 - DNA, 1235 bp, Homo Sapiens
gaatacagaatgtgggcaaactcgcttctgtgccggccgccagaaggtttgctgagggcaatcactccctggtgccgggctccttgaggttatgcactgggacatctagagcctattgtttgaggaatgcagtcttgcaagcctgctctggatcaagccacagactgaaacacccccgaagagcaagcacgtttcttggagcaggctaagtgtgagtgtcatatcttcaatgggatgaagcgggtgcagtacctgaacagatacatccataaacgggaggagaacctgcgcttcgacagcaacgtggaggagttccaggcagttacggaactggggcggcctgtcgcagagaactggaacagccagaagggcatcccggaggagaagcgggacaagatggacgactactgcagatacaattacggggttttttgagagcttcacagtgcagccgcgagtccatcctaaggtgactgtgtatcctgcaaagacccagcccctgcatcaccgcaaccccctggtcggctctgtgagtggtttctatccaggcagcattaaagtcaggtggttccagaatggtcaggaagagaaggctgcggtggtctccataggcctgatccagaatggagattggaccttccagaccctggtgatgctggaaacagttcctcggagtggagaggtttacacctgccaagtggagcatccaagcgtgacgagccctctcacagtggaatggagtacacggactgaatctgcacagagcaagatgctgagtggagtcgggggctttgtgctgggcctgctcttccttgggacagggctgttcatctacttcaggaatcagaaaggacactctggacttcagccaacaggactcctgcgctggactcctgagctgaagtgcacatgaccacattcaaggaagaaccttctgccacagctttgcaggatgaaaagctttcccacttggctcttattcttccacaagagctctctcaggaccaggttgttactcgttcagcaactctgcagaaaatgccctcccttgtggcttcctcagctcctgttcttggcctgaaaccccacagccttgatggcagcgcctcgtcttcaacttttgtgcttccttttacctaaattttcctgcctcccctgggtctgtattccccttgtgccacaaacacattgcattattcaatgtttctcaaacatggagttaaaaattatctggt

SEQ ID NO: 56930 - DNA, 2938 bp, Homo Sapiens; identical to SEQ ID NO: 31644

SEQ ID NO: 56931 - DNA, 2169 bp, Homo Sapiens
acccctgctcctggcggctcccacccgggacttagaccctcaggtccctaatatcccggaggtgctctcaatcagaaaggtcctgctccgcttcgcagtggaatggaacggatttagaagcctgcagtaggggagtggggagtggagagagggagcccagagttacagacggcggcgagaggaaggaggggcgtctttatttttttaaggccccaaagagtctgatgtttacaagaccagaaatgccacggccgcgtcctggcagagaaaaggctgaaatggaggaccggcgccttccttataagtatgcacattggcgagagaagtgctgcaacctaaaccagcaattacacccaagctcgttggggcctaagccagtaccgacctggtagaaaaagcaaccacgaagctagagagagagccagaggagggaagagagcgccagacgaaggtgaaagcgaaccacgcagagaaatgcaggcaagggagcaaggcggcagttcccggaacaaacgtggcagagggcaagacgggcactcacagacagaggtttatgtatttttattttttaaaatctgatttggtgttccatgaggaaaagggaaaatctagggaacgggagtacagagagaataatccgggtcctagctcgccacatgaacgcccagagaacgctggaaaaacctgagcgggtgccggggcagcacccggctcgggtcagccactgccccacaccgggcccaccaagccccgcccctcgcggccaccggggcttccttgctcttcttatcatctccatctttatgatgaggcttgttaacaagaccagagagctggccaagcacctctatctcagccgcgcccgctcagccgagcagcggtcggtggggggactgggaggcgctaattaattgattcctttggactgtaaaatatggcggcgtctacacggaacccatggactcataaacaatatatctgttgggcgtgagtgcactgtctctcaaataatttttccataggcaaatgtcagagggttctggatttttagttgctaaggaaagatccaaatgggaccaattttaggaggcccaaacagagtccgttcagtgtcagaaaatgcttccccaaaggggttgggagtgtgttttgttggaaaaaagcttgggttataggaaagcctttccctgctacttgtgtagacccagcccaatttaagaattacaaggaagcgaaggggttgtgtaggccggaagcctctctgtcccggctggatgcaggggacttgagctgctccggaatttgagaggaacatagaagcaaaggtccagcctttgcttcgtgctgattcctagacttaagattcaaaaacaaatttttaaaagtgaaaccagccctagcctttggaagctcttgaaggttcagcacccacccaggaatccacctgcctgttacacgcctctccaagacacagtggcaccgcttttctaactggcagcacagagcaactctataatatgcttatattaggtctagaagaatgcatcttgagacacatgggtaacctaattatataatgcttgttccatacaggagtgattatgcagtgggaccctgctgcaaacgggactttgcactctaaatatagaccccagcttgggacaaaagttgcagtagaaaaatagacataggagaacacttaaataagtgatgcatgtagacacagaaggggtatttaaaagacagaaataatagaagtacagaagaacagaaaaaaaatcagcagatggagattaccattcccaatgcctgaacttcctcctgctattaagattgctagagaattgtgtcttaaacagttcatgaacccagaagaatgcaatttcaatgtatttagtacacacacagtatgtatataaacacaactcacagaatatattttccatacattgggtaggtatgcactttgtgtatatataataatgtattttccatgcagttttaaaatgtagatatattaatatctggatgcattttctgtgcactggttttatatgccttatggagtatatactcacatgtagctaaatagactcaggactgcacattccttgtgtaggttgtgtgtgtgtggtggttttatgcataaataaagttttacatgtggtg

SEQ ID NO: 56932 - DNA, 1827 bp, Homo Sapiens
agcgatttcatcttcaggcctggactacaccactcaccctcccagtgtgcttgagaaacaaactgcacccactgaactccgcagctagcatccaaatcagcccttgagatttgaggccttggagactcagaactcagcagtaggccttgcctcagatccaaggtcactcggaagaggccatgtctaccctcaatgacactcatggaggaaatgctgagagaagcattcagatgcatgacacaaggtaagactgccaaaaatcttgttcttgctctcctcattttgttatttgttttatttttaggagttttgagagcaaaatgacaacacccagaaattcagtaaatgggactttcccggcagagccaatgaaaggccctattgctatgcaatctggtccaaaaccactcttcaggaggatgtcttcactggtgggccccacgcaaagcttcttcatgagggaatctaagactttgggggctgtccagattatgaatgggctcttccacattgccctggggggtcttctgatgatcccagcagggatctatgcacccatctgtgtgactgtgtggtaccctctctggggaggcattatgtatattatttccggatcactcctggcagcaacggagaaaaactccaggaagtgtttggtcaaaggaaaaatgataatgaattcattgagcctctttgctgccatttctggaatgattctttcaatcatggacatacttaatattaaaatttcccattttttaaaaatggagagtctgaattttattagagctcacacaccatatattaacatatacaactgtgaaccagctaatccctctgagaaaaactccccatctacccaatactgttacagcatacaatctctgttcttgggcattttgtcagtgatgctgatctttgccttcttccaggaacttgtaatagctggcatcgttgagaatgaatggaaaagaacgtgctccagacccaaatctaacatagttctcctgtcagcagaagaaaaaaaagaacagactattgaaataaaagaagaagtggttgggctaactgaaacatcttcccaaccaaagaatgaagaagacattgaaattattccaatccaagaagaggaagaagaagaaacagagacgaactttccagaacctccccaagatcaggaatcctcaccaatagaaaatgacagctctccttaagtgatttcttctgttttctgtttccttttttaaacattagtgttcatagcttccaagagacatgctgactttcatttcttgaggtactctgcacatacgcaccacatctctatctggcctttgcatggagtgaccatagctccttctctcttacattgaatgtagagaatgtagccattgtagcagcttgtgttgtcacgcttcttcttttgagcaactttcttacactgaagaaaggcagaatgagtgcttcagaatgtgatttcctactaacctgttccttggataggctttttagtatagtatttttttttgtcattttctccatcaacaaccagggagactgcacctgatggaaaagatatatgactgcttcatgacattcctaaactatcttttttttattccacatctacgtttttggtggagtcccttttgcatcattgttttaaggatgataaaaaaaaaataacaactagggacaatacagaacccattccatttatctttctacagggctgacattgtggcacattcttagagttaccacaccccatgagggaagctctaaatagccaacacccatctgttttttgtaaaaacagcatagctt

SEQ ID NO: 56933 - DNA, 3285 bp, Homo Sapiens; identical to SEQ ID NO: 29083

SEQ ID NO: 56934 - DNA, 372 bp, Homo Sapiens
atgagggcccccactcagctcctggggctcctggtgctctggctgccaggtgccagatgtgacatccagatgacccagtctccatcctccctgtctgcatctgtaggagacagagtcaccatcacttgccgggcgagtcagggcattagcaataatttaaattggtatcagcagaaaccagggaaaactcctaagctcctgatctatgctgcatccagtctgcaaagtgggattccctctcggttcagtgacagtggatctggggcagattacactctcaccatccgcagcctgcagcctgaagattttgcaaattattactgtcaacagagtgacagtacccctcccacagcgttacaagtcataacataa

SEQ ID NO: 56935 - DNA, 7549 bp, Homo Sapiens
gtaaactctagcggggctagagcaaacattggattagcggcagcagcctgccagcctgcccgaggagtgctgggaccagcgcgctgcacgccgactggcacgatggcctcgtctcaggggaaaaacgagctgaaattagccgactggatggcaactctgccggagagcatgcacagcatccccctcaccaatttagccattccagggtctcatgattccttcagcttctacattgatgaagcctctccagtaggtcctgagcagccagaaactgtccagaattttgtctctgtgtttggaactgtggccaaaaagctcatgcggaaatggttagccactcagacaatgaattttactggccagctaggagctggaattcgttattttgatcttcgaatttccaccaagcccagagaccccgacaatgaactctattttgctcatggtttgttcagtgccaaagtcaatgaaggccttgaggagatcaatgcattcctcacagatcaccataaggaggtagtgttcttggacttcaaccacttttatgggatgcagaaatatcaccatgaaaaactggtccaaatgctgaaagacatctatggaaataaaatgtgcccagcgatttttgcccaggaagttagtttaaagtacctgtgggagaaggactatcaagtgctggtcttctaccatagtccagtggctctggaagtgccctttctctggcctgggcagatgatgccagcaccctgggccaacaccacagaccccgagaaactgatccagtttcttcaagcatccatcactgagagaagaaagaagggatcgttttttatatctcaggtggtgctgacccccaaagctagcactgtggtcaaaggggtggcaagtggcctcagagaaacaatcacagaaagagctcttcctgccatgatgcagtgggtccgcacgcagaagccaggagagagtggcatcaatattgtcactgccgattttgtagaacttggtgactttatcagcactgtcataaagctcaactatgtctttgatgaaggagaagccaacacttgatagcactacttggagtttccatgaataagatggagaaagctcattgtattagggcatactatctgtaaacactctgatcttcctattccactgagtctctgaagggaatagggctggtagtgggtgggaaaaggggaaaaactgtttcttcagtgattacaatcatactcttcattactataaatatttcatttcccatttgatgagcaaaatctacttctagtgttaggaataaaaaaaaaagaccagtaactttgtttttcaaaattagtctttgtaacatagaattcatgagtgtttacttgattaggttctctatttccagcctatgactcctacgctgtctataccctgcaacctttctgctccctctcttgctcgctctttttaatcagatgctgtatgggaatcaaaacaattgaatgcccaacattttgtgtattacattgttgtcttaaaacttactagttttgtgggacttgttataatgctctatagtcatccacagttgggcaatcatagctaatttttggtcatagaaaatctgcatcaaatcagtttccatgcatcagtaatattgaaggtcataatcagtgatttttgttatatgaaaataatagtgtttcacagtatttctatttaaggcagctataaatataggagaaaaatgtttttggagagctgtgaatgccaatttcagagggaaaaatggttgaggggtgaaagagatgtatggcattttaatttggcaatctcttaaataatattgccctgcaagtacccagtaaatggtaaggtacaagtgtgttaaaattgaaaactctgaaaataactctttaaaaagccctcttaatgatgctcttgatgaaagaaaaagacagaaggaaggaagaagaaaaagactgcaagctttcctgccaatttgggattttcaaatatttaattctaaattccagattttaaggaagatttttcaagaaactgcaagtttttgacttgaaggaaagaaagaggaaggctggtagaagcagttagagcaatgtgtttgaaattatgtccatgaaatcacagggatctctgaaatatctttaggaaacttgaaatttatgaggtctgaatggacttgtttaaaattggctctgactcctcacttctgagtttcatcctatccgagggatgagattaaggcagaggcaaaagtttcacacaaagtttctgcaacctaacgtttaatagtccgggtctacagggaagaacaatgacacagcttgagcgttacttcctccttcgtgtcattgtgatatttgacaactctaaaaaataaaaaaaaaaaacttagagcacaataatccttgcctatgtacttcacaggaatattgtgaggtgtttataaaattataaaatttgatgaaattcttacaattattaattattttattttcatgtttagaaataatcacaccccaatagtttcctaggataatacagtccatgcaaagtagggtcatagagaaataaaagcatgccctcagcttttaatgaacttaaatgtagcacatatggcttaatctcttagacttagataagggagttcaattcaaaaccatatatgtcaagaccacaaataatcaagagttgatttcaagattataaatactcatgatcagaaaatagtacttattagcaattaaagggaggaaaagaaattgtttatactgaagagaatgtttatgaggagtgtgtatgtacctgtggtataccaaatagcatacatgtacacacaaaaatgtgtgtatacatttgggttgtgtgtatacatcttgccatatacaatatacaaacatatgcccattcctgtgatagcatacaaattcaaacatacagaaacacacacagatatggacacagtacaattcttcttttcaaatgaagacattgataatattaaataatttaattttaagactgaaacccttaatattgtgtgaaaaagagtaataaaacctttgaaagtagagtagatgatcacatcaaagtatttttgtaaaagaattctagtgtaggacttaattatttttaaaatatatttcttctcttctttccattttcccttcccttgtagttttattatctttctgtcttttacacctgctctttatgtgaaaatgtatatgaatccttttaaaatgattaggattattgaaatgtatgtcccgtaaatttggtttttgggcagactttctctctaactggctattcattcatccttcaggaggatcttagccaagaatatttgcaatgacacatgaatttaattttataaatataatggaaaacagatttttcatcatatcatgaataaaatatagaggtaactatgttgtattttcttgaacctagatactttctcatagtgtttgcttagaattaactttgtcctatttgtcaactgggttctggaaaaaaacaaacatgatgaagcttttgaataattgtgcagttttttaactagggaaagctttgtactgctgctaatgatatgcacccagaaaccttgttagacaaaaggcagtttcaagccaatgctatggtttccatgtggacatacagtgcctatgtagcaggcacttagagtaaatggacttgccttaatttataaaggagggaagaggtagaagggaaccatgggtcctccagctagagggggagtttactaaaagggagtccttggaaaggggaatggagagaaggtgcctttgactgtcttctatccattagttctgccctggagcacactggggaagcaggctgcgggccttccaaaagtaaaaaatggtgatatgcaatcgaagcttatccttagcctatgcacatttgtctcagctgggcattgtcttttcagagagcttgtagcacaagggctacacatgggcgccaagatggtggtagatacaccttggtgcactttttgttttacttgtttcttaagactatttcacaagtcctgtgaggcaaaaaaacaaaacaaaacaaaacaaccaaacaaatacaatctaacttttacccaatctacagcaggaaatcaaaggagtgggtggaatgagagaaaatatgcaaagagatcatttttaagtttgatttcctgtctgtaattttcaaggactaatatagcaaatttttcttctgccattatcatttatgtctccctatttaccacacaataatgtaaatgcagagaatgaggaggcatcttttaaaagccttaggatattctatatgatgacctcaatattgactttcagccatactgggaaaacttacttttcatggagtgccacctaacagtgaatgtattagagtataaaatgtttgccatgtatacacctgtatgtgcacatacacacattacacacacacacagaatgcacatttcacacacatatacttattattcaagttgaaactgcactctaatcaatctgagtctattgctgtttcaactcttaaaatcaatatctcctacattagtagatataaacataattcaaatatttaaatatttaagaggagaaaagtaactagaaaaccaatgaaaagtgaggccatcagaaatagaaaatgcctggcacgaacagtctatctaaattctcaatttcacttcaaattagagaatccataatggactagaatataaattacaaacacatacacacatcttcacttaaagttgttttaagttctttgaagttctgacatgtttttagccagggttatttgttcaggttcttccttgttaggattccagactggaaagttggaagtctcaggaaatgcatgtttccatgagttttttagtttcacagttttacagatccaacgacacaatcttttaatctttggtcactcaaccaaacaggagttccgtaggcagagtgctcactttgaattgctaatagaaaataatgcacagtgtcctcaggatatgctaaacaaggtttttaagagcattttattttacagcactttagtcttttcagctagatttcagtgacactatggtgtaaatgctatatctgccataacttattggtggctcctgtgttacatacagttttaaataatgctctaaattgtttgttttcccaatgataatgataaagtgttctgtagaatttgtaaaacatgtcaattgaatctgttgaaaattgtgtaattgttatttcaattgtgatactattttgtaggtaatagttttaaacgtatatttgtatgagtcaaaagtatgtgcttgtatgtggtatgtgtgtgtaagtatataatatcttatcaaaaatcaaacttatcctaaagaaaaagggcacattgtgaccagccttaatttattaacacttttttgttgtttttgcaatttggatttaaaattgaaacagaaattaagtttttgttaaaaatggtgtcttttaattttgtgaggaatgggctttagaacctatctgagttcccacaagcaaactgtccaccttgtgaggtaccccattgcttttcgtaataatcaaacatcaattcatatattaacttcattttcatacagactaatttgttttcatcaacaatagaaccagtacacctttaaagttgaccttcccaacatggcacccatttttctttaatgataaattttccatgaaaaattgtttctccaaaccattactttttaaaattcaatcttcccaagtaagatgaactgccttggtgttaggagagcttttaaaggcccatccatactaggtggttccaacatggttctcttctcgagaaaacaagcatgcaacccacacacttttctggtctgccccacgtgtagaattagtctagcaatagaaaactcatgactgacaaggatctacacatgtggtcatgcttgaagcaaaaattctgtgaccttctttgggcttggatctgattacagaatattaattaactttcttatttcctttctttctccatccttagttattccttttcaatatttagagttgccaggtaaaatacaggatatccagtgaaatttaaatttcagataaacagtatttctttagcatatttctcatatatttaatcagacatactttcactttaaaaaaagtttatctgaaattcaaatgtaactgggtatgtcctatatattttttcctaaatctcacaattctatccacactgcctttctatctttttcagctgggctatctataaggggcgagatctacctccctccatacccttgtgttcagacaccttatgaatatctgcagtcataatgtccttcaagaaagaaaacattggtcagctctaggtcctgcaaatgctttttgaaggacgaactcaaatacagatgggataatcaagtaaatatcttcataggatcaatgccaccatgttcaacacttccctttgccagcctgttgtgaggtccaagtttccccattaatcccttatatagcatttcccagtaactgggacaaccaaaaacacaccgacatattagaaatgctcctgaaaagtggcaacaccgcctaactcagtaccaggacctcttttaaattcaatttcttttttctttcagagagataacaaacgaattcattatttcccccattcacatcttaccacaaattatttttatcaggttaaaactggtcatctacggaattgtagaaaggtgacataggaactgtcttcactgctggaagaataaaagagtctgaggtatagacactgccctggtgacaccttctcagaacattgttgggggacaggggaggcaggcgcaagtaggggatagaatctgaccctgacatgcagctatcacctggcagagagactcgtcaaagcaaattataacgaccagtactatttttttttggaattgaaaacccaagaagccctaaaataagaacagtgagatcaaaggctggtttctaaaacaatgcagaaaatagaaccatgttggaattcctaaattctagctttcaaatactactgtttccaacagtgaatccttgacagagactgaatgcagatggaattttgaaacattttcagtagctacctcctctcctgaaattcctataagtggcagaggaaaatccaaatcctttaatataacatgtccatctcatgactcctgcttacacacatttgtgttgatttgcttcatttctggaggatgggaatttgcagagctggtgacatttccttcattagacaccagaaattcaccagagagagacagatctgtgccttctctttttaggatctggttattgatactttaataaatgtggtgtaaagaaaatccatggctacagtctgtatagaaaatgtgaattttttaaataagattgtgttcttaatgtaaaaaataaaagtttatttgtattcagtgaaatgcctaataaagtcctggtaccaataaaaaaaa

SEQ ID NO: 56936 - DNA, 1791 bp, Homo Sapiens; identical to SEQ ID NO: 31044

SEQ ID NO: 56937 - DNA, 2501 bp, Homo Sapiens
cgtggttcttttgcaagctctggattctctggagtttgaatgtttccagtattggaaccccaccaagtaggactgatcaggtcttacaattctaaaaccatgacctgtaactggggaagacctttgaagttctgtccaacaaagtatatgaagtttcaggaattagtgacattcagggatgtggccatagacttctctcggcaggagtgggaatacctggaccctaatcagagggacttatacagggatgtgatgttggagaactatagaaacctggtatcactgggaggacattccatttctaaaccagttgtggttgatttactggagcgaggaaaagagccctggatgattttgagggaagaaacacagttcacagagatgggggtctcactgggttgctcagctggtctctaactcctgggctcaagcagtcctcctgcattggcttcccaaagtgctgaaaatacagatggagtcttgctctgtcgcacaggctggagtgcagtggcccgatctcagctcactgcaacctccgcctcccaggttcaagcaattctcctgccacagcctccaagtagctgggattacagatttggatttacagtgtgagataatcagctacatagaagtacccacttatgaaacagatatatcctctacacaacttcagagcatatataagagagagaaactctatgaatgtaagaaatgtcagaagaaatttagtagtggttatcaacttattctacatcacaggtttcatgtcattgagagaccctatgaatgcaaagagtgtgggaagaactttcgtagtggctatcaacttactctacatcaaagatttcatactggtgagaaaccctatgaatgtacagaatgtgggaagaactttagaagtggttatcagctgactgtgcatcagagatttcatactggtgagaaaacctatgaatgtaggcagtgtgggaaggcctttatatatgcctcacacattgttcaacatgagagaattcacactggtgggaagccgtatgaatgtcaggagtgtgggagggcctttagtcaaggtggacatcttagaattcatcagagagttcatactggcgaaaaaccatataaatgtaaggaatgtgggaagacttttagtaggcgctcaaatcttgttgaacatgggcagtttcatactgatgagaagccatacatatgtgagaaatgtggaaaggcctttagaagaggtcaccagcttactgtacatcagagagttcacactggtaaaaagccatatgagtgtaaagaatgtgggaagggctataccactgcctcatactttcttctacatcagagaattcataaaggtggaaaaccctatgaatgtaaggagtgtaagaaaacctttactttgtatagaaatcttactcggcatcagaatattcatactggtgagaaactttttgaatgcaagcaatgtgggaagacctatactactggttcaaaactctttcaacatcagaaaactcatactggcgagaaaccctatgaatgcaaggaatgcggaaaggcctttagcttgtatggctaccttaaacaacatcagaaaattcatactggcatgaaacactttgaatgtaaggagtgtaaaaaaacctttactttgtatagaaatcttactcgacatcagaatattcacactggtaagaaactttttgaatgtcaggaatgtgggaaggcctatagtactggctcaaaccttattcaacatcggaaaactcatactggtgagaaaccctataaatgtaaggaatgtggcaagacctttagcttgcatggatatcttaatcaacatcagaaaattcatactggtgtgaaaccctatgaatgtaaggtatgtagaaaaacctttactttctatagaaatcttactctacatcaaagtattcatactgatgagaaaccttttgaatgtaaggaatgtgggaagacctttagacgtagttcacaccttactgcacatcagagcattcatgctgataaaaaaccctatgaatgtaaagaatgtggaaaggcctttaaaatgtatggctaccttacccaacatcagaaaattcatactggtggaaaaccttatgaatgtaaagaatgtgggaaggccttcagtcgtgcttcaaaccttgttcaacatgagagaattcatactggtgagaaaccctatgtgtgtaagcagtgtgggaaaaccttcagatatggttcagcccttaaagcccatcagagaattcataggagcataaaagtgtaagaccgtaaagagtatgagcgcgccattcatcatcagacagcccacactggtgagaaatgatggaatgttagtcttataggtatggctttagcaattgagagagttcaaaatgcagatcttgccacattagaaagcattcaatgtcagtcctgttttaatggaatatctgactattcaatggtaaattaagaaaaaaaaaaaaaaa

SEQ ID NO: 56938 - DNA, 3041 bp, Homo Sapiens
tgggtgttctccgcggcgccgagtcccgggagcgcggtgggggcagcgggcgcggggcgggcgcggggaccgcgccagcctgtcactaatgtctccctttgtgtctcccccatctcatccttttccccggcgcgccgtgcccgccgaccccacaggaaggcctggacgacggcccggacttcctctcagaagaggaccgcggacttaaagcaataaatgtagatcttcaaagtgatgctgctctgcaggtggacatttctgatgctcttagtgagcgggataaagtaaaattcactgttcacacaaagagttcattgccaaattttaaacaaaacgagttttcagttgttcggcaacatgaggaatttatctggcttcatgattcctttgttgaaaatgaagactatgcaggttatatcattccaccagcaccaccaagacctgattttgatgcttcaagggaaaaactacagaagcttggtgaaggagaagggtcaatgacgaaggaagaattcacaaagatgaaacaggaactggaagctgaatatttggcaatattcaagaagacagttgcgatgcatgaagtgttcctgtgtcgtgtggcagcacatcctattttgagaagagatttaaatttccatgtcttcttggaatataatcaagatgtgagtgtgcgaggaaaaaataaaaaagagaaacttgaagacttctttaaaaacatggttaaatcagcagatggagtaatcgtttcaggagtaaaggatgtagatgatttctttgagcacgaacgaacatttcttttggagtatcataaccgagttaaggatgcatctgctaaatctgatagaatgacaagatcccacaaaagtgctgcagatgattacaatagaattggttcttcattatatgctttaggaactcaggattctacagatatatgcaagttttttctcaaagtttcagaactgttcgataaaacaagaaaaatagaagcacgagtgtctgctgatgaagacctcaaactttctgatcttttaaaatattacttaagagaatctcaagctgctaaggatctcctgtatcgaaggtctaggtcactagtggattatgaaaatgctaataaagcactggataaagcaagagcaaaaaataaagatgttctacaggccgaaacttcccaacaattatgttgtcagaaatttgaaaaaatatctgagtctgcaaaacaagaacttatagattttaagacaagaagagttgctgcattcagaaaaaatttagtggaactggcagagttagaactgaagcatgcaaagggtaatctacagttgctgcagaactgcctggcagtgttaaatggagacacataagccacactccgccttcctgttaaaaagggctgccttccttcaaattttatttttgttttcttaatgatgttaagcatttatgctcactggaaacaaacaaaaagcagctgaaaaagtgcatcaactcctctttttctgagaaacatggagcagcgcacgcccaggcgatgccagtctgtgtgccgtgatgccgcactgtgttccccatgacagtggtccatcatcgtgcactcgtcatactcagaagtccaaagttcattcttctttaaagtagcctctataactctgtttattttataaatagtattccttatggctgccactcttatttacctttaaataatttctgaaatttaaccttttcagaatgcattgttgaaacaagataaagattgccttttttgaattttttaaattttgtttttaaaagcatataccaccttagttcattcatgtatcctggtaaagcatcttaatcagacttatttttaattactgaatatttcttagacgttttgggacagattttatgtaatctttataagtatgatttctgaagaaaagcaaatgcattagtatgtttgccttaaacttgtagactaaaccaagtattgtaaaataaacagcgataacagtgatagtttttaactctatggtcattgtatcactctggaaaatgtggagtagctgtaataaatctactcctgtattatgctttacagtgcaggtcttagtttttcttttttctcatttcttttgaaatggcatctcgaacaaagtccaccaatccctttacaaaagaatgaactgctcctctgtgtgtacttcatagaaggtggaatcggacagaggcaggttagtgacagttattcctgaaatacaggagcagagtacagtctgttgtggtttcccggattccgcgcctagctcagccaattaagcatgagacataggccattgagccacttagtagttatgcgagtggatagattggtatgtagagggaaagaggtctgctgtaaagaacaacacttgtttgtctgtggggaaagaaaagcagaatacttgagatgaaagttggcatacaaataggatactatcgccagtagttatattacaaacattatcggcctttctagtgtgaatgaacattagacacattattgtcattcctagtttaaagttaaggttgcgtggttggatttttccactatctttttagtttgtttacattttcctgaaccctcctgagcgcccgttcttggtctaatccccagtcgtgatgattccacacttcctcagccgcatgttgtcttgcctcattcatgagctggtcagcgtttcgtctctttaactgacatgttccccagtgctgtttgaactgttgagtttccgttgctggctgagtgcgttttgtccttcacgtaaccttcgctggtaaaaataagcccatgtgatgtccaccagtggatgaatgctggaccgagagccctagcttctggatccaggtctaggcccttcatctgctgctctgtggcccagggcaggtttgcttgacctctgcctcagttctcgactctaaaggacatactgacctacctcacaggggtgttgtgaggattaataaatgttggtactctgctttggaaaaaaaaaaaaaaaaaaaaaaaa

SEQ ID NO: 56939 - DNA, 3294 bp, Homo Sapiens
gtgaagagaggcgcggcgtgactgagctacggttctggctgcgtcctagaggcatccggggcagtaaaaccgctgcgatcgcggaggcggcggccaggccgagaggcaggccgggcaggggtgtcggacgcagggcgctgggccgggtttcggcttcggccacagctttttttctcaaggtgcaatgaaagccttccacactttctgtgttgtccttctggtgtttgggagtgtctctgaagccaagtttgatgattttgaggatgaggaggacatagtagagtatgatgataatgacttcgctgaatttgaggatgtcatggaagactctgttactgaatctcctcaacgggtcataatcactgaagatgatgaagatgagaccactgtggagttggaagggcaggatgaaaaccaagaaggagattttgaagatgcagatacccaggagggagatactgagagtgaaccatatgatgatgaagaatttgaaggttatgaagacaaaccagatacttcttctagcaaaaataaagacccaataacgattgttgatgttcctgcacacctccagaacagctgggagagttattatctagaaattttgatggtgactggtctgcttgcttatatcatgaattacatcattgggaagaataaaaacagtcgccttgcacaggcctggtttaacactcatagggagcttttggagagcaactttactttagtgggggatgatggaactaacaaagaagccacaagcacaggaaagttgaaccaggagaatgagcacatctataacctgtggtgttctggtcgagtgtgctgtgagggcatgcttatccagctgaggttcctcaagagacaagacttactgaatgtcctggcccggatgatgaggccagtgagtgatcaagtgcaaataaaagtaaccatgaatgatgaagacatggatacctacgtatttgctgttggcacacggaaagccttggtgcgactacagaaagagatgcaggatttgagtgagttttgtagtgataaacctaagtctggagcaaagtatggactgccggactctttggccatcctgtcagagatgggagaagtcacagacggaatgatggatacaaagatggttcactttcttacacactatgctgacaagattgaatctgttcatttttcagaccagttctctggtccaaaaattatgcaagaggaaggtcagcctttaaagctacctgacactaagaggacactgttgtttacatttaatgtgcctggctcaggtaacacttacccaaaggatatggaggcactgctacccctgatgaacatggtgatttattctattgataaagccaaaaagttccgactcaacagagaaggcaaacaaaaagcagataagaaccgtgcccgagtagaagagaacttcttgaaactgacacatgtgcaaagacaggaagcagcacagtctcggcgggaggagaaaaaaagagcagagaaggagcgaatcatgaatgaggaagatcctgagaaacagcgcaggctggaggaggctgcattgaggcgtgcaaaaaagaagttggaaaagaagcaaatgaaaatgaaacaaatcaaagtgaaagccatgtaaagccatcccagagatttgagttctgatgccacctgtaagctctgaattcacaggaaacatgaaaaacgccagtccatttctcaaccttaaatttcagacagtcttgggcaactgagaaatccttatttcatcatctactctgtttggggtttggggttttacagagattgaagatacctggaaagggctctgtttcaagaatttttttttccagataatcaaattattttgattattttataaaaggaatgatctatgaaatctgtgtaggttttaaatattttaaaaattataatacaaatcatcagtgcttttagtacttcagtgtttaaagaaataccatgaaatttataggtagataaccagattgttgctttttgtttaaaccaagcagttgaaatggctataaagactgactctaaaccaagattctgcaaataatgattggaattgcacaataaacattgcttgatgttttcttgtatgtctacattaaacttgagaaaaagtaaaaattagaacactgtatgtagtaatgaaatttcagggacccagaacataatgtagtatatgtttttaggtgggagatgctgataacaaaattaataggaagtctgtaggcattaggatactgacatgtacatggaaaattctagggacaggagcatcattttttccttacctgataccacgaaccagtgacaacgtgaatgctgtattttaagtggttgtatgtttattttcttgagtaacaaatgcatgaaaaattaatgcttcacctaggtaagatcattggtctgtgtgaaatcacaaatgttttttccttcttggttgctgcagcctgggtggatgttcatggagaagctctgttctctatattatggctgtgtgccgttgcttctccctctgcttttatcttttccacagttgaggctgggtatgttctttcaaagaaatggccatgaatatgtgtaagtatacttttgaaaatgagctttcctaaactattgagagttctttccacctcttgcggaaccaactcttggaggagaggcccatgtatctgcacgagcacttagcttgttcagatctctgcattttataaatgcttcttaccaagaaagcatttttaggtcattgcttgtaccaggtaatttttgccggggatgggtaagggttgggttttctggtgggagtggggtggtgggtattttttgttgatgctttagtgcaggcctgttctgaggcaataacaagttgctgtgaaaacagcatgtgctgctgcctttgtaactgcatggaaacttttcacatgggtttttctccaagttaatacagaaatatgtaaactgagagatgcaaatgtaatatttttaacagttcatgaagttgttattaaaataactaacataaaacttaattactttaatattatataattatagtagtggccttgttttacaaacctttaaattacattttagaaatcaaagttgatagtcttagttatcttttgagtaagaaaagctttcctaaagtcccatacatttggaccatggcagctaattttgtaacttaagcattcatatgaactacctatggacatctattaaagtgattgacaaaatctcaaaaaaaaaaaaaaaaaaaaaaaaaaa

SEQ ID NO: 56940 - DNA, 4360 bp, Homo Sapiens
gcggccgcggcagggctgggcctgcgactacccgaggaggctgacctccagcccgggcgcccggttcagcgccgccccggccggcgccggtgcctgccaggcactcagggaggcgggggcgcagtggaggaggcggcgccatcgcgaagcgagcgcctcgcccgcactcagccttgccaccccgcccgcagtccaggctggactgggcggcatttgccgaggctcctcggccaggccccgtccgcccgagccgcgctgagacccgggcagcggccgcgtggagaggaggtggcagcggcccgggaggccggagccaagccagcgacccaccatggagacccgctacaacctgaagagtccggctgttaaacgtttaatgaaagaagcggcagaattgaaagatccaacagatcattaccatgcgcagcctttagaggataacctttttgaatggcacttcacggttagagggcccccagactccgattttgatggaggagtttatcacgggcggatagtactgccaccagagtatcccatgaaaccaccaagcattattctcctaacggctaatggtcgatttgaagtgggcaagaaaatctgtttgagcatctcaggccatcatcctgaaacttggcagccttcgtggagtataaggacagcattattagccatcattgggtttatgccaacaaaaggagagggagccataggttctctagattacactcctgaggaaagaagagcacttgccaaaaaatcacaagatttctgttgtgaaggatgtggctctgccatgaaggatgtcctgttgcctttaaaatctggaagcgattcaagccaagctgaccaagaagccaaagaactggctaggcaaataagctttaaggcagaagtcaattcatctggaaagactatctctgagtcagacttaaaccactctttttcactaactgatttacaagatgatatacctacaacattccagggtgctacggccagtacatcgtacggactccagaattcctcagcagcatcctttcatcaacctacccaacctgtagctaagaatacctccatgagccctcgacagcgccgggcccagcagcagagtcagagaaggttgtctacttcaccagatgtaatccagggccaccagccaagagacaaccacactgatcatggtgggtcagctgtactgattgtcatcctgactttggcattggcagctcttatattccgacgaatatatctggcaaacgaatacatatttgactttgagttataatatggttttgtgacttatgagctgtgactcaactgcttcattaaacattctgcattgggtataatctaagaattgtttacaaaaagattattttgtatttacccttcattcctttttttgatccttgtaagtttagtataaatatatctagacattcagactgtgtctagcagttacgtcctgcttaaagggactagaagtcaaagttccttgtctcactatttgatctgctttgcagggaaataacttgttttttctcatgtttcatcttctttttatgtaaatttgtaatactttcctatattgccctttgaaatttttggataaaagatgatgttttaagttccaatgagtattactagttactcaataccacttattgagtactctgtttctacgtatgtagaatgtatagggatagaagagttgaaaagggaaagcaaaactcctcaagtagcttccttaaaatgtcattcataggagatgtactggaattgctcattctgtgactttatttgtgtcctaaacattcttcagtgaaaataattttatttcagtcaaacatttatgaggaaatgagatcacatctttgtcactggatgctacttgaagagggagtactttgtaaccactttgatatgctgttatcaccaccccctgccctctgctgccataatcacacaaatttaaaaagaaagaaaacagtcttccatagatttttaaggaagaaagggcccaagccaggagatcgcttggttttcttccagaagttaaatggggggatctgaagatttgaatgtttggtctgctttgaaatgtatgtcttttgggatgtattatatgcctagctttataatcagtataaattttaattattccaggaatatgcataatattgaaatatttcatgtcctattttaatagaaaacctcagggcccaagtaacagtgatagaagttagaaaaacctttacttagaattgtccacctagtcagagcccaagaaagaattttcagtggaaaaatcaatatataacttagtgctagctagcgccacagactctagtagataatattatcatcataatggctggtgaaaccatataatcacagaaaaacattgccttcagcatgttcagttcgcagcactgagggcactcttgagggtgttgttaatgaagatttaatttttaaatacaggtggttccaagctttcaaataggttatgctccaaaagtgttatttgtaagttaatttttttacaagtcaaacaatgttggaagtggtatttaggttctagatcggtccacgaaagttagcccatatgtatatcttgaatagtataggggagggtattcataaagtccttatgtggttttaactaagtgaaattatggacaagagaaataattgtaaaatcgtcttaaaggaaaatttaatttttactcctgtttatgggacattcgttctattaactgtcagacacaatttctgttttcatctgagagccagttttcctttatttctacatctaaaataagaacatattgtacactattatataatacagaattgtcttaaactttaataaattcgcattttaaaggtgtttacagattattttttatatctgtagctgaatttgttaaagtctaaaaagctcaaggactttatgaagatctcattatatgaggaaaatcataggttaccattttataactctattgccataagaaaatacactctaaaatcttgatttgaaacatattagaaaccttgattcagtgctcagtggtctcctagtaagaagtcaccgacggtagcgtcatatgagaagaaagaaatccccaccacctcaacctctgctgagattgtgtgctaggaacagccttccctccgtttcccctcagtcaaacttgagccagcctctggatcgatgtgatcttattgcatgtttccatggggtgtacctatactttaagccaatcctgctgcattcactgctaagttaaataaaaagccaagaagattttgcactgtgcagatcctttgctatctgacttgcatctcttcccccacctgtcagctagccacctgcttgtttgtgttgggatattttttagcacctgaagcaccatctgaaaggggcaccattttcttcttccctttgatctcacatatgctccctaaaaatccttaagttgtcaatctgatccccagtgtgaggttaatgagcaaaattggtctttggggccctttttgtccaagccccactgaaaggcctcttcagaaaactattatctttaaagccctactttaactccttaattccagcatacagctaaaactggatgtatattctggcaagtaaaggctgaggactcctctttaatcctcagatctagataactcatgacattttatttgaccaacatagcacatgatgagatatcaaggtaattaaaatagcatgcttgaaaaaaaaatacgtaatctgtttcacctgtaactgtttaagccaataaacttttcaaaatttatgtaatgtggggcttttatgtagcactttacgttttcatgctgcttattgttttattctactgaaaaaaatgaatttcaagattctcaacttttttaatttcaaaaattgtttattgttttgactataggaatacaaaatttcctattttgggagaataagaactctttttgtcatttttggctatgaataaactttctggtcttttgagaccacccatttttatagatcagaatcagaaaacaggtaaacctcactcacacatttggactcatttgaacaaaaatctaggccaaaatactgaaaagcctatgtgtttttttaattggaagtatatgtaaggttaatgcatttagtgaacgtgactaacaaagactaatgtgcacattaacagatgtactttttaaggttttatgggaggctgtgcattgctcaaaagctgttgggaacgccttctgaacagttgccttcagaactagtttgagctgctcaataaaaccagtgactttactcataaaaaaaaaaaaaaaaaaa

SEQ ID NO: 56941 - DNA, 5862 bp, Homo Sapiens
gtctgtctgtgtctcgcagcggcgcgcggccccggacaagcgctggggattcccgtttgaggcgtcactactgtcactgccatcaccccacggagccacttctagaggggagtagacccggcccttcgccgggcagagaagatgttgcccctgtccatcaaagacgatgaatacaaaccacccaagttcaatttgttcggcaagatctcgggctggtttaggtctatactgtccgacaagacttcccggaacctgtttttcttcctgtgcctgaacctctctttcgcttttgtggaactactctacggcatctggagcaactgcttaggcttgatttccgactcttttcacatgtttttcgatagcactgccattttggctggactggcagcttctgttatttcaaaatggagagataatgatgctttctcctatgggtatgttagagcggaagttctggctggctttgtcaatggcctatttttgatcttcactgctttttttattttctcagaaggagttgagagagcattagcccctccagatgtccaccatgagagactgcttcttgtttccattcttgggtttgtggtaaacctaataggaatatttgttttcaaacatggaggtcatggacattctcatggctctggccacggacacagtcattccctctttaatggtgctctagatcaggcacatggccatgtcgatcattgccatagccatgaagtgaaacatggtgctgcacatagccatgatcatgctcatggacatggacactttcattctcatgatggcccgtccttaaaagaaacaacaggacccagcagacagattttacaaggtgtatttttacatatcctagcagatacacttggaagtattggtgtaattgcttctgccatcatgatgcaaaattttggtctgatgatagcagatcctatctgttcaattcttatagccattcttatagttgtaagtgttattcctcttttaagagaatctgttggaatattaatgcagagaactcctcccctattagaaaatagtctgcctcagtgctatcagagggtacagcagttgcaaggagtttacagtttacaggaacagcacttctggactttatgttctgacgtttatgttgggaccttgaaattaatagtagcacctgatgctgatgctaggtggattttaagccaaacacataatatttttactcaggctggagtgagacagctctacgtacagattgattttgcagccatgtagtgaatggaaagaaattatgcaccttttatggaccaaatttttctggtactgtacgatccaaaacattgtacccagctttttaaaagagagaaattatcactacaactcccgagcactaagtagacggggtagagtcagccgttcatgctttgtggggagttcacagctaagggatcagatttaagaggatatctcctggacttttggtcttttcttttgtgctctttcctccaaatctttttgacttctgaggtttttagcttaggatgttaatttgtccttttgtctttctttttttgtttttgttttctgtttgtttgttttcatgttgaatgcccacaccaccatcctctcatcccagccagtaagaatttcagttgtgggcctccagtcttctggaatgtcttcactgcagctgctggaaatcactgctttcattcccacaaaaccagtattacttttttttaaaaaaagaaagaaattggaaatctgtgctatacgtaatgtcataattgttgacgttcttcagtataatcatgtttgttaaattgtttgtaccttgcaaacttatgaaccaaaccatattgggttttcaaagtgcctttgtatccaaaaatgtatttgccagcatagaaatgtaccatcaagagtcatgtatgttttatttttgtttttattttttattttttgagatggagtctcgctctgtagccaggctggagtgcagtggcataatctcagctcactgcaacctctgcttcccgggttcaagctattctcctgcctcagccttctgagtagctgcgactatgggcgtgtgccaccatgcccagctaatttttgcatttttagtagagatggggtttcaccatgttggccaggatggtcttgatctcttgacctcgtgatccgtccacctcagcctcccaaagtgctgggattacaggtgtgagccaccacgcccggctatgtttttttttttttttttttttttaacaatggatattctgtaaaatatcctgtacaaaacaagactattgccagtaatgtatacaaattgtctttttgtgtacttccagcataggtttggatatatgaacatttttcttttattgttttatcttcacagaaaataaaaggtgttaatttgctttttaaaacaaatttaattatcacattttaaattactttgtggactgtgttttcaaaactttgcaaattcatctgttacacagaaaattttgacttaaaacatctgctgaattccaaatttctgtaatagctactgtatctgtgataaactttcctatatctttccttgccatttctatggattttataatgaaagaaaaaggcattggagactgaaggcagaaatggttgtgacagtgctgtttggctttttcattcttcaaatgccaagtcatccactttgttttcctgtttaggctttgcacaaatacaattgctttcaggaatcctaaagcagcattttattgagtttgaattattaaaggtacagaggaaatgtggtgatgtagaacttttcctaacacaggtatctaggaagtaagtgctgagttgattttctaggttcttacgtatttgaaaaataaaattgcaattcgagataagtgcttgagcactctacttaagtattctctgtgttttatgaagagaaaatgatctgattttcccttatacttcattttacaatacatattcccttttaacttaaaaaaattgtaaatgtgggagaaaaaaccctgcaggatggaaacaattattaagaatgtagatcaataagtactttttagtgatgtggcagaaatccctgttgattctaagttttagagtgtcttttcccctatttctgacctacaactataaactactctctattaggagaactagaccactttcttcattcttttctaaactgctgcagattgccgtgaactctatcaatagtctcttttccgcaggcaaagtggcattttctaaacatgtttgcttactgccaggtggtttgaaatctatgatttactgcagtagtatgtgcttaaaacaactgttgaggtcttttaagcaggaaagttcaaaaggaagtgtcctgataatggtactggtttttctacaaatataagtagtcattagaagtttgcaaccaccaccaagtctgagagaactctgggatattctgtgggttttggcatattagatagagaaaatgacagatctagatgaagggagcttttggatgtgtgcctttaaaaactgattatgtataaatactgatatttcacatacggagatatttgaagacccaagtctgcctttcacagagccctccattccaagtttagtttttgtcaaaatatgaatcattttatttgactgtactatcagtacacaaatgcatgagtatgtttatacagtgttagactgatgtgaatttgcatttgttacattacattgccagcgcatatcatttagcaagttggcattaacatttatgctttaattaaatgccagtatacctatgtgtgcagcagtaaaaaattagtgagaaaaagcaactttttgtcactcttaggaaatattttgtcttattagtgttcttggcacatgtatattactaaagtagataattccaatgagaaatactaccagattattgttataaaattaatttacaatgtccctgatattgagctaactcttaaaaaaaccaaacaaaactcgtatctgagtgtaactttgccaatattttaaaagccaaaatattctctggacaacaaatttgtattgctcagggacagtttaccttgcctggtaaaccttcccaaacagaaatatagctatactatctttggttttgttttttgttttttttgtttgtttgtattagatggaatttcactcttgtcgcccaggctggagtgtagtggcgcagtctcagctcactgcaacctccacctcccgggttcaagtgattctcctgtctcagctccctgagtaactggaattacaggtgcacgccaccacgcccggctaatttttgtgtttttagcagagacagggtttcaccacgttggccagggtggtcttggactcctgacctcaggtcatcctcctgcctcggcctcccaaagtgctgagactacaggtgtgagccaccgtgctcagccactagctttggttttttaaacatagattatattcctcaagatgaagggcttaacatatccacagcttcctcagtttgctaactccccatgcatctttgtgaaggacagtatctagtttatctgtaggtcagtgttccttgtgctgtcatttcccttatatctggaatttgtcagcattcctgaaaacctacacgtgtatatcagtaaccaaaatgctatgccttttttgcacctttgtacagcagccaaatcatgaactcaaaatgtatttgatcacagttctataatgtttttacctacctattatggaataatcagtttttacagagattattaatatggtagaaccctgttatgtaattccaaaacttaagaaccatatttacattgcttaacacagaattttacatctaagcaaggactggctttagaagcagtgtagttctacctctcattttacagatgagaaaaccgaagcccagaaaaactctcatttgctcaaagtcacagagaaaattagtggcaaagccaaaaagattcagatcttctgactcgaagttgagagttctttatactctattatgctgcctctccagtgtaatatttgcctttctgtaaatgggattaaatatgatttgtaaataaaggacatctgacctccttttttggtacattaaggcactttataaatggacttttattgtctcatttttcgtatataattatttccatcatattctttatggaagatgcaattaattttaacttttttactcttataaaaccagttcctgacattttaaaaaacaatatctgtaaaatggatccttttatgagtgaatttttctgctaattgcccaaggctaaatccaatttaaggattgcttagtttctttattttgtttatggtctctgaactggtatttttttataaaccaggctaattcacaggtcataccatttcattcttgtcgtgttggcttccagtcactggaaaagcttttgcattttaaagatttttagagccatgcaaaactgggcattaaatgttgcataaagcaaatcttttaagtaaggtaaaatgttgaagtcttaaccagaattcctacaactaattactaaaactgctatttctaactcttcatgaaagcattacctttggaaagttaaactttttttttcctttcatcaccgtctttgaaacaaattattttccaattcataagaactttggtaaaaaaaaaaataaaaggaaattatatgtttttctttggacattcattggaaggcttgttgaagacatgatcccccagaagccttagtgacccagatctcaaccagagactcaagatagcctcaaatacagtgaaagattatgtatccaaaaaaaaaaaaaaaa

SEQ ID NO: 56942 - DNA, 6782 bp, Homo Sapiens; identical to SEQ ID NO: 29675

SEQ ID NO: 56943 - DNA, 2069 bp, Homo Sapiens; identical to SEQ ID NO: 30980

SEQ ID NO: 56944 - DNA, 4113 bp, Homo Sapiens
tgaggcgcgggaggcccgcgccccgcggctcgctgtgcgtgggagggcgcgagcgaacgcgggcgaggagcggccgagccgctgaagaggagctgggcgccggccgcccggccgcgctcggcccgcggatcgcctccgcccggtcttcgccggccccggcccctggcgagatgccgtgtggggaggattggctcagccacccgctgggaatcgtgcagggattcttcgcccaaaatggagttaatcctgactgggagaagaaagtaattgagtattttaaggaaaagctgaaggaaaataatgctcctaagtgggtaccatcactgaacgaagttccccttcattatttgaaacctaatagttttgtgaaatttcgttgcatgattcaggatatgtttgaccctgagttttacatgggagtttatgaaacggttaaccaaaacacaaaagcacatgttcttcattttggaaaatatagagatgtagcagagtgtgggcctcaacaagaacttgatttaaactctccacgaaataccactttggaaagacagactttctattgtgttccggtgcctggggaatctacgtgggtaaaagaagcctatgttaatgcaaaccaagctcgagtcagtccctcaacatcctacactcctagtcgccacaagaggagttatgaagatgatgacgatatggacctacagcccaataagcagaaagaccaacatgcaggtgccagacaagcagggagtgttggtggtcttcaatggtgtggagagccaaaacgtttagaaactgaagcttctactgggcaacagctgaactctctgaacttgtcttctccttttgatttgaattttccattgccaggagagaagggccctgcatgccttgtgaaggtttatgaagattgggattgtttcaaagtaaatgacattcttgagctatatggcatactgtctgtggatcctgtgctgagtatactgaataatgatgaaagggatgcctctgcactgctggatccgatggagtgcacagacacagcagaggagcagagagtacacagtcctcctgcttcattagtgccgagaattcatgtgatcttagcccagaagttgcaacacatcaacccattattgcctgcctgccttaacaaagaggagagcaaaacctgtaagtttgtttcaagtttcatgtccgaattgtctccagtcagagcagaacttcttgggttccttactcatgcccttctgggggatagtttggctgctgaataccttatattacatctcatctccacagtatatacaagaagagatgtccttccactaggaaaatttacagttaacttgagtggttgcccacggaatagtaccttcacagaacacttgtatcgaattattcaacatcttgttccagcatcttttcgtctgcagatgactatagagaacatgaaccatttgaaattcattccccacaaagactacacagccaatcgcttggtcagtgggctcctccagctgcccagcaatacttcccttgtaatcgatgagactctcctggaacaggggcagctggataccccaggtgttcataatgtgacagccctgagcaacctcataacgtggcagaaggtggattatgacttcagctaccatcagatggaattcccctgcaatattaacgttttcattacttcggaggggaggtcactcctcccggcagactgccagattcacttacagccccagctaattccaccaaacatggaggagtacatgaacagccttctctcagcggtgctgccttccgtgctgaacaaattccgcatttatctaactcttttgagattcttggaatatagcatatctgatgaaataaccaaggcagttgaagatgactttgtggaaatgcggaagaacgaccctcagagcatcactgctgatgatcttcaccagctgctcgtggtggctcggtgtctgtctctcagtgctggtcagacaacgctgtcaagagaacgatggctgagagcaaagcagctagagtctttaagaagaacgaggcttcagcagcaaaaatgtgtgaatggaaatgaactttaaagatgtaatacctatgaagagtaatgggcaaactgtagccacataattgtaaaattcagatattcatttataccacattgttttataggtaatttctatcacaaaccagtgacatttcctgaaatcaagcctggtaacacctgatgtttatatgatattcagtaaggacttttaccttactgatttcatggagcttttgaagtttgttttataataattatataaattagtaatgatgtaaaaaaagtatttgatattaaaagtttaatattgataatgttgctgattgtaccatttccttagcttcagctgagtcataggccagactgttgaaatgctgaaatgaagaaggttgttgcagtttcaaagtcagaggaatcgtgcttcggatttcttatgttttctagttctctgtttttccagttcacagtgggttggggtgcattcagtagtccatctttggggaacggaggcgtacttgccattgattcacatgactacatgaaattctgtactgtcatttcccagatgtttggccacagaaactttttcccacttaacatttgttaacagcctgcaaaactaaacttgtacatggcagtggttcccagacttttgtattttatggaccggtagtaatatttccaaaaatctggggtactataaggttgccaatttaccttgccaagtaatccgaataaatcactgtattatcaccatttttttcataaaaggaaaggacaatctatctctgaataagaggagtcctttaaacggaatgaatgtggcttttgggggcaaaagaaaccaagacactacattgtctttattttctcctatcccagtgcatttgagaaccatgcataagggaatgctgtgctacaaagctgtgcccaaatatgaaaacaaaataggaaacttaaaaagcaataccccctttagaaagtttttattttcttaaatgtcattgagttgctttgattctattggatttttggcattttttatgggatcatcagttggttccaagtatgttagatcagctaacatctgctactccagtaacagcctcgtacaactgcaggtaggttttctccagaccaattagttttaatagagcaaactaacaacagactgtagtagcatggttatggcaaccagaatcttcagaaaggttaggacattactttttaagctgtcagtggtatcaaataacttacctagttggaggcagataaaggatcccttacgttttttcctataaggcctaaattgaaattgttaaccaaggaaacagggtcagccttgaaaaatcaaggaattcattgtacctaataactgaagtaaaaataactagttgttcaacttttcctaaactcaaatctatttttataaacaaatgtaaataatgtttatattagagttgaactggttttcatttttataactggtagactagaccttccttaaacttttagaaataaaatgaaggcttcactggatttgtgaggataaaatacattttctttaattgtcctagagcaaagtacattagtcaccatgtgttttttgtgccaatgtaacttgtaatttaccaaagaaaaatacatacattgcttggtcttgcagaaaagttcccttgaaagaacctttccaataaataaaacgtcccaaattagcagtaccttgggctgtttttcatgagtaagaagattcaccatcccatgtgatctgtgtggaaaaagaccatgtcctcttggtggaagacatgagagagctgaactgaagtggaggaggtggtgcaagagggaccttcctgctcaaggcccgcccaggcagcggaatagagtgcagtgcttggctgcagaaaccctttgtccctcacctatatatacacggacagtcaagtttgttgctctaacgtaaggcacagcgttaatcctgtatggccaggaaactgagtagactcctgtgtaaccctgtttggaactttgccttcttaaaatgatttttc

SEQ ID NO: 56945 - DNA, 634 bp, Homo Sapiens
gcagcttttgtcttgctgaaaccttccagttaaatttctccatcaatttttcaaatagtattattagctgagggactaaaatctgcctggcgttcttctgatgacaaaggaaacacagcacattcacaaacatctgaagccaactgcaaggcacccgtcactcagcgagaaaagcagaaaggtgccaattcagatggctgagctacttcgcctgggtcccgacctgtatcaccacagggtcacagaaatggaaccttctccgtcacacctcctgatggcagtcagctgtgacccgctgaatccaggacatcatgcattccagtttcatttgcgagaacatttccaggtccggctgaagcctagtggctccagcagaggtctcaacccctttgggatgctcagtgggagacagaatcaagggccaatgatccatgacctagtcctagtgcccatgtcagtttgtcaaaggccctcagagcagattgtgttttccctggcgggggcttgacttctttgctttaaaaaggattcttaagtatttattgcagtaaaattaaccaccttcaaatttctgccagatcccctggaggtatatagcttattaacacaaaacaaatgtgacacttgaaaggca

SEQ ID NO: 56946 - DNA, 2684 bp, Homo Sapiens; identical to SEQ ID NO: 26281

SEQ ID NO: 56947 - DNA, 6147 bp, Homo Sapiens
gcgggcgccggcaatcgagtggcttcctggccatggagaggagatctggacccgaggacgccagggactcctctccgtctccctggaccgctgtgtaggcacctgagttaacggacgctaagcggggtaggggaagtaacagtgtatcatgtatgccactgattccaggggacactcccctgctttcctccaacctcagaatggaaatagtcgtcacccatctggctatgttccagggaaggttgtcccattgcgtccccctcctcctccaaagagtcaagcttcagccaaatttacctccatcagacgagaagaccgggcaaccttcgcattctcacctgaagaacagcaagcccagagagaaagtcaaaagcaaaagagacacaaaaatactttcatttgttttgctattactagtttctcattttttattgcacttgcaatcattttaggaatatcctcaaaatatgctccagatgaaaattgcccagatcaaaatcctcgtctcaggaattgggatccaggacaagattctgcaaagcaagttgttatcaaggagggagatatgctccgtctgacctcagacgccaccgtgcattctatagtcattcaggatggaggactgcttgtatttggggacaataaagatggatccagaaatattactttgaggactcattacatcctgatccaggatggtggggcgcttcatattggagcagaaaaatgccgctataaatccaaagcgacaattaccttgtatggcaagtcagatgaaggtgaaagtatgccaacatttggcaaaaagtttattggtgtggaagctggcgggacactggagttacatggggcacggaaggcatcgtggacgttgttggcaaggaccctgaattcctcaggcttgccctttgggtcctatacctttgaaaaggacttttcccggggcctcaatgtgagggtcattgaccaagacacggccaaaattttggaaagtgagagatttgatacccatgaataccgcaatgagagcaggcggcttcaggagtttctgagattccaggatccaggtcggattgttgccatagctgtcggggattcagccgctaaaagtctcttacaaggaaccatccagatgatccaggaacggttgggaagtgaactgatccaaggactgggctacaggcaagcttgggctttagttggtgtcattgatggtggaagcacttcttgcaatgaatccgtgagaaactatgaaaatcatagcagtggcgggaaggctcttgcccaaagagaattttatactgtggatggccagaagttctctgtgacagcttatagtgaatggattgaaggcgtttctctttcaggattccgggtagaggttgtagatggagtgaagctaaatttgctagatgatgttagtagttggaaacctggagaccagattgtggtcgcaagcacagactattccatgtaccaagcagaggagttcactcttcttccctgttctgaatgcagccattttcaggtcaaagtcaaagaaacccctcagttcctgcacatgggtgagatcatagacggtgtagacatgagagctgaggttggaattcttacccggaatattgtgatccaaggagaagtggaggactcatgctacgcagaaaatcagtgccaattttttgattatgatacctttgggggacacattatgataatgaaaaattttacttcagtccatctttcttatgtggaattgaaacacatgggtcagcagcagatggggcgataccctgttcattttcacctgtgtggtgacgtggattataaaggaggatacagacatgcaacatttgtggacggcctgtctattcatcacagcttctcaaggtgcatcactgtgcatgggacaaatggcttgctaataaaagacaccattgggtttgacacactaggtcattgtttctttttggaagatggtattgaacagaggaatactttgttccacaatctgggactcctcaccaagccgggtactctcctgcccaccgataggaacaactccatgtgtaccaccatgcgagataaagtgtttggaaattacattcctgtgcctgctactgactgtatggctgtttcaactttctggattgctcatcccaacaataatctgattaataatgcagctgcaggctcacaggatgctggaatatggtatttattccacaaggaaccaactggggaatccagtggattgcagctcttggcaaaaccagaactcactccattgggtatattttataacaacagggtccattcaaattttaaggctggcttatttattgacaaaggtgtcaaaacaaccaactctagtgctgctgacccaagggaatacctctgtttggacaatagtgcaagatttcgacctcatcaggatgcaaaccccgaaaaaccacgtgttgctgctctaattgacaggctcattgcttttaaaaataatgataatggagcttgggtcagaggaggagatattatcgttcaaaattcagcatttgcagataatggaataggactgacctttgccagtgatggaagcttcccaagtgatgaaggttccagccaagaggtatctgaatctctctttgttggggagagcaggaattacggctttcagggtggtcagaacaagtatgtaggcactggaggaatagaccagaagcctcgaacattacccaggaacaggacgttcccaattagaggctttcagatttatgatgggcccattcatctcacaaggagcactttcaaaaaatatgtgccaactccagataggtacagcagtgcaattggcttcctcatgaagaattcctggcagataacccccaggaataatatctccctcgtgaagtttggtccacatgtctctctgaatgtcttttttggaaagcctggtccctggtttgaagattgtgagatggatggtgataagaactccatattccatgacattgatggctctgtgacaggatacaaggatgcttatgtgggaagaatggacaactacctgatccgccatccaagctgtgtaaatgtgtctaagtggaatgcagtgatctgcagtgggacctatgcacaggtctatgtacagacatggagcactcagaatctttctatgaccattacacgagatgagtatccgtccaaccctatggtgctccgaggtattaatcagaaggctgcctttccacagtaccagcctgtcgtcatgctggagaagggttataccatccactggaatgggccggcaccacggactacatttctatacctcgtcaacttcaacaagaatgactggattcgagttggcctttgctatccatcaaacacaagttttcaagttacctttggctatttgcagcggcagaatggctcattatccaaaatcgaagaatatgagcctgtgcattcactggaagaactgcaaagaaagcaatccgagaggaaattctattttgactccagcacggggttactgtttttgtatctcaaagccaaaagccacaggcatggccacagttactgttcatctcagggatgtgaaagagtcaagatccaagcagccacagactcaaaggacatcagtaactgcatggccaaagcatacccacagtactacagaaagccgtcagtggtcaagcggatgccggccatgctcactggactctgtcaaggctgtggcactcggcaggtggtgtttactagtgatcctcataaaagttacctccctgtgcaattccagtcacctgataaagcagaaacccagcgtggagacccgtctgttatttctgtcaatggcactgactttaccttccgaagtgcaggcgtcctcctccttgttgtggatccgtgcagcgttccattccgcttgacggaaaaaacggtttttcctcttgctgatgtcagtcgcattgaagagtatttaaaaacaggcatccctccaaggtccattgttctgttgagcacaagaggagaaataaagcagttaaacatttcacacttactagtacctctgggattagccaaaccagctcatctttatgacaaagggagtaccatatttttgggattcagtggaaactttaaaccatcatggactaagctatttaccagtcctgctggacagggccttggggtgcttgaacaattcatacctttgcagctggacgaatatggttgtcccagagccaccactgtccgcagaagagacctggaactgctaaagcaagcttcaaaagcacattagagactaactgtaacttaagtgctgggggaaaaaaaatgtgaactaacttatttaatttatggcattttaaaatgacactgttaacccaacggaaccattttccagtttgatacagaatggggagaaaagaaagcgtttgaaattattgcttggataccagcttcatgcaccttctagttgtacaaaatgttaaagacgttgtttgtatttgtaaggctggtgtattcagagagcagatctcttattcctcactttccacccccgtattttgtaatgaccatgagcaatgtttttactttttgtataatggggtggggtggagtgggggcttctgagagtcagcctgaggtctttagaggaccagctattgtagcaccttggatacttgaagtttaatgctcagttgggtcgggtggcagttgacttggtggctggcatgttcagcagtgcctggggccctgtttctgggcagcctttgaggattttctatgatattgaatgacagttttaagtggcaactcaggcccagctcatgcccttttttgcctggacatgtgctatttttattcacttatatatcaattacttgtaagggttaaactttcaaacaggaagtatattgggacaaaagggctcttggggattagatatccctttaatctgtgaccatggggcaaaaaattttcctgcagcaaaagtctgaggctgttgggaccatttttgcagctttaatccttagcctcttttgactgtatatttgtgtttaaaatgcagagctcaactgaatatttccttttttgttttgttttgttttgttttaagaagtaggttgttttcctgaaccgtaaacttgtatcattttaacttgcacaaaggaagtctgttcttggtattgctcttgcacttgggttttttgttattgttttgtgtggattttttaaagcttttctgttcaccctcctgccaggaaaatcccagaaagcttaatgataccccaaaatgattacacccagggaggaaaaaaaggagcgctttctagggtcagaatcgtggagagaatactcagaacatgaacctctttaaagccttgcaggaatgagtcactcttacttaatgaaatgttaaagccaattaaaaagcatgctgtgatgcccagcttccctttccacagggtgcatgcgtctcctgctggtgaatcacatgcggcaagaggcaactggctccacagcctgggatgctgccgtaccaagaggaaagaagcagcaaaatgcctttacgttgttctaaacccccgacgcataaagtgtagaggagggatggccaagggtgggtggtagaaagtgtgttcaggctgacactggcaatgagtacagataatttcactttcctcttccaggggcaaaggctgatggcctctacctttgtatccaggagaaactgcagagcagccctgtgactttacaaaatatgctacctcaaagtgctaccgataaacctttctaattgtaagtgcccttactaagggcacatgtcttaatcaaagttagttttttgttttctggtttgttttttttttttttgtatattgatgaatgagatcttacctattaaatatattattggaaaaaaaaaaaaaaaaaaaattaaagtttgagtgtgtgtgtgtgtgtgtgtgtgtgtgtgtgtgtgtgtgttttatgacttaaatatctttacgtgtgttttttagagcttggttctttaaagatttggagaagatatgtaaattaccaaggcacttggtttttctgttttatatactaataatcagggcctaagttaaataaaaatatgtgtgcatgtatttt

SEQ ID NO: 56948 - DNA, 3009 bp, Homo Sapiens
cagagctagcccgggaagcccacactggcggccacggagcagagtccctcacccccaccagctgtagctgaacgtctggatggtggagaagagcagggttccgagtctgaggaagacataaccttgtgcctgcctgcccacctctctctctggtcctgttcatctctcaggctctgagacactgaccttcactgctcagttaaaggttccagggattccactttgtctggacccatccagctgagtgaacccagggtggtggtgtatctggggagagtgaggagtgggttgtccaaacaccagggaaagagccctttggggcctcagacagaggagtgaagctggaaccatcagggaacatgagtgaattttggcacaaactgggctgctgtgtggtagagaaaccccagccgaagaagaagagaagacggattgaccggaccatgattggggaaccaatgaattttgttcacctgactcacattggctcaggggagatgggggccggagatggacttgccatgacaggtgcagttcaggagcagatgagatccaagggaaaccgagataggccatggagcaattctaggggcttatagctccaataatggaatggttctgccatcttgaaacccccattctgtttccagcccagaagaaatgctgcccctaccagatccctccttgaaccagtgatctaaggacccctcttttccctatctgcctaacagtgcctcacaaggcttgggggctggactccctctactccctctggccatagcccctcctggagatggggtcaaggcagcaggactgatcaagtgactactggttagccagagggagcgctgaagcctaggaaaccctcaggtctgagataggagttctctaggaacctggaatgagttcctgtctcctgaatgatggtctgggtgccacctgtttttaaactcttaaacctggaactccttaaatggggtaggtgggtgagattatcaaagctgaagctggctttgctgagaagctccctacctccctgcccttctcctccttcctggctgggaatgaactaaagcagatgtctaagcaggggctgggggggtgcctactcccttttccactctatctttagatttcaaaccttaggcttacagccctcaatatctctctgctaacaccagtgtctctttctagttaggcctctaatcttctgtttctgtttaccagcttcccagcaactttccttttttaaaatattaaaaatttaattcaggttctcttaattatcctcatcctgctgttcctccgcccttaactctatccctattaggaaccttgtttcccaccgaataagagttaaggtaagaggtagctcttcacctgatgacattccatttaagttttggggcatctttcctgccctctgccaacctccctgctggcccaggtgagaggaggaagaggggtctggaaagaaacccagaatgcggcagaactaggagtaagtccatctcaaggtggacttctgatcattgaggatggtgagataaataggttgaaaacaatcatctgtgagtttaggagtcttaagatcctcacagcacgggagcagggagaggctctagaacaaggtttcacaaccgagatgcctttgacattttgggctgaagtgttctttgtaaggaaaacctgtttcctattttgtgcattacaggatatttagcagcacgcctggcccactctagttatgacaaccaaaaatgtctctatacattgccagatttctcctagggggcaaaatcgcctccatttgagactacaactctgagttccgtagggggcaaaatcgcctccatttgagaaccacaactctaaagtcaagatatttttctctgaagtgatttctgcttggcacgctaccctcatcatcttactcatcttaagcccgagcatggatcaactaggagcccatataaatgaggctcagtagggctgacataatctccaaacaattctttaattcagtgtattgcttggtgtttgcatgttgctatgattggaacaaggttccccctcctccattcttgccctctggagaagtggttcctgcagtgtagagatatgaacagggtatggtaggattggggaaaggggagagagaagcagtagatacactccttatcctccccaaattttaagctctatttttgtgccctagtcctagacacacattagactcagggagttttgtctgaagaccaggtcccactgccccctggctgaagagtctgctttaaatgggaaaacaacgtaggagcaggggtttttaggcactttcagttttctcaggtgttcttcgttctggcccttccagggtaattaggaaggcagaacaagacagatgagctcctgcctgctctgagacaagaagggtggggtctcattagctttgcaacaggaaacatcctgttttattatggtagtggggtcaggaatgtaggaactggtatccattctgccaattcccacccattcagtttgcttatccctacagaacagtgactgaggttcctttttttttttttttttttttttttttcaaatttccatgtattttctgccatttttcagggtctaagattggtcatacattcccaatttactctcagttccagtcaagctggttgctctgaaagtaacccagcttgttgctctaaaatacctcagtagcctgagtgttatactagagatctaaagggttaacaggatagggtggaaaggttagagactcctagaaatctctggtcaccgtgatcttcggcctcattctaatacctgttctttggacagtctttttcctttggtgctctcttgcctttagctaccttctctaatatgtatgctaccatcactaataaagtgatgggaatgggtttgagagtcgtaatttatattaaaaagttgttggacttttaaatacattttttcaaataaaaaattaagcaaaat

SEQ ID NO: 56949 - DNA, 1502 bp, Homo Sapiens
ccacgttgcccaggcagatcttgagctcctggcctcaagtcatcagcccgcctcagactcccaaagtgctaggattataggcgtgagccaccgtgcccacctgcatatgttgtaagtttatactccactttttacaatatatctgaggcctggaaagttatttttaaagacatttttatatatacacacattcaactttcgtaaagtttatattcagctttttatagtacatctgacattgtagaaaagcattttcttatatatagttgaaatatatattcaactttgatttagtaaagtatatgaaaaacataatttacattcagcattttatagtgtatgtttatattcagctttttatagtatatgtgaaatcctagaaaagtattattttcctgaataagaaccaggaagaaactgattaaagagctataccacataatttctctagtactagattatcttacagtcttctacctcttcaagatacaaaagtcatggctgtgaggctatcattacccttttaccaaagttggaaaaggacagcatccaaaataagtcagctataaaaaaaagtaaagtctgctgggattacaagcgtgagccaccgggcctggcctgcattttcttaactgccagtgagattgagcatctaccatgtctaagggtcattcgagttctgtttctgtggattgcttatttttatctcttccttttgtttacattggagtagtttttaaagcaatctgtggaaactttgctaaggagattgtattgtcatatgctctgcagtttagcctgcatcttttgccatcgtttatggcaaacagagttaacatatttttctgtgaagagccagatagtaaacatgcaaggctttgtaagccatacagtctctactctgtctttgtagtgtggaagcgcttaatacataagccaggtgttctcaaacaggggccatttcgtttctcatacctacaccccagtaggcatttggcaatgtccagagtcatttttggttttcagtatgaagggtgggtgctgctggcgtctggtgagcagaggccagggatcctgctaagcgtcctacaatgcatagtacaactgcccccaccccccaaaaaaagtctcatccagaatgtcagtagttctgaggttgagaaattctacctataagcaaatggacattgttgtgttccaataaaactttatttacaaaaaataatcagaaggccacatttggcctgtgagctatagtttgcttatctctattttaaatagctttttgctatatgataatatagttttctgtatttgttcctgaattgtctcattcaccccaaatatttttccaaattttcttctattttatgcctttaaacctttactaaatacaaataatacacagaaacaatagcccctgtgtaactaccacctaataattaagcatgttgttttattgttttgattaaaaatttataaaagaaataaatcatttcaga

SEQ ID NO: 56950 - DNA, 4562 bp, Homo Sapiens
ggtgctgcggcccgcgccgccatcttggattttactctccatttttctctggaattatttttggtgattaattttctgggggggactgggacgcggggcccggcggcgcggccccgcatcgcagcggccgggcagcggggcctgggacgcgccccgaggaggagcggggcggcgcaggcggagagaacattgaaagtattctctaagctatttgaagagagtgactaaatgcacctgggtcaggctgtctgtgggtatgaagtggttgggagaatccaagaacatggtggtgaatggcaggagaaatggaggcaagttgtctaatgaccatcagcagaatcaatcaaaattacagcacacggggaaggacaccctgaaggctggcaaaaatgcagtcgagaggaggtcgaacagatgtaatggtaactcgggatttgaaggacagagtcgctatgtaccatcctctggaatgtccgccaaggaactctgtgaaaatgatgacctagcaaccagtttggttcttgatccctatttaggttttcaaacacacaaaatgaatactagcgcctttccttcgaggagctcaaggcatttttcaaaatctgacagtttttctcacaacaaccctgtgagatttaggcctattaaaggaaggcaggaagaactaaaggaagtaattgaacgttttaagaaagatgaacacttggagaaagccttcaaatgtttgacttcaggcgaatgggcacggcactattttctcaacaagaataaaatgcaggagaaattattcaaagaacatgtatttatttatttgcgaatgtttgcaactgacagtggatttgaaatattgccatgtaatagatactcatcagaacaaaatggagccaaaatagttgcaacaaaagagtggaaacgaaatgacaaaatagaattactggtgggttgtattgccgaactttcagaaattgaggagaacatgctacttagacatggagaaaacgacttcagtgtcatgtactccacaaggaaaaactgtgctcaactctggctgggtcctgctgcgtttataaaccatgattgcagacctaattgtaagtttgtgtcaactggtcgagatacagcatgtgtgaaggctctaagagacattgaacctggagaagaaatttcttgttattatggagatgggttctttggagaaaataatgagttctgcgagtgttacacttgcgaaagacggggcactggtgcttttaaatccagagtgggactgcctgcgcctgctcctgttatcaatagcaaatatggactcagagaaacagataaacgtttaaataggcttaaaaagttaggtgacagcagcaaaaattcagacagtcaatctgtcagctctaacactgatgcagataccactcaggaaaaaaacaatgcaacttctaaccgaaaatcttcagttggcgtaaaaaagaatagcaagagcagaacgttaacgaggcaatctatgtcaagaattccagcttcttccaactctacctcatctaagctaactcatataaataattccagggtaccaaagaaactgaagaagcctgcaaagcctttactttcaaagataaaattgagaaatcattgcaagcggctggagcaaaagaatgcttcaagaaaactcgaaatgggaaacttagtactgaaagagcctaaagtagttctgtataaaaatttgcccattaaaaaagataaggagccagagggaccagcccaagccgcagttgccagcgggtgcttgactagacacgcggcgagagaacacagacagaatcctgtgagaggtgctcattcgcagggggagagctcgccctgcacctacataactcggcggtcagtgaggacaagaacaaatctgaaggaggcctctgacatcaagcttgaaccaaatacgttgaatggctataaaagcagtgtgacggaaccttgccccgacagtggtgaacagctgcagccagctcctgtgctgcaggaggaagaactggctcatgagactgcacaaaaaggggaggcaaagtgtcataagagtgacacaggcatgtccaaaaagaagtcacgacaaggaaaacttgtgaaacagtttgcaaaaatagaggaatctactccagtgcacgattctcctggaaaagacgacgcggtaccagatttgatgggtccccattctgaccagggtgagcacagtggcactgtgggcgtgcctgtgagctacacagactgtgctccttcacccgtcggttgttcagttgtgacatcagatagcttcaaaacaaaagacagctttagaactgcaaaaagtaaaaagaagaggcgaatcacaaggtatgatgcacagttaatcctagaaaataactctgggattcccaaattgactcttcgtaggcgtcatgatagcagcagcaaaacaaatgaccaagagaatgatggaatgaactcttccaaaataagcatcaagttaagcaaagaccatgacaacgataacaatctctatgtagcaaagcttaataatggatttaactcaggatcaggcagtagttctacaaaattaaaaatccagctaaaacgagatgaggaaaatagggggtcttatacagaggggcttcatgaaaatggggtgtgctgcagtgatcctctttctctcttggagtctcgaatggaggtggatgactatagtcagtatgaggaagaaagtacagatgattcctcctcttctgagggcgatgaagaggaggatgactatgatgatgactttgaagacgattttattcctcttcctccagctaagcgcttgaggttaatagttggaaaagactctatagatattgacatttcttcaaggagaagagaagatcagtctttaaggcttaatgcctaagctcttggtcttaacttgacctgggataactactttaaagaaataaaaaattccagtcaattattcctcaactgaaagtttagtggcagcacttctattgtcccttcacttatcagcatactattgtagaaagtgtacagcatactgactcaattcttaagtctgatttgtgcaaatttttatcgtactttttaaatagccttcttacgtgcaattctgagttagaggtaaagccctgttgtaaaataaaggctcaagcaaaattgtacagtgatagcaactttccacacaggacgttgaaaacagtaatgtggctacacagtttttttaactgtaagagcatcagctggctctttaatatatgactaaacaataatttaaaacaaatcatagtagcagcatattaagggtttctagtatgctaatatcaccagcaatgatctttggctttttgatttatttgctagatgtttcccccttggagttttgtcagtttcacactgtttgctggcccaggtgtactgtttgtggcctttgttaatatcgcaaaccattggttgggagtcagattggtttcttaaaaaaaaaaaaaaaatgacatacgtgacagctcacttttcagttcattatatgtacgagggtagcagtgtgtgggatgaggttcgatacagcgtatttattgcttgtcatgtaaattaaaaaccttgtatttaactcttttcaatccttttagataaaattgttctttgcaagaatgattggtgcttattttttcaaaaatttgctgtgaacaacgtgatgacaacaagcaacatttatctaatgaactacagctatcttaatttggttcttcaagttttctgttgcacttgtaaaatgctacaaggaatattaaaaaaatctattcactttaacttataatagtttatgaaataaaaacatgagtcacagcttttgttctgtggtaacctataaaaaaagtttgtctttgagattcaatgtaaagaactgaaaacaatgtatatgttgtaaatatttgtgtgttgtgagaaatttttgtcataagaaattaaaagaacttaccaggaaggtttttaagtttagaaatattcatgccaataaaataggaaattataaatatatagttttaagcactgcatcagtgggagttcttggcttatgttagtttatgttagtttattatgaaaacatcaaagatttttttgactatattatcagttaaacaaaaaggagtcagatttaatttgttttttgaagcactttgagaaattaattttaattaacttaatgagcaaatttttattactactttatgttcaataccaggttcttttcatttctctggattattttgcaaatcattggacagagaatttgggaatataaatctgtaacaggtgtttgacaccagtaggtctctttatttctgggaaatgtgtacctgtactttctgatatacagtgttcctaagtaaaaatcaattcaggggatttgtatagtgtctataggaaagtagcccatgtcttgaaatatgaaaaggaatctgaaggtcatgaaaagtccagtggagaaaatctcaatgcttactgttactactaattgattcctactagtttccaggtttggg

SEQ ID NO: 56951 - DNA, 3228 bp, Homo Sapiens; identical to SEQ ID NO: 26610

SEQ ID NO: 56952 - DNA, 3740 bp, Homo Sapiens
agacctacccgggcgaagcgggcgagcggtggtttggacgccggcggagacgcgggcgagtggttagcaggaagaagatgagccttaagtctgaacgccgaggaattcatgtggatcaatcggatctcctgtgcaagaaaggatgtggttactacggcaaccctgcctggcagggtttctgctccaagtgctggagggaagagtaccacaaagccaggcagaagcagattcaggaggactgggagctggcggagcgactccagcgggaggaagaagaggcctttgccagcagtcagagcagccaaggggcccaatccctcacattctccaagtttgaagaaaagaaaaccaacgagaagacccgcaaggttaccacagtgaagaaattcttcagtgcatcttccagggtcggatcaaagaaggaaattcaggaagcaaaagctcccagtccttccataaaccggcaaaccagcattgaaacggatagagtgtctaaggagttcatagaatttctcaagaccttccacaagacaggccaagaaatctataaacagaccaagctgtttttggaaggaatgcattacaaaagggatctaagcattgaagaacagtcagagtgtgctcaggatttctaccacaatgtggccgaaaggatgcaaactcgtgggaaagtgcctccagaaagagtcgagaagataatggatcagattgaaaagtacatcatgactcgtctctataaatatgtattctgtccagaaactactgatgatgagaagaaagatcttgccattcaaaagagaatcagagccctgcgctgggttacgcctcagatgctgtgtgtccctgttaatgaagacatcccagaagtgtctgatatggtggtgaaggcgatcacagatatcattgaaatggattccaagcgtgtgcctcgagacaagctggcctgcatcaccaagtgcagcaagcacatcttcaatgccatcaagatcaccaagaatgagccggcgtcagcggatgacttcctccccaccctcatctacattgttttgaagggcaaccccccacgccttcagtctaatatccagtatatcacgcgcttctgcaatccaagccgactgatgactggagaggatggctactatttcaccaatctgtgctgtgctgtggctttcattgagaagctagacgcccagtctttgaatctaagtcaggaggattttgatcgctacatgtctggccagacctctcccaggaagcaagaagctgagagttggtctcctgatgcttgcttaggcgtcaagcaaatgtataagaacttggatctcttgtctcagttgaatgaacgacaagaaaggatcatgaatgaagccaagaaactggaaaaagacctcatagattggacagatggaattgcaagagaagttcaagacatcgttgagaaatacccactggaaattaagcctccgaatcaaccgttagcagctattgactctgaaaacgttgaaaatgataaacttcctccaccactgcaacctcaagtttatgcaggatgatcacaatttagtggagagtatttatttgagcctaaattgtaggtagcccttactacactcaactgattgggatctagaatgtaactaaattgcttataaatgtcagagcattttttaaaggtacagtatatggggattgtttcgtttttcctagcaggggaaccttagttaataataaaatactacttatttgagttactgatacagattcatttaaggcttgtgtgcaaattttgtctcaatcttttttccctccatgattttcctatgtgcttcctctggcattcactgtggttttggtaaataattgccttttaaaggattaaacaaatgaatgctacaaagtgtatgttcaagaaaattaaatggtaccactcttccacagtttggaataattttataattgtaaagatagaaattatattgataagtaaatatgtaaaattgtaaatatgtaaaaaaaagaatggtgtctgctgtgcatggcattttatatgttaattttttagtttaaaatgaagtatattgaatgtttgcctttagcaccattttatttggtttgtcccactaaaatgactcgagaagtgtttagacaaactccccttaagatgtgcactccatctttaagaacgtgttagccttaactttgaggttctatatagtcagagactatgacaccactaagattcagaataaagtttaggccacataaaattgctgtttaatgtagtcgatggaagactttaaactatgcttctagcttatttttccctcattcattcagcaaatctctattgagttcttcagtgagaaggagcaggcactgggcctggaatggaaggcgggaatgaatgggcctctgatggtgagaggtgacggggtccctcagctgtgagatgcaaggggcgccttgcagcctccataatatacatttgactttgcaaacgtctagacatgttttctgaacctttttcaggacatttcaacctcgggactattcatattagtggcctgagaggtgtttgttgtggggccaccctgtgcatggtagaatgttcagcagcattcctgccatccatatccattaggtgccagtagcacccccgctagagctgtgaaaaattctctccagacatagtcagatgtctcctggggccatatcacccctccgttaagaaccactgatgtcttttacaaaccaggagttatcctcctggtggttaatatggtgtaaccaaagaatcttgcactcaatgcacagtgtgatgttaactaaaacgagttaaatatttaggaggcttgacagctacctgcattgtagaaccttttcttatctcagtggaaccttctataacctaaatataccattgatgattcttcttccattcagtgacatccacagattatgcagctatacttgtgaaatcgtgcatgaggccccagggcaccgttctagaacaacgtcacttcacacaggcagctgagaaaggttctcttgcttttccagtatcttcctaaggatggagcccaaaattgcagagcagtaactttggaataaaaccagggtgggtataaaacttcttattcttaaatttacatataagatctattaagcttgacacatctgtgtcatcacgcactgaagacaggaagcagttcactgagtcagctggttcccaagctcgcacagaaggtgataagttactatcaaatgccagtgagaatcttcttatagaataacctgggcccaagtgattttagtacaaaacttgcccttctttggtttaattttctatgtgcttttaggtgtgaatccagatatgcggtcttaattcctttggaaatacacagttcgtttagttactgtacactctgtttgttcaataaactgcatatcaacttcccacaaaagctgacttttttgggtctcttacatataaagtaggtcattgagttgatttttttggaggtatctcatattggtcgaattcttctggtatggactcttgccttatatagaggcttctatttctcttaagtcaccatcaatacaacggccggagtttctgtttttgcaataagaagatgttggtattttatgtagggtaaatgtgactggaatacacctttggaacggaattctttatcaataaagtttcacaatccgtccctcttccaaaaaaaaaa

SEQ ID NO: 56953 - DNA, 4266 bp, Homo Sapiens
ccgggctgtgagtctctcgccgccggaggaagatgaggctgaagattgggttcatcttacgcagtttgctggtggtgggaagcttcctggggctagtggtcctctggtcttccctgaccccgcggccggacgacccaagcccgctgagcaggatgagggaagacagagatgtcaatgaccccatgcccaaccgaggcggcaatggactagctcctggggaggacagattcaaacctgtggtaccatggcctcatgttgaaggagtagaagtggacttagagtctattagaagaataaacaaggccaaaaatgaacaagagcaccatgctggaggagattcccagaaagatatcatgcagaggcagtatctcacatttaagcctcagacattcacctaccatgatcctgtgcttcgcccagggatcctcggtaactttgaacccaaagaacctgagcctcctggagtggttggtggccctggagagaaagccaagccattggttttgggaccagaattcaaacaagcaattcaagccagcattaaagagtttggatttaacatggtggcaagtgacatgatctcactggaccgcaacgtcaatgacttacgccaagaagaatgcaagtattggcattatgatgaaaacttgctcacttcgagcgttgtcattgtcttccataatgaaggatggtcaaccctcatgagaacagtccacagtgtaattaaaaggactccaaggaaatatttagcagaaattgtgttaattgacgatttcagtaataaagaacacttaaaagaaaaactggatgaatatattaagctgtggaatggcctagtgaaggtatttcgaaatgaaagaagggaaggtttaattcaagcacgaagtattggtgctcagaaggctaaacttggacaggttttgatataccttgatgcccactgtgaagtggcagttaactggtatgcaccacttgtagctcccatatctaaggacagaaccatttgcactgtgccgcttatagatgtcataaatggcaacacatatgaaattataccccaagggggtggtgatgaagatgggtatgcccgaggagcatgggattggagtatgctctggaaacgggtgcctctgacccctcaagagaagagactgagaaaaacaaaaactgaaccgtatcggtccccagccatggctgggggattatgtgccattgaacgagagttcttctttgaattgggtctctatgatccaagtctccagatttggggtggtgaaaactttgagatctcatacaagatatggcagtgtggtggcaaattattatttgttccttgttctcgtgttggacatatctaccgtcttgagggctggcaaggaaatcctccgcccatttatgttgggtcttctccaactctgaagaattatgttagagttgtggaggtttggtgggatgaatataaagactacttctatgctagtcgtcctgaatcgcaggcattaccatatggggatatatcggagctgaaaaaatttcgagaagatcacaactgccaaagttttaagtggttcatggaagaaatagcttatgatatcacctcacactaccctttgccacccaaaaatgttgactggggagaaatcagaggcttcgaaactgcttactgcattgatagcatgggaaaaacaaatggaggctttgttgaactaggaccctgccacaggatgggagggaatcagcttttcagaatcaatgaagcaaatcaactcatgcagtatgaccagtgtttgacaaagggagctgatggatcaaaagttatgattacacactgtaatctaaatgaatttaaggaatggcagtacttcaagaacctgcacagatttactcatattccttcaggaaagtgtttagatcgctcagaggtcctgcatcaagtattcatctccaattgtgactccagtaaaacgactcaaaaatgggaaatgaataacatccatagtgtttagagagaaaaaaataaaccaataacctacctactgacaagtaaatttatacaggactgaaaaccgcctggaaacctgctgcaactattgttattaactctgtatagctccaaacctggaacctcctgatcagtttgaaggacattgataaactgtgattttacaataacattatcatctgcagttactgtttacaagactgctttttaccttaaactttgtagatgtttacatcttttttgttgtgttttaaagatgatgttggtaatttgtgccttttagctctgttttattaaacagagttaaagcatgttgtcttctttgggattacactcaggggttctgaaaggcagtttgatttttatttttaacacacttgaaaaaaggttggagtaaccagactttcatatataacttggtgattatcaacctgttgtgtctttatttaattttacatctttttgaagcactgccacaggttattagccaaggtggccttccttcacagtcatgctgcttttttgaaaggtgaatttcaacacatttagtgcctctttcatttctcagtatatatttcaagagcttgtgatgaaatctataggatggtaatgatggacttgtcacctgtatggggaatacttttactactcagaaatgaatttatgtgctgccatttgctataaagttgaactttgtatggcttgaaaaagaaatgaccatatggaacatcccaaggctgtcccataagggttggaagttgtgtagcattcactcccttacctactggcattcccagtgccctctgtccatacctacttctaggattgcaaagggagtcttccaactagaagaaaaattgtccactgacatttgggatttacttttctccaatacctgccaatacagaaaactattatcagttgttattgttatcccttgaaaagcgagggtgacaaaaacaacaaaacaccgttataaacacatcaaaggttcattctgactgaggtaagactttccaagcccttgttagattaggccttataaaacttgtgtgcattataacctaagctgtgcaacctggtgaagccaagagtgaactgatgtttcatttatattttcatccaaatgacattatctgcacgtttttaaaatttaaaaacaaaggactatttaaaaatacagtttattaacaaacgtgaaactactttctgttacattaggtgttccctagtgtttcttaatttctttttagaaagtgtatttttattagtatttttccggtgaacagaagatttgtttggatttaaacatttactaagacagtacctattaggaaaaccaaatattgcaaatggtcaattcgattttaatttctcaaaagatactctgttatccagaagattaaaatgcctacattgagtgcttaaaaaaaaaaacaactgtgatgatgtgagcagaatggcaagtaagttaagcatttttgatcctgtaatcatggtatcattacaatgaaaggaattcacaaactactgccagaggaagtttgttttttaatttaagagggaaatataacctataaatttgtttcttccaagcttagctcttaaatttgggagactcaaagttaaacatcctcaacagagttttatttataattttgaattgtcaatttgtattttgctactgatctgtgatcaaccattttaactttcatctctagggatgtttaacatttataattgcaaaataaaccaactataaaaaaagaaactaagagagaattggtactttaattacttgtgtgtttgcaaataggctccattttccatgttgagtagattataaccttattaactaggcataggcctaagaaaggtggcaatgaactgtgcatgtaaattttaaatgggtactttgtgcaattcgttaaaagaagatactctatgaatatgattctatatattgaaatcagaaaacctaccaaacaaaaacatcagaagctgctgccataatgactattttctactgtaggctgctttggaaataattcccatatccttgctttgtaagttggtaatatcactatgcatttctacacattttataaatttgatttatgcagattttgatacactgtatgtttctgtagaaattgtataaatattcaaaattttattaggataaatttgagaaacttacgtatatcttaattctgggttgcttgttttttaggtgacaaaaataaaatattgtattttaattc

SEQ ID NO: 56954 - DNA, 2986 bp, Homo Sapiens; identical to SEQ ID NO: 27935

SEQ ID NO: 56955 - DNA, 13295 bp, Homo Sapiens
tgcagcgctggtcgcagccctcagctgcgccgggcggttccggctcctccctctccttgtgcctcagcgccaccatggtgctggagtcggtggtcgcggacttgctgaaccgcttcctgggggactatgtggagaacctgaacaagtcccagctgaagctgggcatctggggcggaaatgtggctttagataatctacagataaaagaaaatgccctgagtgaattggatgttccttttaaagtcaaggctggccaaattgataaattaactttgaagattccttggaagaacctttatggagaagcagttgttgcgaccctggaaggattatacctgcttgttgtccctggagcaagtattaagtatgatgctgtaaaagaagaaaaatccttgcaggatgttaaacagaaagagctatcccgaattgaagaagcccttcaaaaagcagcagaaaaagataagccaaaagaagccaaaaaggatacatttgtggaaaaattggcaactcaagtaataaaaaatgtacaagtaaaaatcacagatattcacattaaatatgaagatgatgtcactgatccaaagcggcctctttcatttggtgtcacactgggagagcttagtctactgactgcaaatgaacactggactccatgcatattaaatgaagcagacaaaattatatacaagcttatacgacttgatagtcttagcgcctactggaatgtaaattgcagcatgtcttaccagagatcaagggaacagattttggatcagctgaaaaatgaaattcttacaagtggaaatatacccccaaattatcaatacattttccagccaatatcagcctctgcaaaactctacatgaatccttatgcagaatcagagctcaaaacgcccaaactggattgcaacatagaaatacaaaatattgccattgaactgaccaaacctcagtacttaagtatgattgaccttttggagtcagtggattatatggttaggaatgcgccttataggaaatacaagccttatttaccacttcataccaatggtcgacgatggtggaaatatgcaattgattctgttcttgaagttcatataagaaggtatacacagatgtggtcatggagtaacataaaaaagcacaggcagttactcaagagttataaaattgcctacaaaaacaagttaacacagtctaaagtctcagaagaaatacagaaagaaattcaggacttggagaagactctagatgtttttaacataattttagcaaggcaacaagcacaagttgaggtgattcggtctgggcaaaaattaaggaaaaagtctgctgacacaggcgagaaacgtggaggctggtttagtgggttgtggggtaagaaagagtctaagaaaaaggacgaagaatcattgattcctgaaactattgatgaccttatgactccagaggaaaaagataaactcttcactgccattggttatagtgagagtacccacaacctaactttacctaagcagtatgttgcccatattatgaccctgaagttagtaagcacctctgttacgataagagaaaacaagaatattccagaaatactaaaaattcagataattggcctgggcactcaagtatctcagcgaccaggagcacaagcacttaaggtagaagcgaaattagaacactggtatataacaggtttgagacagcaggatattgtgccatcacttgtggcttcaattggtgacactacatcatccttgcttaaaattaaatttgaaaccaatccggaggatagtcctgctgaccagactctgattgttcagtcccagcctgtggaggtcatctatgatgctaaaactgtcaatgcagtggttgaattctttcaatcaaataagggattggatcttgagcaaataacatcagcaacattgatgaagctggaagaaattaaggagagaacagctacaggacttacacatattattgaaactcgaaaagtccttgatttaaggataaatctgaagccttcttatctagtagttccacagacgggtttccaccatgaaaagtcagatcttctgattttagattttggtacatttcagctcaacagtaaagatcaaggtttacagaagactactaattcatctctggaagaaataatggataaggcatatgacaagtttgatgttgaaataaaaaatgtacaactactttttgcaagagcagaggaaacctggaaaaagtgtcgatttcagcatccatcaactatgcatatattgcaacccatggatattcatgttgagttggctaaggccatggtagaaaaagacattagaatggccagatttaaagtgtcaggaggacttcctttgatgcatgtgagaatttctgaccagaagatgaaagatgtgctatatttgatgaacagtatacctttgccacagaaatcatcagcccagtctccagagagacaggtatcctcaattcctattatttcaggtggtacaaaaggtctacttggtacttcactattgctagacactgtggaatcagagtctgatgatgagtattttgatgctgaagatggagaaccacagacttgtaaaagtatgaaaggatcagaacttaaaaaagctgcagaggtcccaaatgaggagctcatcaatcttctactcaagtttgaaattaaagaagtgattttggaatttactaaacagcagaaagaagaagatacaattctagtatttaatgttactcagttaggaacagaggccacaatgagaacatttgacttaactgtggtatcttatttaaagaaaatcagcttggattatcatgaaattgaaggatccaaaaggaagccccttcacttgattagctcttctgacaaacctggattagatcttttgaaagtggagtatattaaggctgataagaatggacctagttttcaaactgcttttggaaaaactgaacaaacagttaaggtggccttttcatctttaaatctgttgctgcaaacacaagctcttgtcgcttctattaattacctcacaaccattattccatctgatgatcaaagcataagtgttgctaaggaggtacaaatttcaactgaaaaacaacaaaaaaattcaactctgccaaaagcgattgtatcctccagagatagtgacattattgatttcaggctatttgccaagttgaatgctttctgtgtcattgtttgcaacgaaaagaacaatatcgccgaaatcaagattcaaggactggattcctccctttctctccagtcaagaaagcagtcactttttgcccgactagaaaatattattgtcacagatgttgatccaaagacagttcataagaaagctgtgtcaataatgggaaatgaagttttccgttttaatttggatttgtatccagatgctactgagggggatttgtatactgacatgtccaaagtggatggtgtgctgtctctgaatgttggctgtattcagattgtctatcttcataaattccttatgtcacttctgaacttcctgaataatttccagacagccaaagagtctctgagtgctgccactgcccaggctgcagaaagggctgccacaagtgtgaaagatcttgcccagaggagttttcgtgtttccatcaatattgatttgaaagcaccggttatagtcatcccacagtcttctatttccaccaatgcagtagtggtagatcttgggttaatcagagttcataatcagttcagtctggtgtctgatgaagactacttaaatcctccagtaattgatagaatggatgtgcagctaacaaagcttacactttataggacagtgatccagccaggcatctaccatcctgatattcagctgttgcacccaattaacttggaatttcttgtaaatcggaatctagctgcatcttggtaccacaaggtgcctgttgtggaaattaaaggacatcttgattcaatgaatgttagtctaaatcaagaagatcttaatcttttatttaggatactaacagaaaatctctgtgagggtactgaagacttggataaagtgaaaccaagagtacaagagacaggtgaaattaaagagccccttgaaatctctatatcacaagatgtacatgattcaaaaaatactttaacaactggagtggaagaaattaggtctgtagacatcattaatatgctgctgaattttgaaattaaagaggttgtggttactttgatgaaaaaatcagaaaagaaaggaaggcctttacatgagctaaatgtcctgcaacttggaatggaagctaaagttaaaacctatgacatgactgctaaagcttatctaaaaaaaattagtatgcagtgctttgatttcactgactctaaaggggaacctcttcacattattaactcttctaatgtgactgacgaaccccttctgaaaatgttactgacaaaggcagacagtgatggaccagaatttaaaactattcatgacagtaccaaacagagactgaaggtttcatttgcatccttagacttagtacttcatttggaagctttactttccttcatggattttttatcatctgctgctccattctctgagccttcctcttctgagaaggaatccgagctgaaaccacttgtgggggagtccagaagtatcgctgtcaaagctgtatccagcaacatttcccaaaaggatgtgtttgatttaaagatcacagctgaattaaatgcatttaatgtctttgtctgtgatcagaagtgtaacattgcagatattaaaatacatggaatggatgcctctatttctgtgaagcctaagcagactgatgtgtttgccagacttaaagatattatagttatgaatgtagatttgcagtccattcacaaaaaggctgtctctattttgggagatgaagtctttaggttccaactgactctttatccagatgccacagaaggagaggcctatgctgatatgtccaaagtagacggcaaacttagttttaaagtgggttgtattcagattgtttatgttcataaattcttcatgtctcttttgaacttcctcaacaatttccaaactgctaaagaagctttgagtacagccacagtccaggctgcagaaagagctgcttccagcatgaaagacttggctcaaaagagtttccgccttttgatggatattaatttgaaagcaccagttattattattcctcagtcttcagtatcacctaatgctgttatagcagatctgggtttaatcagagttgaaaacaagtttagcttggttcctatggaacattattctcttcctccagtcattgataaaatgaacatcgaactcactcagttgaagctgtcaagaactattttgcaggctagcttgccacaaaatgacattgaaattttaaaaccagtcaacatgcttttgtccatacagcgaaacttagcagcagcatggtatgtgcaaattccagggatggagataaaaggaaaactaaaacctatgcaggttgctctcagtgaagatgacttgacagttttaatgaaaattttgctagaaaatcttggagaagcttcctcacaaccaagccctacacagtctgtgcaggagactgtaagagtgagaaaagttgatgtttcaagtgtacctgaccatctcaaagaacaagaagattggacagactcaaagctctctatgaaccagattgtcagtctccaatttgactttcactttgaatctctttccattatcctttataacaatgatatcaaccaggaatctggagttgcatttcataatgacagtttccaacttggtgaactcagactacatcttatggcctcctcagggaagatgtttaaggatggctcaatgaatgtcagcgttaaacttaagacatgcacccttgatgatctcagagaaggaattgagagagcaacatcgagaatgattgacagaaagaatgaccaagataacaacagttctatgattgatataagttacaaacaagacaaaaatggaagtcaaattgatgctgttcttgacaagctgtatgtatgtgccagtgtggaatttctgatgactgtggcagatttctttatcaaagctgtgcctcagagtccagaaaatgtggcaaaagaaacacagattttaccaagacagactgccacagggaaggtcaagatagagaaagatgactctgttagaccaaatatgactttaaaggccatgatcacagatccagaagtggtatttgttgccagcctgacaaaggctgatgctcctgctctgacagcctcgtttcagtgcaacctttctctgtcaacatccaaactcgaacagatgatggaagcttctgtgagagatctgaaagtgctcgcttgcccttttctcagagaaaagagagggaaaaacattaccacagtcttgcagccctgttctttatttatggaaaaatgtacgtgggcttcaggaaagcaaaatataaatattatggttaaagaatttataattaagatttcacccataattcttaatactgtgttgacaatcatggctgcattgtctccaaaaacaaaagaagatggatccaaagatacgtctaaggaaatggaaaatctttggggtatcaaatcgattaatgattataacacttggtttcttggtgttgacacggcaacagaaataacggaaagcttcaaaggcattgaacattcactgatagaggaaaattgtggtgttgttgtagaatccattcaagttaccttagaatgtggccttggacatcgaactgtacctttattattggcagagtctaagttttcaggaaatattaaaaattggacttctctaatggctgctgttgctgacgtgacactacaggtgcactattacaatgagatccatgctgtctgggagccactgattgagagagtggaggggaagagacaatggaatttaaggcttgatgtaaagaagaacccagttcaggataaaagtttgctgccaggagatgattttattcctgagccacaaatggcaattcatatttcttcaggaaatacaatgaatataacaatatccaaaagttgtcttaatgttttcaacaatttagcaaaaggtttttcagagggcactgcttctacttttgactactctttaaaggacagagctccttttacggtaaaaaatgctgtaggtgttcccattaaggtgaagcccaattgtaatctcagagtaatgggcttccctgagaaaagtgatatttttgatgttgatgctggccagaatttggaactggagtatgccagcatggtaccttcaagtcaagggaacctatctatattgagccgtcaagaaagctccttcttcactctgaccattgtacctcatggatatacagaagttgcaaatatccctgtggccagacctggacggcgattgtataatgtacggaatcccaatgccagtcattctgactctgtcttggtacaaattgatgcaactgaagggaataaagtaattacccttcgctctcctctacagatcaaaaaccatttctccattgcatttatcatctataaatttgttaagaatgttaagctattggagcgcattgggatagccagacctgaagaggagttccatgttcctttagattcatatagatgtcaattgtttatccagccagctggaatcttagagcatcagtacaaagaatctaccacttatatttcctggaaggaagaacttcataggagcagggaagtcagatgcatgttgcagtgtccatcagtagaagtcagcttcttacctctcatagtgaatacagttgctctgcctgatgaattgagctacatatgtacacatggggaagactgggatgtagcttacattattcatctttatccttctctcactttgcggaatcttctcccatattccctaagatatttacttgagggaacagcagaaactcatgagctggcagaaggcagtactgctgatgttctgcattcgagaatcagtggtgaaataatggaattagtcctggtgaaataccagggcaaaaactggaatggacatttccgcatacgtgatacactaccagaattctttcctgtgtgtttttcttctgactccacagaagtgacgacagtcgacctgtcagtccacgtcaggagaattggcagccggatggtgctgtctgtctttagtccctattggttaatcaacaagactacccgggttctccagtatcgttcagaagatattcatgtgaaacatccagctgatttcagggatattattttattttctttcaagaagaagaacatttttactaaaaataaggtacaattaaaaatttcaaccagtgcctggtccagtagtttctcattggatacagtgggaagttatgggtgtgtgaagtgtcctgccaacaatatggagtacctggttggtgttagcatcaaaatgagcagtttcaacctttcacgaatagttaccctgactcccttttgtaccattgcaaacaagtcatcattagaactagaagttggcgagattgcatctgatggctcaatgccaactaataaatggaactatattgcttcttcagagtgccttccattttggccagaaagtttgtcaggcaaactttgtgtgagagtggtgggctgtgaaggatcttccaaaccattcttttataaccgacaggataatggcactttattgagcttagaagatctgaatgggggtatcttggtggatgtaaacactgccgaacattcaactgtcataactttttctgattaccatgagggatctgcacctgccttgataatgaaccatacaccatgggacatcctcacatacaaacagagtgggtcaccagaagaaatggtcttgctgccaagacaggctcgactttttgcctgggcagatcctactggtaccagaaaacttacatggacatatgcagcaaatgttggggaacatgatctgttaaaggatggatgtggacagtttccatatgatgcaaacatccagatacactgggtatcatttctggatgggcgccagagagttttgcttttcaccgatgatgttgccttggtttccaaagcactgcaggcagaagaaatggaacaggctgattatgaaataaccttgtctctccacagtcttgggctttcactggttaacaatgaaagcaagcaggaagtttcctatattgggataaccagttctggtgttgtttgggaggtgaaaccaaagcagaaatggaagccatttagtcaaaagcagataatcttattggaacaatcctatcagaaacatcaaatatcaagagaccatggctggattaagctagataataattttgaggtcaattttgataaagatccaatggaaatgcgcctccctattcgtagccctattaaacgagactttttatcaggaattcagattgaatttaagcagtcttctcaccagagaagtttaagggccaggttgtactggcttcaggttgataatcagttaccaggtgcaatgttccctgttgtatttcatcctgttgcccctccaaaatctattgctttagattcagagcccaagcctttcattgatgtgagtgtcatcacaagatttaatgagtacagtaaagtcttacagttcaagtattttatggtcctcattcaggaaatggccttaaaaattgatcaagggtttctaggagctattattgcactgtttaccccaacaacagaccctgaagctgaaagaagacggacaaagttaatccaacaagatattgatgctctaaatgcagaattaatggagacttcaatgactgatatgtcaattcttagtttctttgaacatttccatatttctcctgtgaagttgcatttgagtttgtctttgggttccggaggtgaagaatcagacaaagaaaaacaggaaatgtttgcagttcattctgtcaacttgctgttgaaaagcataggtgctactctgactgatgtggatgaccttatattcaaacttgcttattatgaaattcgatatcagttctacaagagagatcagcttatatggagtgttgttaggcattacagtgaacagttcttgaaacagatgtatgtccttgtattggggttagatgtacttggaaacccatttggattaattagaggtctgtctgaaggagttgaagctttattctatgaacccttccagggtgctgttcaaggccctgaagaatttgcagaggggttagtgattggagtgagaagcctctttggacacacagtaggtggtgcagcaggagttgtatctcgaatcaccggttctgttgggaaaggtttggcagcaattacaatggacaaggaatatcagcaaaaaagaagagaagagttgagtcgacagcccagagattttggagacagcctggccagaggaggaaagggctttctgcgaggagttgttggtggagtgactggaataataacaaaacctgtggaaggtgccaaaaaggaaggagctgctggattctttaaaggaattggaaaagggcttgtgggtgctgtggcccgtccaactggtggaatcgtagatatggccagtagtaccttccaaggcattcagagggcagcagaatcaactgaggaagtatctagcctccgtccccctcgcctgatccatgaagatggcatcattcgtccttatgacagacaggaatctgagggctctgacttacttgagaatcatatcaaaaagttggaaggagagacttaccgataccactgtgctattcctggaagcaagaagacaatccttatggttacaaataggcgagtgttgtgtataaaggaagttgaaatcctgggccttatgtgtgtagactggcaatgtccatttgaagattttgtatttcctcctagtgtcagtgaaaatgtgctaaaaatttcagttaaggaacagggtctgttccacaaaaaagacagtgccaatcaaggctgtgttcgaaaagtttacctgaaggacaccgccacagcagagagagcatgtaatgccattgaggatgcacagtcaacgagacagcagcaaaaattgatgaagcagtcatcagtgagacttctcagaccccaattgccatcttaatcacagacctcaggggctccaacagggagaaaaaacaatcactggtcttgtctataagtcactctgctttatcttgctaaagacaatttttcaagcaatcctttagttttagttttctggaatagctagtattgggttttctagttttttcaccttttagtttttactctaattttgtaaccatgtatatgctagcagtccacttctacgccaccacccaaatgggtcagacccttgaagaaacgtcacttcaaactcagaatgaaattttcattaatattaaaattgtgaagcaaaggtcaataggcttatatttaattaaagccttactgaagaataagaaatgagcttagaatgactagtgttctttgaaaggtttttttatttttgtttttttggggttttttttttttttgagaccgagtcttgctctgtcgcccaggctggaatgcagtggtgcgatcttggctcactgcaatctctgcctctcgggttcaagctgttctactgcctcagcctcctgagtagctgggattacaggtgtgtgccaccacgcctgggtaattttttttttttttgtatttttagtagagatgagtttcaccatgttggtcagtctagtctcgaactcctgaccttgtgatccgcatgcctcagcctcccaaagtgctgggattacaggcatgagccaccacggcccgccaaaaggctttaacccatgaacaaatgttggatcctgacattttgtttaagagtgatttgttcaataattgaactgagttaacattcttggtaaaccaggtaattgaatgaagaaaggtcactaaagggagaaatgacatgttttctattttcttttcatgaaaacactgtttttccccctaataaagcatattttactttggtgcttatttttcctccttgcagtctaataaaaaaatctggacaatcaaaccttaaaatagctacactctgccctctgtaatgtagcattcataaaaatttggaagtatttacatcctctttcaagatgagcttatatgacacaattattatttgctgatacatgaaaatactgcactttaagtttctcaagactctgaaatatgtaaaattcaatatttttatattcccagaaattgtttcttacaggttgaaagtcttttaagggcatcacaaattaacatttactcctaatgcacgcctagaatgtattttaaatacttactaagaagaatgaaaattctttggttgttttatatataaataaggcatatataatgacactgtgttctgtgagggagcaggccctgtgagaatcaattcaggacagtatttttttttgtcctttctccatccttgatcagagataaactattaaaactttaaaaaatactcaaaaatatgtaagttttttggttgaacctttagatttgctcataatgtttaacataacaacatttatttcaaatcactgaattcatggagatgtggacacgcttggtttgctctatttttgtttatgtgtgatagtggttctgtcatcatcattcatgttttttaaggcctggtcataaaactttaaattttactagtgttacttaatgtatattctaaaaagagaatgcagtaactaatgccctaaatgtttgatctctgtttgtcattactttttcaaaattatttttttctgtaaagtataatatataaaacttcttgcttaaattgaatttctatattagtggttaattgcagtttattaaagggatcattatcagtaatttcatagcaactgttctagtgttttgtgtttttaaaacagaattaggaatttgagatatctgattatatttttcatatgaatcacagctgttgacaatgtcccatatatttaagaaattatatcatactgatactatttgtaacattttgatttgatttaatctccagggacagaaataattcattggtaaagtgtaataatgcgttttttaaaaatgctttgagaggtaattacttgcatatgagagaaataaaacatttggcacattgtttacaggtgtgaaaaaaaaaaaaaaaaaaaaaaaa

SEQ ID NO: 56956 - DNA, 4046 bp, Homo Sapiens
gcggccgcactcagcgccacgcgtcgaaagcgcaggccccgaggacccgccgcactgacagtatgagccgcacagcctacacggtgggagccctgcttctcctcttggggaccctgctgccggctgctgaagggaaaaagaaagggtcccaaggtgccatccccccgccagacaaggcccagcacaatgactcagagcagactcagtcgccccagcagcctggctccaggaaccgggggcggggccaagggcggggcactgccatgcccggggaggaggtgctggagtccagccaagaggccctgcatgtgacggagcgcaaatacctgaagcgagactggtgcaaaacccagccgcttaagcagaccatccacgaggaaggctgcaacagtcgcaccatcatcaaccgcttctgttacggccagtgcaactctttctacatccccaggcacatccggaaggaggaaggttcctttcagtcctgctccttctgcaagcccaagaaattcactaccatgatggtcacactcaactgccctgaactacagccacctaccaagaagaagagagtcacacgtgtgaagcagtgtcgttgcatatccatcgatttggattaagccaaatccaggtgcacccagcatgtcctaggaatgcagccccaggaagtcccagacctaaaacaaccagattcttacttggcttaaacctagaggccagaagaacccccagctgcctcctggcaggagcctgcttgtgcgtagttcgtgtgcatgagtgtggatgggtgcctgtgggtgtttttagacaccagagaaaacacagtctctgctagagagcactccctattttgtaaacatatctgctttaatggggatgtaccagaaacccacctcaccccggctcacatctaaaggggcggggccgtggtctggttctgactttgtgtttttgtgccctcctggggaccagaatctcctttcggaatgaatgttcatggaagaggctcctctgagggcaagagacctgttttagtgctgcattcgacatggaaaagtccttttaacctgtgcttgcatcctcctttcctcctcctcctcacaatccatctcttcttaagttgatagtgactatgtcagtctaatctcttgtttgccaaggttcctaaattaattcacttaaccatgatgcaaatgtttttcattttgtgaagaccctccagactctgggagaggctggtgtgggcaaggacaagcaggatagtggagtgagaaagggagggtggagggtgaggccaaatcaggtccagcaaaagtcagtagggacattgcagaagcttgaaaggccaataccagaacacaggctgatgcttctgagaaagtcttttcctagtatttaacagaacccaagtgaacagaggagaaatgagattgccagaaagtgattaactttggccgttgcaatctgctcaaacctaacaccaaactgaaaacataaatactgaccactcctatgttcggacccaagcaagttagctaaaccaaaccaactcctctgctttgtccctcaggtggaaaagagaggtagtttagaactctctgcataggggtgggaattaatcaaaaacctcagaggctgaaattcctaatacctttcctttatcgtggttatagtcagctcatttccattccactatttcccataatgcttctgagagccactaacttgattgataaagatcctgcctctgctgagtgtacctgacagtagtctaagatgagagagtttagggactactctgttttagcaagagatattttgggggtctttttgttttaactattgtcaggagattgggctaaagagaagacgacgagagtaaggaaataaagggaattgcctctggctagagagtagttaggtgttaatacctggtagagatgtaagggatatgacctccctttctttatgtgctcactgaggatctgaggggaccctgttaggagagcatagcatcatgatgtattagctgttcatctgctactggttggatggacataactattgtaactattcagtatttactggtaggcactgtcctctgattaaacttggcctactggcaatggctacttaggattgatctaagggccaaagtgcagggtgggtgaactttattgtactttggatttggttaacctgttttcttcaagcctgaggttttatatacaaactccctgaatactctttttgccttgtatcttctcagcctcctagccaagtcctatgtaatatggaaaacaaacactgcagacttgagattcagttgccgatcaaggctctggcattcagagaacccttgcaactcgagaagctgtttttatttcgtttttgttttgatccagtgctctcccatctaacaactaaacaggagccatttcaaggcgggagatattttaaacacccaaaatgttgggtctgattttcaaacttttaaactcactactgatgattctcacgctaggcgaatttgtccaaacacatagtgtgtgtgttttgtatacactgtatgaccccaccccaaatctttgtattgtccacattctccaacaataaagcacagagtggatttaattaagcacacaaatgctaaggcagaattttgagggtgggagagaagaaaagggaaagaagctgaaaatgtaaaaccacaccagggaggaaaaatgacattcagaaccagcaaacactgaatttctcttgttgttttaactctgccacaagaatgcaatttcgttaacggagatgacttaagttggcagcagtaatcttcttttaggagcttgtaccacagtcttgcacataagtgcagatttggctcaagtaaagagaatttcctcaacactaacttcactgggataatcagcagcgtaactaccctaaaagcatatcactagccaaagagggaaatatctgttcttcttactgtgcctatattaagactagtacaaatgtggtgtgtcttccaactttcattgaaaatgccatatctataccatattttattcgagtcactgatgatgtaatgatatattttttcattattatagtagaatatttttatggcaagatatttgtggtcttgatcatacctattaaaataatgccaaacaccaaatatgaattttatgatgtacactttgtgcttggcattaaaagaaaaaaacacacatcctggaagtctgtaagttgttttttgttactgtaggtcttcaaagttaagagtgtaagtgaaaaatctggaggagaggataatttccactgtgtggaatgtgaatagttaaatgaaaagttatggttatttaatgtaattattacttcaaatcctttggtcactgtgatttcaagcatgttttctttttctcctttatatgactttctctgagttgggcaaagaagaagctgacacaccgtatgttgttagagtcttttatctggtcaggggaaacaaaatcttgacccagctgaacatgtcttcctgagtcagtgcctgaatctttattttttaaattgaatgttccttaaaggttaacatttctaaagcaatattaagaaagactttaaatgttattttggaagacttacgatgcatgtatacaaacgaatagcagataatgatgactagttcacacataaagtccttttaaggagaaaatctaaaatgaaaagtggataaacagaacatttataagtgatcagttaatgcctaagagtgaaagtagttctattgacattcctcaagatatttaatatcaactgcattatgtattatgtctgcttaaatcatttaaaaacggcaaagaattatatagactatgaggtaccttgctgtgtaggaggatgaaaggggagttgatagtctcataaaactaatttggcttcaagtttcatgaatctgtaactagaatttaattttcaccccaataatgttctatatagcctttgctaaagagcaactaataaattaaacctattctttcaaaaaaaaa

SEQ ID NO: 56957 - DNA, 8256 bp, Homo Sapiens; identical to SEQ ID NO: 30601

SEQ ID NO: 56958 - DNA, 9926 bp, Homo Sapiens; identical to SEQ ID NO: 23432

SEQ ID NO: 56959 - DNA, 2794 bp, Homo Sapiens; identical to SEQ ID NO: 30367

SEQ ID NO: 56960 - DNA, 4221 bp, Homo Sapiens; identical to SEQ ID NO: 23288

SEQ ID NO: 56961 - DNA, 3840 bp, Homo Sapiens
gcgccggggccggcgatgagcgcgaggagccggcatgagcgcagacagcagccctctcgtgggcagcacgcccaccggttatgggaccctgacgatagggacatcaatagatcccctcagctcctcagtttcatccgtgaggctcagcggctactgtggcagtccatggagggtcatcggctatcacgtcgtggtctggatgatggctgggatccctttgctgctcttccgttggaagcccctgtggggggtgcggctgcggctccggccctgcaacctggcccacgccgaaacactcgttatcgaaataagagacaaagaggatagttcctggcagctcttcactgtccaggtgcagactgaggccatcggcgagggcagcctggagccgtccccacagtcccaggcagaggatggccggagccaggcggcagttggggcggtaccagagggtgcctggaaggatacggcccagctccacaagagcgaggaggcggtgagtgtcggacagaagcgggtgctgcggtattacctcttccagggccagcgctatatctggatcgagacccagcaagccttctaccaggtcagcctcctggaccatggccgctcttgtgacgacgtccaccgctcccgccatggcctcagcctccaggaccaaatggtgaggaaggccatttacggccccaacgtgatcagcataccggtcaagtcctacccccagctgctggtggacgaggcactgaacccctactatgggttccaggccttcagcatcgcgctgtggctggctgaccactactactggtacgccctgtgcatcttcctcatttcctccatctccatctgcctgtcgctgtacaagaccagaaagcaaagccagactctaagggacatggtcaagttgtccatgcgggtgtgcgtgtgccggccagggggagaggaagagtgggtggactccagtgagctagtgcccggagactgcctggtgctgccccaggagggtgggctgatgccctgtgatgccgccctggtggccggcgagtgcatggtgaatgagagctctctgacaggagagagcattccagtgctgaagacggcactgccggaggggctggggccctactgtgcagagacacaccggcggcacacactcttctgcgggaccctcatcttgcaggcccgggcctatgtgggaccgcacgtcctggcagtggtgacccgcacagggttctgcacggcaaaagggggcctggtgagctccatcttgcacccccggcccatcaacttcaagttctataaacacagcatgaagtttgtggctgccctctctgtcctggctctcctcggcaccatctacagcatcttcatcctctaccgaaaccgggtgcctctgaatgagattgtaatccgggctctcgacctggtgaccgtggtggtgccacctgccctgcctgctgccatgactgtgtgcacgctctacgcccagagccgactgcggagacagggcattttctgcatccacccactgcgcatcaacctggggggcaagctgcagctggtgtgtttcgacaagacgggcaccctcactgaggacggcttagacgtgatgggggtggtgcccctgaaggggcaggcattcctgcccctggtcccagagcctcgccgcctgcctgtggggcccctgctccgagcactggccacctgccatgccctcagccggctccaggacacccccgtgggcgaccccatggacttgaagatggtggagtctactggctgggtcctggaggaagagccggctgcagactcagcatttgggacccaggtcttggcagtgatgagacccccactttgggagccccagctgcaggcaatggaggagcccccggtgccagtcagcgtcctccaccgcttccccttctcttcggctctgcagcgcatgagtgtggtggtggcgtggccaggggccactcagcccgaggcctacgtcaaaggctccccggagctggtggcagggctctgcaaccccgagacagtgcccaccgacttcgcccagatgctgcagagctatacagctgctggctaccgtgtcgtggccctggccagcaagccactgcccactgtgcccagcctggaggcagcccagcaactgacgagggacactgtggaaggagacctgagcctcctggggctgctggtcatgaggaacctactgaagccgcagacaacgccagttatccaggctctgcgaaggacccgcatccgcgccgtcatggtgacaggggacaacctgcagacagcggtgactgtggcccggggctgtggcatggtggccccccaggagcatctgatcatcgtccacgccacccaccctgagcggggtcagcctgcctctctcgagttcctgccgatggagtcccccacagccgtgaatggcgttaaggatcctgaccaggctgcaagctacaccgtggagccagacccccgatccaggcacctggccctcagcgggcccacctttggtatcattgtgaagcacttccccaagctgctgcccaaggtcctggtccagggcactgtctttgcccgcatggcccctgagcagaagacagagctggtgtgcgagctacagaagcttcagtactgcgtgggcatgtgcggagacggcgccaatgactgtggggccctgaaggcggctgatgtcggcatctcgctgtcccaggcagaagcctcagtggtctcacccttcacctcgagcatggccagtattgagtgcgtgcccatggtcatcagggaggggcgctgttcccttgacacttcgttcagcgtcttcaagtacatggctctgtacagcctgacccagttcatctccgtcctgatcctctacacgatcaacaccaacctgggtgacctgcagttcctggccatcgacctggtcatcaccaccacagtggcagtgctcatgagccgcacggggccagcgctggtcctgggacgggtgcggccaccgggggcgctgctcagcgtgcccgtgctcagcagcctgctgctgcagatggtcctggtgaccggcgtgcagctagggggctacttcctgaccctggcccagccatggttcgtgcctctgaacaggacagtggccgcaccagacaacctgcccaactacgagaacaccgtggtcttctctctgtccagcttccagtacctcatcctggctgcagccgtgtccaagggggcgcccttccgccggccgctctacaccaatgtgcccttcctggtggccctggcgctcctgagctccgtcctggtgggccttgtcctggtccccggcctcctgcaggggccgctggcgctgaggaacatcactgacaccggcttcaagctgctgctgctgggtctggtcaccctcaacttcgtgggggccttcatgctggagagcgtgctagaccagtgcctccccgcctgcctgcgccgcctccggcccaagcgggcctccaagaagcgcttcaagcagctggaacgagagctggccgagcagccctggccgccgctgcccgccggccccctgaggtagtgcaggcccacgggcaccccagacactggaactccctgcctctgagccaccaactggacccctctccagcaacaccaccgccaccacctcccacatccctgaggttggcgactgtctacactcctcccccgagaccacccccaccctggggaagcgttgactactgtcccctaccttggaccatcccgcgtaggggtggcagcccccagctcccctcagtgctgctgtcagtgtagcaaataaagtcatgatattttcctggc

SEQ ID NO: 56962 - DNA, 2845 bp, Homo Sapiens
aaaaaagcgggacaggtccagcggttgttctgtgtgaagtcgcgcggcttccacccacgcagtgttctaagtgaaggccagaaactcgctcgccatgtcggctgcagaggcggggggtgttttccacagagccaggggcaggaccctggacgcgtttcccgcagaaaaggaaagcgaatggaaaggcccattctacttcatcctgggcgcagacccacagtttgggctgatcaaggcctggtccactggggactgtgacaatggcggcgacgaatgggaacaggagatccgtctaactgagcaagccgtccaggccatcaacgagctgaaccccaaacccaaattcttcgttctgtgcggcgacctcatccacgccatgccagggaagccgtggcggacggagcagacggaggacctgaagcgagtgcttagggcagtggacagggccatcccactggtccttgtcagcggcaaccatgacattggcaacacccccacggccgagaccgtcgaggagttctgccggacttggggagatgactacttcagcttctgggtcgggggcgtcctgttcctggtcctcaactcccagttctacgagaacccctccaaatgccccagcctgaagcaggctcaggaccagtggctggacgagcagctgagcatcgcgaggcagcggcactgccagcatgccatcgtcttccagcacatcccgctgttcctggagagcatcgacgaggacgacgactactacttcaacctcagcaagtccactcggaaggagttggcagacaagttcatccacgcaggtgtcagagtcgtgttctcaggccactaccacaggaatgccgggggtacctaccagaacctcgacatggtggtgtcatctgccattggatgccagctgggcagagacccccacgggctccgagtcgtggtggtcaccgccgagaaaattgttcaccgatactacagtctagatgagctgagtgagaaaggaatagaagacgatctcatggatttgatcaagaaaaaatgacgctccttcccgttcccgttcacttttcacttgcactatttttttattttgccagaaacagcagctgcacacaacctcttgctgaaatataaaaatagcccaggcaggtttgtgaatttatgtccttttgcataaatcagagagctggggccctgtcctgaattatattcaaaatagaactgcatttcctttaaaatggagcgaatgatcctggaaatcagtttttaaaatattagactatctctgcatggatgtttgaataaattctcctaatgctgtgtttctcaactccacttttgaattggattgtattctggttagcatatggtcaaagtctgcctatcgacctcaattccaatctgacagccaagtatgatctttgataattccttaaacaaactacacctgattgtattaaattgtggtcacgattcccaaaacgctaggcaaaacaaagttcatctcctttcctttccagcggaacgaacagctgtctgccttgttgtgagagccatgcagacttattttgacaaggagccaagtaggcaccatttactgttcaattctgagacttctgatgataggaacagaatgcagttgatacagctcggagcttaaatttgccttcctgggtgcctagaaaagtcacctttgcacataaattggccatttctgaaaatctcctccaagagactgaaaccaaagctctaaaacgccgcttcttcagtctctggggagcacgttgagttggttcacatccacattctggctgtgtagccactccacagatgggtggtctcttgggatcagaatgcccctccactcatgagactctccattttgtccactttgacaggaaaagtgggaatgtatgcagagctctcaaaagaaacaaaaaaggccaaaacggtgccttcagccacatcctctgaattggccctgacttggactaaatgcactaatgcgaaatcccttgacaaaagcgcataggttatttcaaaccagcattgttttttatgtaacctgttttaccgcatcttctcagcagcttctgaccactgctcaattttctcctttacagccattgttctggtggacaaataacctaggtactccaaatcctggcaggaaaaatatacagcattatgaaacagcactcagtaatcctaaaatgatttccaaagctggttacacatgacctgcaaagtctattaaattaaaagactttctcattacagagtttagtcaacgtagcaaaaccatgggaaattaaatggaaagataattaaatatgtaaattcataaggaacaaaagacgagaagttaattatacaataggctggtgacaccagagttcattgttatgtgccacaagaaaattaaattttttaaaaaactagaacgctcttcttttagtgttttgctgaaatcctgttttgtatttgtttctttacaacaggtgtaggtataggaggtcaagaaaaggagttcggtaaagggcatagctaataacaaccacacattgggccaggcgcagtggcttacgcctgtaatcccagcactttgggaggctgagacgggcagatcacctgagatcaggagtttgagaacagcctggccaacatggtgaaactccatctctactaaaaatacaaaaattagccaggcatgctggtgcacacctgtaatcccagctactcgggaggctgaggcaggagatcgctggaactcaggaggcagaggttgcagtgagccaagatcatgccactgcactccagcctgggcaacagagcaagactctgtctc

SEQ ID NO: 56963 - DNA, 5862 bp, Homo Sapiens
gcgtccgagggagcgcgcgacgggccacgcacgtccgggcgtccagttcggggcagcttctccggctggtgggtgggtggggcagcctttcaggcagggtggcaaccaactatatctgaggaccagagccattttggggcaccagagcttgtgacctctccatctccacccagctgggtccaggggccactctcagcactcacctcagcagctgacatcataaagcagacttgggaacctggaagcactctggagaacctttccctgagacatggagctttggggccgaatgctgtgggccctcctgtctggcccagggaggaggggaagtacccggggctgggccttcagctcatggcaaccccaaccacctctggctgggttatccagtgccatagaactggtcagccactggactggggtctttgagaagaggggtatccctgaggcccgggaatccagtgagtacatcgtggctcatgtccttggagccaaaacatttcagagcctgaggccggcactttggacccagcccttgacctctcagcaactacagtgtatccgggagctgagtagccgtcgattgcagaggatgccggtgcagtacatccttggagagtgggacttccaggggctcagcctaaggatggtgcccccagtgtttattcctcggccagaaacagaggaactggttgagtgggtgctggaagaggtggcccagaggtcccatgctgtgggatccccaggcagccccctcattctggaggtgggctgcggatcaggagccatctccctcagcctgctgagccagctcccccagagccgagtcattgctgtggataagcgggaagctgctatctctctgacccatgagaatgctcagaggcttcggttgcaggacaggatttggatcatccacctcgacatgacctcagaaaggagctggacacacctgccctggggccccatggacctgattgtcagcaaccctccctacgtcttccaccaggacatggagcagctggcccctgagatccgcagctatgaagaccccgcggccctggatggtggggaggagggcatggacatcattacccacattctggccttggcaccccggctcctgaaagactctggtagtatcttcttagaagtggacccaaggcacccggagcttgtcagcagctggcttcagagccggcctgacctgtaccttaatcttgtggctgtgcgcagggacttctgtgggaggccccggttcctgcatatccggaggtctgggccatagcatggctgccctgtggatgccttgtcagtgccgccagcctgaccagaggggaggtggatggcactttccagagcccaggttcttatggcatttcccagggttctgtgatttccccatgctctgcatttctaggatatttctaggacacctggattggctccatcacatcagagtggctgagggcagttgctctgtgttggtgaaattgctgtgggggtatcgggggatatggccagtaaagtattgagagactaacaaatggtgacctaatgttttgtccatgacttgcaggtcccctgacccccttactcccaggtagcactggggcaagggtttccttctgccccagcagggctggccgtcagtcccctgcttggtagtggtgtgggggtgcagtgtggaggaaggcacgtgagtcctcactcctggccttggataccatgggtcctggcatagagcagctcactcccagggattgattagtcctccactgccctgggtgcatgcgtacacaattccctggccaagcctggctcgagcacaggaagctcatctgcgttttggctcaaggatgactgcctgctttctggaggggagggtctggaggtctttgctgcacagttcctgggtcgcacatccacgttcatttaactgaaggcttgagccagtgaggggtgtttcctttttatccccatagcttttagctaaaacatccctcccgagttgaccccctggggtttcaaataacccatgtgtccctggttggggctggggagagtgagaagctgagatactgggcacagggttgtggcctccaccccagctctggtctgtgcagactcatggccaccaggaggcctgcagatccagccttcctgtcaacagcgacaggaaatctctaggttggtgagtgctggtgatgtgagcctacatcagggtgggtcctaagaaacatggcaaaccaggctgtctcattccactagactgccccctgccaccctggcacttcccagggcctggcagtatggtctgatgggcagtatggtccaataggcagcatcctctgctgcagctgggagagctgagttccagggctgtgtcctgcagtgggaccttgggcaactcctttccctatgagaagctggctcttctgagtccagggccaacgccaactggcaacctctttactcttagtcaagtggaatgtgcatgctggcatctgaatgtccattcgccaggcatggagagcaagagaaggtatgtactgcctgaggtcacatgacagtgaccaagtggagacagtaagttagatccctccctttggggagcctatattgctggagtcatacccagcctaagtgttgccctgcactatggctggaggacacatttggtagaggtcacactgcagctcccagtgccccagtgtcctgccctgtgcccagccccagctgcatggactctgagctgcccctggcttcctttaaggaggctgctccagaaggaacctgggtggggagggcgaagggggtgcacaaccagggcaaggctccccacttccttagtcccccatgctcacagacctttgcctgctaaggtcctcaccagtattgccctttctgtctttctccttgtgccctttggctcttgctgtcttcagcagcatctcagggtagctgccctgacctcggagcagtctgtcgcccccctacacctcagccagtcctggcttccctgatggtctctccctcctggcctcaggcccattcctgaggaagggccttggcgagcttgtggatgttgcaccagaagagagtgcagtgttggagagtgacactgtcggggcagctggggccacaagcaggagccggcctcgggcacaactttctgcccagaaaaatgtgcagcttgactctgctgaggaaaaggtccaagccaagaggactggcaggcggggcctcaagcctgcagccactggcttgattgggccctggacgttgagcccagatgttggagccacaccagcctggatttcaatcccagaatctgcccctcaccaggatgtgaccttgggcagatgacttcacctcactcagccttggcttctaaggctgagaaatgggacttaatgctttattttataggatgcatgtgaggagcccatggaatgtgcctggcttggcacattgtggcatttttccttgccttcctcggagggcagacacagggaggaaggacccagtgccctcaggcgtccatctgatgcatgggaccaacataaggcaggcagggatacaaggcagtctggaaagaagggaaggcaggagtttcagtcttgggctcttgactcctcactgttgtctagagatggagccagcaggctggtagcctggcagcctacatctcccctcagcctctcctcactatggccccagtgccttgaggcccaggccagggcagccagtggctctagctcagggaaagccaggcccacctgccctatcccctcccttgctcctgaggccaaagccagagactcgaacagcctccccaccaccaccagcatatgtcaaggagcacttgcaggcagaatgggaggaggacatggagctgatggagtccaggctgtgcaagcccctgaggtcttgagagatgtgcccactgcccgtgcagcctccttcagccagagcccagagcatagacaggagtgtaggagtccctgtttgatgtactctgggagagtaattctatctcctcttctgatagttggggaaactgaggccttgtctcacagttggatgcttttcccagttgtcagtgggtttctccatgggtctcatacagctgccttattgaaataggccccgaaccccctaaatgcaaaaaatactcttttttgctcctttacccccacctggaccctgggctattggctgctcccaatccttgccccaaacacttagctggctccccatgacttaagtgtgttctcttgtgtcctatggaatccagttctgaagaggtgggggaggacaactgtgggaaaagccctgggggcccctcccaaggccccatcagtgctctgagtaggctgtcatcagaacaaagggctccactgctgacaaggtttgagaactgctggcttgaggtgagaacccctttaacctctgcgggacagcatgtctttccctatccaccttcgattcttttctcttttttttcttcattggctccttcttagtggattctcttctctactgccctgggcttcagcctttgtgcagtactctcgatgccctgaacacacaccttccctttgcccaggcggtgcaaacaatccacttcttcaagctccaacacaaatgctgcctcctttaggatgcctgctctgtgctctccctgcctcccctagcccatacctctgctggcaccttctgtaccatgccttcagaaaccttcttatccccctcatctctggggccccctgtggatctggcatacccaagttcagtaaatgtctatcagtaagctgatggtacatgcattttctagaatagagctgggacttcccatgtggcccacatctgacctggcagcccatgtattccggtcattagggatgggaagccatgaggacctggccttctgcccgacccaggcagccattcaagttgagcaatggccacttcgaagactcaagtgcacctgatccctgcgcaacagccacaccaggagaacaggctgtccttggcggcagtaggagcaggcgccaggtttcctggagctcttggcttcagccagcccccagccagagtcctggctaggacagtgacctgatctcctcctcatgaccttctgccctggacaagccccctgaactggatttgggactgtcaaagcaactctacccctgctctggtaggctgaacagtgaccccccaaaatggcagtgtcttaatcacctaaaccttaacatgtgactatattaccttcacatagcaaaatggactttgcagatgtgattaaggatcttgagatggaaggagtatcctggatttttcaggtaaactgagtataatcacaagggcctctgtaaaggaggcaggagtgtcagagtgacggaagaaaatgtatgtaacaatggaagcagaggtcagagtgatgcaattgctggaggaagagccatgagccgaggaatgcagacagcctcttctcctctggggcctcaagaagaatgcagtcctgccaataccttgattttaagccctgtgaaactgatttcagattgctgacctccagaacagtaagatcataaatttgtgttgttttcacatgtgtgaaaacacatgtgtgataatttgttacagcagccacgggaaacgaatatagattgtggtgcccaaattagagtgctgctgtaacacacgcctactgattgaagtggctttggaattgcaacgtggaaatgggcagaggctggaagaattttgagagtcatgataaattgccttaaccacctctcttctgataggtgatgtggccaggggaactcttcctcaaccttcagacctaaa

SEQ ID NO: 56964 - DNA, 4461 bp, Homo Sapiens; identical to SEQ ID NO: 30613

SEQ ID NO: 56965 - DNA, 2065 bp, Homo Sapiens
gcagtcgctgccgaccggctggctgggccttgcggcgtgaggaccccggcggcgccgcagtcccgcgagccatggcccagtccggcggggaggctcggcccgggcccaagacggcggtgcagatccgcgtcgccatccaggaggccgaggacgtggacgagttggaggacgaggaggagggggcggagactcggggcgccggggacccggcccggtacctcagccccggctggggcagcgcgagcgaggaggagccgagccgcgggcacagtggcaccactgcaagtggaggtgagaacgagcgtgaggacctggagcaggagtggaagcccccggatgaggagttgatcaagaaactggtggatcagatcgaattctacttttctgatgaaaacctggagaaggacgcctttttgctaaaacacgtgaggaggaacaagctgggatatgtgagcgttaagctactcacatccttcaaaaaggtgaaacatcttacacgggactggagaaccacagcacatgctttgaagtattcagtggtccttgagttgaatgaggaccaccggaaggtgaggaggaccacccccgtcccactgttccccaacgagaacctccccagcaagatgctcctggtctatgatctctacttgtctcctaagctgtgggctctggccaccccccagaagaatggaagggtgcaagagaaggtgatggaacacctgctcaagctttttgggacttttggagtcatctcatcagtgcggatcctcaaacctgggagagagctgccccctgacatccggaggatcagcagccgctacagccaagtggggacccaggagtgcgccatcgtggagttcgaggaggtggaagcagccatcaaagcccatgagttcatgatcacagaatctcagggcaaagagaacatgaaagctgtcctgattggtatgaagccacccaaaaagaaacctgccaaagacaaaaatcatgacgaggagcccactgcgagcatccacctgaacaagtccctgaacaagagagtcgaggagcttcagtacatgggtgatgagtcttctgccaacagctcctctgaccccgagagcaaccccacatcccctatggcgggccgacggcacgcggccaccaacaagctcagcccgtctggccaccagaatctctttctgagtccaaatgcctccccgtgcacaagtccttggagcagccccttggcccaacgcaaaggcgtttccagaaagtccccactggcggaggaaggtagactgaactgcagcaccagccctgagatcttccgcaagtgtatggattattcctctgacagcagcgtcactccctctggcagcccctgggtccggaggcgtcgccaagccgagatggggacccaggagaaaagccccggtacgagtcccctgctctcccggaagatgcagactgcagatgggctacccgtaggggtgctgaggttgcccaggggtcctgacaacaccagaggatttcatggccatgagaggagcagggcctgtgtataaataccttctatttttaatacaagctccactgaaaaccaccttcgttttcaaggttctgacaaacacctggcatgacagaatggaattcgttcccctttgagagattttttattcatgtagacctcttaatttatctatctgtaatatacataaatcggtacgccatggtttgaagaccaccttctagttcaggactcctgttcttcccagcatggccactattttgatgatggctgatgtgtgtgagtgtgatggccctgaagggctgtaggacggaggttccctgggggaagtctgttctttggtatggaatttttctctcttctttggtatggaatttttcccttcagtgactgagctgtcctcgataggccatgcaagggcttcctgagagttcaggaaagttctcttgtgcaacagcaagtagctaagcctatagcatggtgtcttgtaggaccaaatcgatgttacctgtcaagtaaataaataataaaacacccaaaaaaaaaaaaaaaaaa

SEQ ID NO: 56966 - DNA, 3329 bp, Homo Sapiens; identical to SEQ ID NO: 26463

SEQ ID NO: 56967 - DNA, 2256 bp, Homo Sapiens; identical to SEQ ID NO: 29424

SEQ ID NO: 56968 - DNA, 3330 bp, Homo Sapiens
gcgacggcggcggctccaagatggcgcaggcgatctttgaggccctggagggaatggacaatcagaccgttctggctgtccagtcattattggatggccaaggagcagtccctgatccgacaggccagagtgtcaatgcgccccctgctatccagccattggatgacgaggatgtatttctctgcgggaagtgtaagaagcaattcaactcgctgccagcgtttatgacccacaagcgggaacagtgccaggggaatgcccccgccctggccacagtctcactggccaccaacagcatctacccaccttcggcagcacccacagcggtccagcaggccccaactcctgccaatcgccagatctccacatacatcacagtgcccccgtccccactgatccagaccctggtgcaggggaacatcttggtgagcgatgatgtgctcatgtctgccatgtcagccttcacatccctggaccagcccatgccccagggccccccacctgtgcagagcagcctgaacatgcattccgtgcccagctacctcacccagcctccacctcctcctccacctcctccaccactgcccccaccgccaccacctcagcctccaccacctccaccccagagcctgggcccccctgggcgtcccaaccctggtgggaacggtgtggtggaggtgtacagtgctgctgcgcccctggctgggagtggaacggtggagatccaggcactggggatgcagccctacccacccctagaggtgccaaaccagtgtgtggagcctccagtatatcccacccccacagtgtacagccctggcaaacagggattcaaacccaaaggaccaaaccccgccgcccccatgaccagcgccaccgggggcacggtggccacctttgactctccagcaacgctgaagacccgacgagctaaagctgcagggaagccaaaggctcagaaactcaagtgctcatactgtgacaagtcattcaccaaaaactttgacctgcagcagcacatccgaagccacaccggtgagaagcccttccagtgcattgcatgtggccgtgcctttgcccagaagtctaatgttaagaaacacatgcagacccacaaggtgtggcctccaggacacagtggtggcaccgtgtctcgaaactctgtgaccgtacaggtcatggccctgaaccccagcaggcaggaggacgaggaaagcacagggttgggccagcccctgccgggtgcgccacagccccaggccttgtccacagctggtgaggaagagggggacaagccggagtccaagcaggtggtcctcatcgacagctcctacctgtgccaattctgccccagcaaattcagcacctacttccagctcaagtctcacatgacccagcataagaatgagcaggtgtacaagtgtgtggtcaaaagctgtgcccagacgttcccaaagctcgacacatttctggagcacatcaagagccaccaggaggagctgagctaccgctgccacctctgcggcaaggacttcccctcgctgtacgacctgggcgtgcaccagtactcccacagcctcctgccacagcacagccccaagaaggacaatgccgtctacaagtgtgtcaaatgtgtcaacaaatactccacccctgaggccctggagcaccacctgcagaccgccactcacaacttcccctgcccacactgccagaaggtgtttccttgtgaacgctacctgcggcgtcatctgcccacccacggcagcgggggcaggttcaagtgccaagtgtgcaagaagttcttccggcgggagcattatctcaaactgcatgctcacatccactcgggtgagaagccctacaaatgctcagtgtgcgagtctgcgttcaaccgcaaggacaaactgaagagacacatgttgatccacgagcccttcaagaaatacaaatgccctttctcgacgcacacaggctgcagtaaggagttcaaccggccggacaagctgaaggcccacatcctctcccactctggcatgaagctccacaaatgcgccctgtgcagcaagtccttcagccgccgtgcccacctcgccgagcatcagcgcgcccacacgggcaactacaagttccgctgtgctggctgcgccaagggcttttcccgccacaaatacctcaaagatcaccgctgtcgtctcggcccccaaaaggacaaggacctgcaaacccggcggcccccccagaggagggcagccccccgcagttgcggcagtggtgggcgcaaggtgctgacccccttgcctgacccgctggggctggaggagctgaaggacacaggggctgggctggtgcccgaggctgtccccggcaagccgcccttcgcagagccggacgcggtgctgtccatcgttgtgggtggtgcggtgggcgcggaaactgagctggtggtacctggacacgctgaggggctgggctccaacctggctctggcggagctgcaggctggggccgagggcccatgtgccatgctcgctgtgcccgtctacatccaggcctccgagtgacggacctgaggtgtctgtttcctgggcaggcctgatgctcctgtttgggtccagggcccctgggggcagaccggtgatccttaccagtggaagcgagccatcgagccattggcagaaatcctgctgaatgtcattcagaaacctcagcccatggtcgccctcctgtgcccctctcctgccggaaagccctgcaacattctagggttgggggcagggccatccacggtttctgggcagagccatggtggcaggagagagatggctgaagcctgagcagcccagagtcccgctggtctaggctggtggtcggggcccctgggagaggagacagggcattcctccccactctgtctccaggctgcctctgggtagcctctagtctgctgttcttcaggaggcctgccataaactcttcggagtttacgtgttgcaccttttcacagacggttccccacagcatcctcagacagctctgtgatgtagcttttaggaggcactcaggtgtcacggctagactgcagctatgagacagatctggcttcaaatccaagagttgccatgcacttgctgtgtgaccttgggcaagtcacttcacttctctgagccccgtgttcctcatctgtacaatggggcttacgatactactacctcatagggttgtcctggggatccagtatgatgaagtgcgccaggggcttggcatggtgcccggcacgcagaaagtgctcaataaatgtttttgtcataacgtgaaaaaaaaaaaaaa

SEQ ID NO: 56969 - DNA, 2773 bp, Homo Sapiens
atgtgatgcatgctcacgtgtctccgcagccggctcgggaaagaatcccccaagctccatttcatgagtaagcgtgagagccgctcagtttcctccagctctgctgaagccagcacagaagtagcccaaactcttccctctgctgacagcaaattttaggcaaagtcttgagaaagaagaaattgggtccagaaagggaagtgaggagaatcagatcccagacctttggggagaaggagcaaccgcctctggcacagcccatcagggagaaagagcaggttgagaagagtcctaagctaacagccccaaacaggtgggtgttgctcagctccctgaggcatgtggttgtaaggcagaacccacagaccttgcaggaagaaggctctcggggccatggcccaggtcagcatcaacaatgactacagcgagtgggacttgagcacggatgccggggagcgggctcggctgctgcagagtccctgtgtggacacagcccccaagagtgagtgggaagcctctcctgggggtctggacagaggcaccacttccacacttggggccatcttcatcgtcgtcaacgcgtgcctgggtgcagggttactcaacttcccagcagccttcagcactgcggggggcgtggcagcaggcatcgcactgcagatgggtatgctggttttcatcatcagtggccttgtcatcctggcctactgctcccaggccagcaatgagaggacctaccaggaggtggtatgggctgtgtgtggcaagctgacaggtgtgctatgtgaggtggccatcgctgtctacacctttggcacctgcattgccttcctaatcatcattggcgaccagcaggacaagattatagctgtgatggcgaaagagccggagggggccagcggcccttggtacacagaccgcaagttcaccatcagcctcactgccttcctcttcatcctgcccctctccatccccagggagattggtttccagaaatatgccagcttcctgagcgtcgtgggtacctggtacgtcacagccatcgttatcatcaagtacatctggccagataaagagatgaccccagggaacatcctgaccaggccggcttcctggatggctgtgttcaatgccatgcccaccatctgcttcggatttcagtgccacgtcagcagtgtgcccgtcttcaacagcatgcagcagcctgaagtgaagacctggggtggagtggtgacagctgccatggtcatagccctcgctgtctacatggggacaggcatctgtggcttcctgacctttggagctgctgtggatcctgacgtgctcctgtcctatccctcggaggacatggccgtggccgttgcccgagccttcatcatcctgagcgtgctcacctcctaccctatcctgcacttctgtgggcgggcggtggtggaaggcctgtggctgcgctaccagggggtgccagtggaggaggacgtggggcgggagcggcggcggcgagtgctgcagacgctggtctggttcctgctcaccctgctgctggcgctcttcatccctgacatcggcaaggtgatctcagtcattggaggcctggccgcctgcttcatcttcgtcttcccagggctgtgcctcattcaagccaaactctctgagatggaagaggtcaaaccagccagctggtgggtgctggtcagctacggagtcctcttggtcaccctgggagccttcatcttcggccagaccacagccaacgccatctttgtggatctcttggcataaccactgcctcccagggaacacaaggcctttgccattggtcgcaggaacccatctcttagagctatggggccattcttagtccacgatcattccaactggtgggatgacatccggacatcctcttccagggactggggcaaactcaggccccacacctctggacagctcaaatccagtccccttcctgctccccagtcctggcagtgccgtggatggcggcaggaagtctcacatcatagaggacccctcctcctctcccagttctcaacttctccatgcctggaatccacgggtgaagagagtcggtagatctcataagaaagaatccagtctgacttccctctggagaatgactatggacagaaggccaccatcctccacagagcaccctgtcctgagtaggggttgtgctcattaccccaggccagtggtagcttcctcaggagcctggccacttccaaaggtagcactgaagtcgtgcaaatacatagtcaggtagattcagaccttgtccacaccttcctgggcaacccccaccatgaacctgtcagcctctttcccatagctaatagacatttcccaggccttgaggggccccaccctgtctctttcatcaaacctgatggtccaggctgggcatccctctcctcctccatccccagacatcaccaggtctaatgtttacaaacggtgccagcccggctctgaagccaagggccgtcccgtgccacggtgctgtgagtattcctccgttagctttccccataaggttgggagtatctgcttttgtgtctgagatgggcccctcttttcagaggccgcagggtgggtgatggagaaggctgagaacctttcagaccctctgtgtgggctgggctggtcagaatcagggtgtacctccccgacaccttctttttcagtgatgttttctcttctccctgcctttcctctgcctcctcccctgccagccctagcgtgactacccagagac

SEQ ID NO: 56970 - DNA, 3743 bp, Homo Sapiens
ggcggtgcttgcaggtggcagccaagagcctcctggcacagcggcaccaggcaggtgacgcctattggaccccagaggtcatcccagctccagacgtggacacattttcttccaatgatgtctacggatgaggaaactgaggcctggagaggttaaagagacccgttcagagtcctacagtggtagactggtcttctgaggacctctgccctctacacagcggcctcttcaggtgcagggaggaaatggaagcacgttctatgctggttccaccccaggcatctgtgtgcttcgaggatgtggctatggcattcacacaggaggagtgggaacagctggacctggcccagaggacactgtaccgagaggtgacactggagacctgggagcatattgtctccctggggcttttcctttccaaatctgatgtgatctctcagctggagcaagaagaggacctgtgcagggcagagcaggaggccccccgagactggaaagctccacttgaggagaatgggttgaattctgaaaaagatcgagctagggaagaactatcccaccacgtggaagtgtacaggagtggaccggaggagccaccctctttggtattaggaaaagtgcaagatcagagcaaccagttaagggaacaccaggagaactccttgaggttcatggtactcacctcagagagactgtttgctcaaagggaacattgtgagcttgaacttgggggaggttattctctaccttctactttaagccttctacctacaacattacctacaagtacaggtttccctaagcccaactcacaagttaaagagttgaaacaaaattcagctttcattaatcatgagaaaaatggagcagatgggaagcactgtgagagtcatcagtgtgctagagctttctgtcagagtatttacttgagtaaacttggaaacgttgaaacaggaaagaaaaacccttatgaatatattgtcagtggtgactctctcaactatggttcctccctttgttttcatggtagaactttttcagtgaagaaaagtgatgactgtaaggattatggaaacctcttcagtcacagtgtgtctctgaatgaacagaagccagtgcattttgggaaaagtcagtatgagtgtgatgagtgcagggaaacctgttctgagagtctgtgccttgtacaaacagaaagaagtggccctggagagacccccttcagatgtgaggaacgctgtgctgccttccccatggcctcatctttttctgactgtaacatcatactgactacagagaagccatctgtgtgtaatcagtgtggaaaatctttcagctgttgtaagctcatacaccagagaacacacactggagaaaagcccttcgaatgtactcagtgtgggaaatcttttagccagagctatgaccttgtcatacatcagaggacacacactggagagaagccctatgagtgtgacctgtgtgggaaatccttcacccagagatccaaacttattacacatcagcgaattcacactggagaaaaaccgtatcagtgtattgaatgcagaaaatccttcacgtggaactctaacctcattgtacatcagagaattcatactggagagaaaccgtatgagtgcactcactgtggaaagtccttcagccaaagctatgagttagttacacataaaagaactcacactggagaaaagcccttcaaatgtactcagtgtgggaaatctttcagccagaagtatgaccttgttgtacatcagaggacacacactggagagaagccctatgagtgcaacctgtgtgggaaatccttctcccagagttccaaacttattacgcatcagcgaattcacactggagaaaaaccgtatcagtgtattgaatgtgggaaatccttcagatggaactctaacctcgtcatacatcagagaattcatactggagagaaaccgtacgattgcactcactgtggaaagtccttcagccaaagctatcggttagttgcacataaaagaactcacactggagaaaagccctatgaatgtaacgagtgtggaaaagccttcaatcgaagcactcagctcatcaggcatctgcaaattcacactggggagaagccgtacaaatgcaatcagtgcaataaagcctttgcaaggagctcctaccttgtgatgcatcagagaactcacactggtgagaaaccttttgagtgtagtcagtgtgggaaagccttttcagggagctctaaccttctttcccatcacagaattcattctggagagaaaccctatgaatgtagtgactgtgggaaatccttccggcagcgatctcaactagtagtgcatcggcggacacatactggagagaaaccttaggagtgcagtcattgtgggaaagctttcatccagaggtctcccctcatcatgcaccagaggacgcatgtcggtgggaagagctatcagtgcgacgtgtattaagcagcggttgtgactcattgaacatcagaggacatatcctggagaaaagccctacgaatgcattgattgtgggaaagccttcaatgatcgctcaacccttagtaaacacgagaggacacacactggaggcaaaccctatgaatgtgaccattgcgagaaagcctttagccaacggtgtcaacttactaggcagcagagaattcatactggagagaagccctgtgaatgttaacaaatgtggaaaagcttccagttatgatactttccttattcaacatgagaaagctcatgggcaagaaactctatgaataaccaagatggagccgggtgcagttgccaacacctgtaatcccagcaccttgcgaggccgaggcaggtggatcacttgagcccaggagtttgaaaccagcctgggtaacatggcaaaatcctgtctacaaaaaatacaaaaattagcctagcatggtggcgcatacctgtagtcccagctactcaggaggctgaggtgggaggatcacttggacttgggaggcggttgttgcagtgagctgtgatcatgccatcacaccgctgccttgtgagagattgagacactctaaataaataataaccaagatgggaaatttccctgccagaccttgtttactagaaatcaggtggccaaaacatgactctcagagtggggcttcatgaccatgtgcatcagaattgcctggagtgtgcactgaaactgtgtattaccaagctcactctagccaactaaataaaaatctctggcagtaaaatccaggagtctgcagtttctaaaatcacacaggtgagtgggcatggtggctcatgcctgtaatcccagcactctggaaggctgaggtgggtggatcacctgaagtcagaagtttgagaccagcctggcaaacatggcaaaactgtctctattaaaaatacaggccaggggctgggcacggtacctcacacctgtaatcccagcacttaggtaggccaaggtgggtggatcacgaggtcaggagattgagaccatcctggctaatatggtgaaaccctgtctctactaaaaatacaaaaaaattagctaggcatggtggcgggctcctgtagtcccagctactcaggaggctagagcaggagaatggcgcgaacatgggaggcgtagcttgcagtgagctgagatcacaccactgcactccagcctgggcaacagagcaagactgtctcaaaaaaaaaaaaaaa

SEQ ID NO: 56971 - DNA, 2336 bp, Homo Sapiens
cttttcttccgcacggttggaggaggtcggctggttatcgggagttggagggctgaggtcgggagggtggtgtgtacagagctctaggactcacgcaccaggccagtcgcggattttgggccgaggcctgggttacaagcagcaagtgcgcggttggggccactgcgaggccgttttagaaaactgtttaaaacaaagagcaattgatggataaatcaggaatagattctcttgaccatgtgacatctgatgctgtggaacttgcaaatcgaagtgataactcttctgatagcagcttatttaaaactcagtgtatcccttactcacctaaaggggagaaaagaaaccccattcgaaaatttgttcgtacacctgaaagtgttcacgcaagtgattcatcaagtgactcatcttttgaaccaataccattgactataaaagctatttttgaaagattcaagaacaggaaaaagagatataaaaaaaagaaaaagaggaggtaccagccaacaggaagaccacggggaagaccagaaggaaggagaaatcctatatactcactaatagataagaagaaacaatttagaagcagaggatctggcttcccatttttagaatcagagaatgaaaaaaacgcaccttggagaaaaattttaacgtttgagcaagctgttgcaagaggattttttaactatattgaaaagctgaagtatgaacaccacctgaaagaatcattgaagcaaatgaatgttggtgaagatttagaaaatgaagattttgacagtcgtagatacaaatttttggatgatgatggatccatttctcctattgaggagtcaacagcagaggatgaggatgcaacacatcttgaagataacgaatgtgatatcaaattggcaggggatagtttcatagtaagttctgaattccctgtaagactgagtgtatacttagaagaagaggatattactgaagaagctgctttgtctaaaaagagagctacaaaagccaaaaatactggacagagaggcctgaaaatgtgacaggatcatgaatgtcaaaggcttttatcttgagaacatggtgtctggagttaaaggtattggcatactccacacatctgtaccattcttgagtgatcgcttaggaatgaatgtgatttgaactcattcatgttgagagggtgtcaaattgagaaccaggtagatccccaccacctacagtaaaaaggaccctaaagtaaattggttgaagaaattagatcccaaagattcttggtgaattttgaagtcttcatcagtatatccatattaaaacgagatgacagaagccaaagtaattatggcaagtaatggtttttatcttaactataagttatttgctcaagggtgtaatggtcattaccaaggcttttagaatgcagtttctcatttgctgtggacatgaccataaaaaaaaatttcccagtaggttttctatctgctacgttgctagcaatcagcttattgggaacagttgattaactgtaatagaaatgcaatacaaataaaatgtgaaccacatgtgatttttctttaaaatcagtgagatttgaaaattctcctagatctcttgaatcatgcaaatttgctttgcctttatattgtaacccttgtgggttgctaataaccaagcagtttgtagtagagttaactcaggctcgttctagggactcattcatgttcactcactgtacactcatctctggaaatgtaaaatttacttttatactattgttatgtagggctgacaggacaactggatcagtttcattaaaaaggtatgtatgcattagaaaagacatttgtatgggtcatttcaaagagggcttatgaggctgtgaaacccagagctcttaacgctgtgaccaaagatggaagttctctataggaagccatagcactcctaatgtttggtgctatgttttcctgaggagatataaaacgtaataatccatgattgttgccatgtgagagttttaaaggttaatcaaaatttctcttcttcagggcaaacttgaagataaatcttttgactccagctctttagaggatctaaagtgaccttgatggacagtggaagaaatcacaacatggaattcctcgaataacaatttattgactttaaataattttgtctaatgctacatatacacaattaaaaaacctttacactatttctagaaagtcagcatgtatttttggctcgaagtttctctagtgttttctgtggaaggaataaaaatttgagtttcaaaaaaaaaaaaaaaaaaaaaaaaaaaaaaaaaaaaaaaaaaa

SEQ ID NO: 56972 - DNA, 2381 bp, Homo Sapiens
gacgggagcttcccgggagccgtttgtgcccggggtaaccccgttccggccaagccgcttcagcgggggacgtagccatgaaggaagagaaggagcacaggcctaaggagaagcgagtaaccctgttaacccccgccggggccacaggcagcggtggtgggacctcgggggacagctccaagggggaagataagcaggatcgcaacaaggagaagaaagaagcgctgagcaaggtggtaattcgaagattacctcccactttgaccaaggagcagcttcaggaacatcttcaacctatgcctgagcatgattattttgagtttttttctaatgatacgagtttgtatcctcatatgtatgccagagcatacatcaactttaaaaaccaagaggacattattttgttcagggatcgctttgatggttatgtattccttgacaataaaggtcaggaatatcccgctatagtagaatttgcaccttttcaaaaagctgcaaaaaagaagactaagaaaagagataccaaagtcgggactatcgatgatgatccagaatatagaaagtttttggaaagttatgccacagataatgagaaaatgacatctactccagagacactgctagaggaaatagaagcaaaaaatagagaattaatagctaaaaagacaaccccacttttgagcttcctgaaaaacaagcagagaatgagagaagaaaagagagaagaaaggaggaggagagaaatagaaagaaaaagacaaagagaagaagagaggaggaaatggaaagaagaagagaaacgaaaaaggaaagatatagaaaagctaaagaagatagacagaattccagaaagggacaaattaaaggatgaaccaaagattaaggtacacaggtttctgttacaagctgtgaatcagaaaaatctgctcaagaagccagaaaaaggagatgaaaaagaattggacaaaagagaaaaagccaagaaattggacaaagagaatctcagtgatgaaagagccagtgggcaaagttgtacattgcccaagcgttctgatagcgaacttaaagatgaaaaaccaaagagacctgaagatgagagcggcagagactatagggagagggaacgggaatatgaacgagatcaggagcgcatacttcgagaaagagagaggctgaagcggcaagaagaagagcgccgtaggcagaaggagcgctatgagaaagagaagacttttaagagaaaagaagaagaaatgaaaaaagagaaagacacacttcgggataaaggaaagaaggctgaaagtacagaatcaataggcagctcagaaaaaactgaaaagaaagaagaagtggtcaagagagatcgaataagaaacaaggatcgtccagcgatgcagctttaccaaccaggagctcgaagccgaaatcgactctgtccccctgatgacagcaccaagtctggagattcagcagcagaaaggaagcaggaaagtggtattagccatagaaaagaaggaggagaggagtgataagtccagatggccttaggtgtcctgactgtctaggcagccaaagagcacacgttaagcaatccagaggtgccttcagggcaaagaatagagagaaagggagccgctgtgctggtggggtacactgcagaggagtaagtcttgtgtcaaagcaggaatctgatcagaggttcagaattggaagtacaatttcattgcttttgcaatttctacaaattaattttaaagtgtcagaaaaaggtgacggcaaggacatgcattgcaatttgcagggggaattgtcaagtgaggacttcatcacatatgacacgagagaaaagtaagagctggttctaaaatcaaaagctgttgttcatcctgaattgaattttctgaatttgggtggagcagagtcgctttgaagccttgttccgatctaattctattgtattgttgatgataagtgttgacattgggtagtgtagaagcaacaagcatgtccttgtagtacaggtacagtgaaggatagaacacactttcgttgatacaaaaatttaaatagttatgttacttctgtatccagtgtcctaaagttttaggattagttttagttttttgtttgcttatatgagcttagcgtaaagaatatttttaaacttcgtgttttgtcatcagcatcttttctattaagaggtaaaatgtagtccttgtttgactcttgacaatccagtgtgtttgatcttaggtctcatgatctgagtgcataccctctccaggaaggaaactgcaccagtgtctattcctgttaaatagcaacttttagtctcagcttgtttcgttttgatgtcaataaatagtaacagcattcaagtg

SEQ ID NO: 56973 - DNA, 2271 bp, Homo Sapiens; identical to SEQ ID NO: 30694

SEQ ID NO: 56974 - DNA, 3767 bp, Homo Sapiens
cctccgcgcccccggctgctgctcacgccccgcccgggagccagattttgtggaagtataatactttgtcattatgagatgtcgtctctcggtgcctcctttgtgcaaattaaatttgatgacttgcagttttttgaaaactgcggtggaggaagttttgggagtgtttatcgagccaaatggatatcacaggacaaggaggtggctgtaaagaagctcctcaaaatagagaaagaggcagaaatactcagtgtcctcagtcacagaaacatcatccagttttatggagtaattcttgaacctcccaactatggcattgtcacagaatatgcttctctgggatcactctatgattacattaacagtaacagaagtgaggagatggatatggatcacattatgacctgggccactgatgtagccaaaggaatgcattatttacatatggaggctcctgtcaaggtgattcacagagacctcaagtcaagaaacgttgttatagctgctgatggagtactgaagatctgtgactttggtgcctctcggttccataaccatacaacacacatgtccttggttggaactttcccatggatggctccagaagttatccagagtctccctgtgtcagaaacttgtgacacatattcctatggtgtggttctctgggagatgctaacaagggaggtcccctttaaaggtttggaaggattacaagtagcttggcttgtagtggaaaaaaacgagagattaaccattccaagcagttgccccagaagttttgctgaactgttacatcagtgttgggaagctgatgccaagaaacggccatcattcaagcaaatcatttcaatcctggagtccatgtcaaatgacacgagccttcctgacaagtgtaactcattcctacacaacaaggcggagtggaggtgcgaaattgaggcaactcttgagaggctaaagaaactagagcgtgatctcagctttaaggagcaggagcttaaagaacgagaaagacgtttaaagatgtgggagcaaaagctgacagagcagtccaacaccccgctgctgccttcctttgagattggtgcatggacggaagacgatgtgtattgttgggttcagcagctcgtcagaaaaggtgactcttcagcagagatgagtgtatatgcaagcttgtttaaagaaaacaacattacagggaagcggctgctgctgctggaggaagaagacctgaaagacatgggcattgtctccaaggggcatatcattcacttcaagtcagccattgagaaattaacccatgattacataaatttgtttcacttcccaccactaattaaggactcaggaggtgaacctgaagaaaatgaggaaaaaatagtgaacctggaactggtttttggttttcacttgaaaccaggaactggcccacaggattgtaagtggaaaatgtatatggagatggatggggatgaaattgcaataacctacataaaagatgtgacattcaacactaacctacctgatgcggagattttaaagatgacaaagccaccatttgtaatggagaagtggattgtaggaatagcaaaaagtcagactgtggagtgcactgtcacatatgagagtgatgttagaactccaaaaagcactaaacatgtccatttgattcagtggagtagaacaaaacctcaggatgaagtgaaagcagtccaacttgccattcagacattattcaccaattcagatggcaaccctggaagcaggtccgactcaagtgctgattgccagtggttagatactctgaggatgcggcagattgcatccaacacttctttacagcgttcccagagcaatcctattctggggtcaccgttcttctcacactttgatggccaggattcctacgctgctgctgtgagacggccccaggtgcccattaagtatcaacagattacacctgtgaaccagtccagaagctcgtctcctactcagtatggactgaccaaaaacttctcttccctacatctcaactctagggacagtggcttttccagtggcaatactgacacctcttcagagaggggtcgatactcagacagaagcaggaacaaatatggacgtggtagtatatcactcaattcttctcctagaggaagatacagtggaaagagtcagcattccactccttcaagaggaagataccctggaaagttctacagggtttctcagtcagcactcaatcctcaccagtcgcctgacttcaagagaagccccagggacctccaccaacccaacaccataccagggatgcctttgcaccctgagactgactcaagagccagtgaagaggacagcaaagtcagcgaagggggctggacaaaagtggaataccggaaaaagccccacaggccatctcccgccaaaaccaataaagagagagccagaggggaccaccgtggatggagaaacttttgatgaattgaactacatagcttttctaagcaggttaaaaaaaaaaaaaaaaaaagaaatgtaatggtttttgataatatgatcccttcagattgaattaacgaaaagacaacacttccagtttttggattgggaaataccttctaattgagactatagccaaaccagggccaaaattatggatattggtcacccagtgatcataactaggcttgaaaatcactacacatattttctgccttgagtgaacatttttagaggaaaggttatgccatctttttaccctaaccactgatattctggttagcagggccaggacaaggggaaggaaaatgaggtcaacaaaaaaatcaaatttttaggaaaagataagatgaatgttactgatttttccttttggctgaggctgcaatatggcctggcaaggcactgttactgatcttgtctttaacattttgatattttgttcatcataatttttgcatttatttttttaaatattgcattaaaatatcatttagcttgattatcgagttttttggtttgaggttttttgttgcttcttttttcttttctttctttccccctcttttttttggatgtccccttaaattttgtgcccaaggcaggtacctcactcatctcatccttggctcagccctgctggttagtatttagtatttattttagtaagatatttgtgtctgtatgatggtcagagttgaactgatctggcttgtcatttttcagtaataaaaaaagttactgaatttaattgttgaatatgatgcatatctcattcattacgatttatcagaaaccaaagatttaaattgcctagatttgtggttctttctcttcctaagttcccagcgactgctttcaaatactattttctaaatttcaccaaaggagcaaagaggataaaacaacgctccataaaggcctcttgggatgtcagaaatctaaaatctaaaagaaaacagacacagagcaagacaataacatcacaagctaaaagccagagaaatttaaaattaccaacatccttgttggagtaagacagtaaatatcagccttgcagcaagacagctctgagcagctgtgggcaaagaggtaaaccagtgggggtgcaaggagactgtctgcagcttagggcagaaatggggggatccaacttgtgaaatgcttcatgttttacaaaccaaaaagtcgggtagcaacaaacttattgtatgtcaaatcaataaatgttactttcaatatccaaaaaaaaaaaaaaaaaaaaa

SEQ ID NO: 56975 - DNA, 7267 bp, Homo Sapiens; identical to SEQ ID NO: 30612

SEQ ID NO: 56976 - DNA, 2175 bp, Homo Sapiens
cgctgcgcgcggggctagcgggcggcggagcggacggcgacggggcgctctcgggctgccggcggggccgagcgccgcgcgtcccgagcatggcaggctccctgcctccctgcgtggtggactgtggcaccgggtataccaagcttggctacgcaggcaacactgagccccagttcattattccttcatgtattgccatcagagagtcagcaaaggtagttgaccaagctcaaaggagagtgttgaggggagttgatgaccttgactttttcataggagatgaagccatcgataaacctacatatgctacaaagtggccgatacgacatggaatcattgaagactgggatcttatggaaaggttcatggagcaagtggtttttaaatatcttcgagctgaacctgaggaccattattttttaatgacagaacctccactcaatacaccagaaaacagagagtatcttgcagaaattatgtttgaatcatttaacgtaccaggactctacattgcagttcaggcagtgctggccttggcggcatcttggacatctcgacaagtgggtgaacgtacgttaacggggatagtcattgacagcggagatggagtcacccatgttatcccagtggcagaaggttatgtaattggaagctgcatcaaacacatcccgattgcaggtagagatattacgtatttcattcaacagctgctaagggagagggaggtgggaatccctcctgagcagtcactggagaccgcaaaagccattaaggagaaatactgttacatttgccccgatatagtcaaggaatttgccaagtatgatgtggatccccggaagtggatcaaacagtacacgggtatcaatgcgatcaaccagaagaagtttgttatagacgttggttacgaaagattcctgggacctgaaatattctttcacccggagtttgccaacccagactttatggagtccatctcagatgttgttgatgaagtaatacagaactgccccatcgatgtgcggcgcccgctgtataagaatgtcgtactctcaggaggctccaccatgttcagggatttcggacgccgactgcagagggatttgaagagagtggtggatgctaggctgaggctcagcgaggagctcagcggcgggaggatcaagccgaagcctgtggaggtccaggtggtcacgcatcacatgcagcgctacgccgtgtggttcggaggctccatgctggcctcgactcccgagttctttcaggtctgccacaccaagaaggactatgaagagtacgggcccagcatctgccgccacaaccccgtctttggagtcatgtcctagtgtctgcctgaacgcgtcgttcgatggtgtcacgttggggaacaagtgtccttcagaacccagagaaggccgccgttctgtaaatagcgacgtcggtgttgctgcccagcagcgtgcttgcattgccggtgcatgaggcgcggcgcgggcccttcagtaaaagccatttatccgtgtgccgaccgctgtctgccagcctcctccttctcccgccctcctcaccctcgctctccctcctcctcctcctccgagctgctagctgacaaatacaattctgaaggaatccaaatgtgactttgaaaattgttagagaaaacaacattagaaaatggcgcaaaatcgttaggtcccaggagagaatgtgggggcgcaaacccttttcctcccagcctatttttgtaaataaaatgtttaaacttgaaatacaaatcgatgtttatatttcctatcattttgtattttatggtatttggtacaactggctgatactaagcacgaatagatattgatgttatggagtgctgtaatccaaagtttttaattgtgaggcatgttctgatatgtttataggcaaacaaataaaacagcaaacttttttgccacatgtttgctagaaaatgattatactttattggagtgacatgaagtttgaacactaaacagtaatgtatgagaattactacagatacatgtatcttttagttttttttgtttgaactttctggagctgttttatagaagatgatggtttgttgtcggtgagtgttggatgaaatacttccttgcaccattgtaataaaagctgttagaatatttgtaaatatcaaaa

SEQ ID NO: 56977 - DNA, 3850 bp, Homo Sapiens; identical to SEQ ID NO: 22933

SEQ ID NO: 56978 - DNA, 9312 bp, Homo Sapiens; identical to SEQ ID NO: 30265

SEQ ID NO: 56979 - DNA, 2258 bp, Homo Sapiens
cccgggaaggcaggcgcgcgggttagaacgcgccagaggtcggcgcgcgcacacccgcaccgccccgaacccaggtagtgaggccagtgattccgagtgtgtgaggagcggcagtggcggcggaggagggggcggcgtgggtgggggcgggggcgggatgcgctccccggcccctctagccccgtggtggtacaacgcgaaggtgtgggaaggccgcgataaaccggaactgcagcccgccggacacctccggcttcacttccgtaagaggagaggagtgtacggcaaggggcgggaactggaacttggcccgcctcgttgtgagctgagctcagcggcacgcttttgtggcgtcactgcactgttaccccgccctacgtgtctctgacgctgacaccttctcactgtgaaacgtcgcgacctgtgacgtctggggggcgcctcaaatcttccactccagcatcggatcccggaaaggcagcgtcggagactggacccaaaactcttcctgttctgcctgcagagttgagccccgtccgggtcctggacccgcgtagtactgaccctggatccctgttcactgcgttctcgctccccgcgctccctgctggaccccgggatgccgggcatctccgcccgaggcctctctcatgaggggaggaagcagctagctgttaacctcacccgtgtcctggcactctaccgttccatcttggatgcctacatcatcgaatttttcacagacaacctatgggacacactcccttgctcatggcaggaagcattggatggactgaaaccaccacagctggccacaatgctgctggggatgcctggggaaggggaggtcgtcaggtacaggtcagtgtggccactcaccctgctggccctgaagtccacggcgtgtgccctggcctttacccggatgcctggctttcagaccccctcagaattcctggagaaccccagccagagctcccgactaacagctccattccggaaacatgtcaggcccaagaagcagcatgagatccggaggctgggagagttggtgaagaagctgagtgatttcacaggctgcacccaggttgtagacgtgggctcaggccagggccatctctcccgcttcatggctcttggcctggggttgatggtgaagagcatcgaaggggatcagagactggtggagagagcccagcgcctggaccaggagcttctgcaggctctggagaaagaggagaagaggaacccgcaggtggtccaaaccagccctcgtcactccccacaccacgtggttaggtgggtagaccccacagccctgtgtgaggagcttctgcttccactggagaacccgtgtcagggcagggcccgcttgctgctcacaggcctccacgcctgtggggatctgagtgttgccttgctgagacacttctcctgctgtcctgaggtggtggccctggcctcagtgggctgctgctacatgaagctgagtgaccctggcggctacccactgagtcagtgggtggctgggctgcctggctatgaactgccctaccggcttcgggagggggcctgccatgccctggaggaatatgctgagcggctacagaaagctggccctggccttcgaactcactgctaccgtgcagcactggagacagtcatccgacgggcccggcccgagctccgtcggccaggcgtgcagggtatccccagggtccacgagctcaagattgaagaatatgtgcagcgggggctacagcgagtggggctagatccccagctgccactgaatctggctgcccttcaggcccacctggcccaggagaaccgtgtggtggccttcttcagcctggctctactgcttgccccactggtggagacgcttattctactggaccggctgctgtaccttcaggaacagcttttccatgctgagctcctgcccatcttcagtcctgaactctctcccagaaacctggttctggtggccaccaagatgcccctgggtcaggctctttctgttctggagactgaagacagctgatgcagcctgaggagacatctcagaccccatcatctgaaagtgcccagagagcacagtggcagagtacatctcatccagagaaacagcaccctgcatcctccagagtcctggttccttcagtttcatcccctttctctccttccatggattatgtaatacattgtaaagttttaattaattaaaaattggatatctgaaaaaaaaaaaaaaa

SEQ ID NO: 56980 - DNA, 2801 bp, Homo Sapiens
ttacagggcccctgagatcatccttggtttaccattttgtgaggcaattgacatgtggtccctgggctgtgttattgcagaattgttcctgggttggccgttatatccaggagcttcggagtatgatcagattcggtatatttcacaaacacagggtttgcctgctgaatatttattaagcgccgggacaaagacaactaggtttttcaaccgtgacacggactcaccatatcctttgtggagactgaagacaccagatgaccatgaagcagagacagggattaagtcaaaagaagcaagaaagtacattttcaactgtttagatgatatggcccaggtgaacatgacgacagatttggaagggagcgacatgttggtagaaaaggctgaccggcgggagttcattgacctgttgaagaagatgctgaccattgatgctgacaagagaatcactccaatcgaaaccctgaaccatccctttgtcaccatgacacacttactcgattttccccacagcacacacgtcaaatcatgtttccagaacatggagatctgcaagcgtcgggtgaatatgtatgacacggtgaaccagagcaaaacccctttcatcacgcacgtggcccccagcacgtccaccaacctgaccatgacctttaacaaccagctgaccactgtccacaaccaggctccctcctctaccagtgccactatttccttagccaatcccgaagtctccatactaaactacccatctacactctaccagccctcagcggcatccatggctgcagtggcccagcggagcatgcccctgcagacaggaacagcccagatttgtgcccggcctgacccgttccagcaagctctcatcgtgtgtccccccggcttccaaggcttgcaggcctctccctctaagcacgctggctactcggtgcgaatggaaaatgcagttcccatcgtcactcaagccccaggagctcagcctcttcagatccaaccaggtctgcttgcccagcaggcttggccaagtgggacccagcagatcctgcttcccccagcatggcagcaactgactggagtggccacccacacatcagtgcagcatgccaccgtgattcccgagaccatggcaggcacccagcagctggcggactggagaaatacgcatgctcacggaagccattataatcccatcatgcagcagcctgcactattgaccggtcatgtgacccttccagcagcacagcccttaaatgtgggtgtggcccacgtgatgcggcagcagccaaccagcaccacctcctcccggaagagtaagcagcaccagtcatctgtgagaaatgtctccacctgtgaggtgtcctcctctcaggccatcagctccccacagcgatccaagcgtgtcaaggagaacacacctccccgctgtgccatggtgcacagtagcccggcctgcagcacctcggtcacctgtgggtggggcgacgtggcctccagcaccacccgggaacggcagcggcagacaattgtcattcccgacactcccagccccacggtcagcgtcatcaccatcagcagtgacacggacgaggaggaggaacagaaacacgcccccaccagcactgtctccaagcaaagaaaaaacgtcatcagctgtgtcacagtccacgactccccctactccgactcctccagcaacaccagcccctactccgtgcagcagcgtgctgggcacaacaatgccaatgcctttgacaccaaggggagcctggagaatcactgcacggggaacccccgaaccatcatcgtgccacccctgaaaacccaggccagcgaagtattggtggagtgtgatagcctggtgccagtcaacaccagtcaccactcgtcctcctacaagtccaagtcctccagcaacgtgacctccaccagcggtcactcttcagggagctcatctggagccatcacctaccggcagcagcggccgggcccccacttccagcagcagcagccactcaatctcagccaggctcagcagcacatcaccacggaccgcactgggagccaccgaaggcagcaggcctacatcactcccaccatggcccaggctccgtactccttcccgcacaacagccccagccacggcactgtgcacccgcatctggctgcagccgctgccgctgcccacctccccacccagccccacctctacacctacactgcgccggcggccctgggctccaccggcaccgtggcccacctggtggcctcgcaaggctctgcgcgccacaccgtgcagcacactgcctacccagccagcatcgtccaccaggtccccgtgagcatgggcccccgggtcctgccctcgcccaccatccacccgagtcagtatccagcccaatttgcccaccagacctacatcagcgcctcgccagcctccaccgtctacactggatacccactgagccccgccaaggtcaaccagtacccttacatataaacactggaggggagggagggagggagggagggagagaatggcccgagggaggagggagagaaggagggaggcgctcctgggaccgtgggcgctggccttttatactgaagatgccgcacacaaacaatgcaaacggggcaggggcggggggggggggggcagagggcagggggacgggtcgggacaccagtgaaacttgaaccgggaagtgggaggacgtagagcagagaagagaacatttttaaaaggaagggattaaagagggtgggaaatctatggtttttattttaaaaaaaaaaaa

SEQ ID NO: 56981 - DNA, 4620 bp, Homo Sapiens
aacaactctgctcatggtgattacatgcaaaataacgagagcagcttaatagagcaagctccaatacctcaggacggacttaccgtggcacctcacagagctcagcgagaagctgtacacattgagaagataatgttgaaaggagtccagagaaaaagagctgacaaatactgggagtacactttcaaagtaaattggtctgatctttcagtcacaacagtaacaaaaacccaccaagaactacaggaatttctactgaagcttccaaaggaactgtcttcagagacttttgacaagaccatcttaagagccctgaatcagggttccttgaaaagggaggaacggcgacatcctgacctagagcccatcctaaggcagctattttcaagttcatcacaagcttttctacaaagtcagaaagtacacagcttctttcagtccatatcatcagactccctacacagtatcaataacttacaatcctctctgaagacttctaagatattagaacacttaaaagaagacagctctgaagcttcaagtcaagaagaagatgtgttgcagcatgccataatccacaagaagcatactgggaaaagtcccattgtgaacaatattggtacaagttgttctccattggatgggcttaccatgcaatattctgaacagaatggaattgtggattggaggaagcaaagctgtaccaccattcaacacccagagcactgtgtgacctcggctgaccagcattctgctgaaaaacggagtttatcttcaataaataagaagaaaggaaagccacaaacagaaaaggagaaaattaagaaaactgacaacagattgaatagtagaataaatggtattagactctccactcctcagcatgcccatggtggtactgtgaaagatgtgaatttggacattggctctggacatgacacatgtggagaaacatcttcggagagttacagttctccatctagtccccgacatgatggaagagaaagttttgaaagtgaagaagagaaagacagagacacagacagcaattctgaggattctgggaatccatcaacaactaggtttacaggttacggttctgtcaaccagactgtcactgtcaagccacctgttcaaattgcttcactaggaaatgagaatggaaaccttttagaagatcccttaaactcacccaagtatcagcatatttcttttatgccaacgttacactgtgtcatgcacaatggtgcccagaagtctgaagttgtcgttcctgcacccaaacccgctgatggcaaaaccatagggatgcttgttcctagtcctgttgctatttctgcaataagggagtctgcaaattcaacccctgttggaatactagggccaacagcttgcactggagaatcggaaaagcaccttgagttactggcttcccctttacctattccatcaaccttccttccacacagtagtactcccgctttgcatcttacagttcagaggctaaagttgccaccaccacagggatcttctgagagctgcacagttaacatcccacaacaaccacccggaagcctgagcatcgcatcaccaaacactgcctttattcctatccataacccaggtagtttcccaggctctcctgttgctaccacggaccccatcacaaaatctgcatcccaagtggtaggactcaatcaaatggtgcctcaaattgagggaaacacagggacagtccctcagcctaccaatgtgaaggtagttcttccagcagctggcctctcagctgctcagccaccagcttcctaccccttaccaggctctccccttgctgccggcgtgttacccagccagaactccagtgtgctcagcacagcagcaacttctccccagccagcgagcgcaggtatcagccaggcccaggcaactgttcctcctgcagttcctacccacaccccaggccctgccccgagcccaagccctgccttgacacacagtaccgcgcagagtgacagcacctcttacatcagtgctgtggggaacacgaacgctaatgggacagtagtgccaccgcagcagatgggctcaggtccttgtggttcttgtgggcgaaggtgcagctgtgggaccaatggaaaccttcagctaaatagttactattatcctaatccaatgcctggaccaatgtaccgagtcccttcattctttactctgccatccatttgcaatggcagctacctcaaccaagcacatcagagcaatggaaaccaacttcctttttttctgcctcagactccatatgcaaatggactggtacatgacccagtcatggggagccaagccaactatggcatgcagcagatggcaggatttgggagattctatcctgtatatccagcacctaacgtagttgccaacaccagtggttcggggcccaagaagaatgggaatgtctcatgttacaattgtggtgtaagcggacactatgcacaggactgtaagcagtcgtccatggaggccaatcaacaaggcacttacagactgagatacgcacctcccctccccccttctaatgatacgttggattctgcagactgaaacgagtaaagcttgcctacttaatacactcaagtgtggggagtcatggggtgtggaggggaggaaaggaaaggtattttgtttctttgtctatacatttcctagatttctatgcagttgggatttttcatttctcttgtaccaatgtccaaaacaagaaagaatgcaatgcttttgagcctctggtctcctggttcaacaacaggcttatatgtatgatacatgtaatttaaaccttcagacaaacttaaatgttggtgcgtgcttttttttttttttttacactgaatacttgctgtgtgcaatgtttactgaatctttaaaactgtgtatttgaccttttttttacaacactggtgacagtcatatggttttgaaaaaaaaaagaaattttgcttcttcccagcttttctcactttcaccctaaacgacacttcctccccagccagcctcactctgtctccggcccgcagcaggagcagccagcagtgcattcaccccacttttgtaaactgctctgcatataaaccaagggcagaatgtttcaccctgatcttatgggaggaatcaaactcccaaaatagtgtgtatatatgtaataaacagcgtcacgtaaatacatatatgcagtgcttgttgtccaaatagaaatgaaaataagtggaagagagaggaagaagtcaaaccatatgaaactgaaaaaatatgacgtacgaaatggacaaaaagctttttctgaaaccaactttttacttccatcatccttttttagcctgttgcttcagagagacacaaagtgaacacactggtgtgaatgtcgctctctgtgtgcttgtgtttgtaatgaaagtctacagccaattttacttgtctaccaccgtgttgtgctcaaagagacactacttgagtgaagatttcttctttccctgtaccagctgttacagtgttacgttgtgtttaaaatgtgtatggtttattgcaatctgaacagagctatgggtttctaccataagtcaggttgtttgttccctaacctgtctctcgtagcaaagtcacttttataacagtttaccactatgcttgattataatgtgaaaggcggaattctgagtgtgttaagatggtattaatcatgtcggtgtcatgtcactaagtttaatgctgctgtttttaaaaaaaaaaaaaagtttttttaaaaagccaatctatgtactaaattgcttccaggtaatttttgatttcctaaagtgcactgaggttatctggaagattgggtgtattttttggtgactgctgcattcatcagcaatgaacagtttccactgtatagtcctaggggtcagggggtgggggtttcattttccattcctcagcacagagcagaaatgatagatttttattgtttggagtaacgttggtatgcagcagaggaacgtaaacatttggtcttggttcagaagcctaacagattgctagacaagagaaaaaacttgaagaaaaaagaagcttaatttcatgcttcataagtagcatttatatttatagcaccaatgtacattttgaaactttctttcaggggtgggagttatggggaaggggtgggtgtgaaggggtagatgaaagctttaatttagaaagaaagttcaagtaaaggaaattattttgattaaatatattttatttgatctgggtatttttggaccacattattaaattaattgttaagctgcagttgagttgttcaagtgagagttttgataagccacttatgggccgcgttgtgaatcacttgccagttgtactttatggagcttattttatgatttaaaatactgtactgtacataggaggtatgttaccttctccttatttgtatgtttaccatatactttgatatttgaaatgttatgtactggaaaggccacttatatttctagaacagattggattttatgcaaccttttttccttgaattaacagcaataaaaaaatgaaaaacagcttaaaaaaaaaaaaaaaaaa

SEQ ID NO: 56982 - DNA, 3682 bp, Homo Sapiens
gaccatcagaccggcctgaataccagaatctctttgcaatgcactcgcctcgctcattaccagaaggaggttttacctgcctagtgacctggttggtctgggcatgaaccccgagaggtggaaactctcagactctcaggactgacagccgagtggctggggactataaatccgcgagaactgccctcgcgctgccatccagctgggtagccgggggagcgcgcgtgggggctccgcgagtcgctcgcccttggtttctggggaagcctgggggacgcggctgtggcggaggcgccctgggactcaggtcgcctggagcgtggcacgcagagccccaggcgcggagctgaggccgcgcggccgcgcttggccccagcgggcgtgggactgagcagtctgctgccccccgacatgtgacccagccccgccgcccatgcgggctcccggccgcccggccctgcggccgctgccgctgccgccgctgctgctgttgctcctggcggcgccttggggacgggcagttccctgtgtctctggtggtttgcctaaacctgcaaacatcaccttcttatccatcaacatgaagaatgtcctacaatggactccaccagagggtcttcaaggagttaaagttacttacactgtgcagtatttcatatatgggcaaaagaaatggctgaataaatcagaatgcagaaatatcaatagaacctactgtgatctttctgctgaaacttctgactacgaacaccagtattatgccaaagttaaggccatttggggaacaaagtgttccaaatgggctgaaagtggacggttctatccttttttagaaacacaaattggcccaccagaggtggcactgactacagatgagaagtccatttctgttgtcctgacagctccagagaagtggaagagaaatccagaagaccttcctgtttccatgcaacaaatatactccaatctgaagtataacgtgtctgtgttgaatactaaatcaaacagaacgtggtcccagtgtgtgaccaaccacacgctggtgctcacctggctggagccgaacactctttactgcgtacacgtggagtccttcgtcccagggccccctcgccgtgctcagccttctgagaagcagtgtgccaggactttgaaagatcaatcatcagagttcaaggctaaaatcatcttctggtatgttttgcccgtatctattaccgtgtttcttttttctgtgatgggctattccatctaccgatatatccacgttggcaaagagaaacacccagcaaatttgattttgatttatggaaatgaatttgacaaaagattctttgtgcctgctgaaaaaatcgtgattaactttatcaccctcaatatctcggatgattctaaaatttctcatcaggatatgagtttactgggaaaaagcagtgatgtatccagccttaatgatcctcagcccagcgggaacctgaggccccctcaggaggaagaggaggtgaaacatttagggtatgcttcgcatttgatggaaattttttgtgactctgaagaaaacacggaaggtacttctctcacccagcaagagtccctcagcagaacaatacccccggataaaacagtcattgaatatgaatatgatgtcagaaccactgacatttgtgcggggcctgaagagcaggagctcagtttgcaggaggaggtgtccacacaaggaacattattggagtcgcaggcagcgttggcagtcttgggcccgcaaacgttacagtactcatacacccctcagctccaagacttagaccccctggcgcaggagcacacagactcggaggaggggccggaggaagagccatcgacgaccctggtcgactgggatccccaaactggcaggctgtgtattccttcgctgtccagcttcgaccaggattcagagggctgcgagccttctgagggggatgggctcggagaggagggtcttctatctagactctatgaggagccggctccagacaggccaccaggagaaaatgaaacctatctcatgcaattcatggaggaatgggggttatatgtgcagatggaaaactgatgccaacacttccttttgccttttgtttcctgtgcaaacaagtgagtcacccctttgatcccagccataaagtacctgggatgaaagaagttttttccagtttgtcagtgtctgtgagaattacttatttcttttctctattctcatagcacgtgtgtgattggttcatgcatgtaggtctcttaacaatgatggtgggcctctggagtccaggggctggccggttgttctatgcagagaaagcagtcaataaatgtttgccagactgggtgcagaatttattcaggtgggtgtactctggcctcttggttcattattttcaaacaagcacacttgtacaattattttctgggtacttcccatatgcacatagcactgtaaaaaatatttcccaaagatcactcattttataaataccactttttcagaattgggtttattgcgagcaggaggagatacttaaaacatgcacatataccaggttggtggtaagttggtcgcatgtgaaaacctcaactatttaatcatcatgattcatattttgagtgaatacatcaggcacagaccttcatgatatcacacactcttggctactttaagaggccatctttaatactttatgagtagttctggagtgtaaacataaacgagtattcttttgtagtcagaaaagtgtcctctcaataatttagtaggggcttattgtctctcaaaactaacctaaaagaaaatgacacattttataatagaatattacatttatttctggaagtgtgttttcaaaaagatatttacatagtctgtaaactagaaagtgttaggtaaagctctaggttactgtgttactattataatattaaacattcgaataggcagtcgttcaaagactctttggaatatctatgaatgaatatcctctattcttataatattaaaacccataagtaaatataggacatacaagagaaatgagttaaatgactatgtaagggagagtttattaaaatttgatgaaatttactgtaggaactaaactatgccataaaacaatagctttctagttcatttccagtaactgttcccatctcctttaccacttgttaagaaaattaaattcttcagtcacgctgctttaaaatgggacaaaatctattaagttgaaccatatataattgtggatatttggctgtttttaatctgacaagcagtaacttcatatggtttgccttaatatatatttgttttagtcatgaactcataatccattgatgctctttcatgagaagagatatcacccatatttccttattgatattattggtacaggcagacaaccctggtaggagagatggattctggggtcatgacctttcgtgattatccgcaaatgcaaacagtttcagatctaatggtttaatttagggagtaattatattaatcagagtgttctgttattctcaatctttatagaaacgattctgctggttttgaagaacagatgtattacactaactgtaaaagtagttcaagagtgagaaagaataaattgttattaagagcaaaagaaaaataaagtgattgatgata

SEQ ID NO: 56983 - DNA, 2600 bp, Homo Sapiens; identical to SEQ ID NO: 30625

SEQ ID NO: 56984 - DNA, 2015 bp, Homo Sapiens
acgcgcctcggggaacagcctggcccaaagcctcactcctcacgtcccaggggtggacgggggtccgggagcctcgagctccgggcaggcgtggcgaggctgaagtctgggtcttccgcgccccgcgaggaccacgccgcgacgtaatcgcccgcggggaggcgcggagtggagccgcagccagcccctcccgcactctgctgaccgcgcactagctgtccttgaggcaagaatacttgggagcggaaaaaaggtgggggtgttccccggggcgggggaggaggggcaaggccccagcaagcctcttggaaatctctccctgggaggggacgaggggcggccttcagttgcaaatgggaagggctcggataccggatttgaagcagtgtttgcacggcaagcgcagcttttatttagactgccggtttgtgagggttggctctcagagcgctgatggcgattatagtggaacttcaccttcacctgctatgcgccccgcagcgcgcccgctcccacgcccgcgtagctgaggacccagactcgccaggaaaggctagtgaggctggggcccgggcgggcccggccgggccgggtcaggggaggggcctggcggcaggggcggggcctcagctaaaggcgcggagcacccggcgccgagagcgctgagtagagcggcgcccgctcgagagaagtggggccgagatcgcgccgtcccagcccgcccgccggcgtctgcgctgctccggcgcccttacccctgctggcccttgcaaggcgcgaccggcggccatgcagccccggggctgaggccgccccatggcaaagccggcggtcccggcgacgacggcgcatggagaacttccgtaaggtgcgctccgaagaggcgccagcggggtgcggggccgagggaggcggcccgggctccggccccttcgcagacctggcgccgggcgcggtgcacatgcgggtcaaggaaggcagcaagatccggaacctgatggccttcgccaccgccagcatggcgcagccagccacgcgcgccatcgtcttcagcggctgcggccgggtcaccaccaaaaccgtcacgtgcgccgagatcctcaagcgccgcctggcgggcctgcaccaggtcacgcggctgcgctaccggagcgtacgcgaggtgtggcagagcctcccgcctgggcccacgcagggtcagacgcctggcgagccggccgctagtctcagcgtacttaagaacgtgcccggcctcgccatcctactttccaaggacgcgctggatccgcgacagcccggctaccagcccccgaatccccatcctggtccctcgtccccgccagccgcgccagcgtccaagaggagcctaggggaacccgcagctggagaaggctccgcgaagcgatcgcaacccgagccaggggttgcggacgaggatcagacggcctgaaactccggactgtgggccacctagtccggcaggatcttccgccagcgcctccaccttcagatgtacctccagcctttcactcctcggtcctccggagcccacaacctggacacagctcctcaagacaggtagcatggaccttaaggcgacaagagaggggccccaggagtggcaggagaggatccccgaccaccctagggaaacttcgtgcgataattgctgcttatgcccgtgttgcgtgaagacacggaacttcaccttttctgggaccttctttgggggagaatggtggacagtgggattctggaaacttgtttgggacccccaagggttaaagccacccagcattcacgaagagcacctgaagtatggaagctgactttctagttttctttcccctgcttcagaggagcatctctgagggttctagctcttttaacacctcttttccccctgctggcccagagggagacccaggactgaactctccaggcctcctcccctgagccctgcagctggctggagtcttgtttccaataaaacaagcacaaaaaaaaaaaaaaaa

SEQ ID NO: 56985 - DNA, 5541 bp, Homo Sapiens; identical to SEQ ID NO: 30273

SEQ ID NO: 56986 - DNA, 4055 bp, Homo Sapiens
cagtgttcacagatgtgaagcaagataatggagatctgttggaaaacaagcatggtgaattctggttagagttcaatagtggttcattattttgtgtgacaaaatatgaaggttttgatgacaagcactacatttgccttcattctagcagtttcagtctgtaccataaaggcatagtggatggagtgattctcccgacagaaacacgacttcccagctcaacccgcccacactggttggaacctactatttattcctctgaagaagatggcctcagtaaaacttcttcagatggagttggaggagacagtttgaatatgctgtctgttgccgttaaaatattgtctgataaatcagagtccaatacaaaggaatttctcattgccgtaggactgaaaggagccactctccagcatagaatgcttccttctgggcttagctggcatgagcagattttatacttcttgaatattgctgatgaacctgttttgggatataatcctccaacttcatttacaacttttcatgttcatctttggagctgtgcacttgattatagacccctttatttgccaatccgatctcttcttaccgtggaaacattcagtgtttccagtagcgttgcattggataaatcttcctctactctcagaataatcttggatgaagctgctttacatctatctgacaaatgcaatactgtcactataaatctgagtagagattatgttcgtgtgatggatatggggcttttggagttaaccataactgcagtgaagtctgattctgatggagagcaaactgagccccgctttgagttacactgttccagcgatgttgtccatatcagaacgtgctcagactcttgtgctgcgttaatgaatctcattcagtacattgcaagctatggtgacttgcagacacctaacaaggcagatatgaagcctggagcctttgaaagaaggtctaaggtagattccagtggtcgatcatcctcacgtggtccagtacttcctgaagcagatcaacaaatgttacgagatctgatgagtgatgctatggaggagatcgacatgcaacaaggcacctcgtcagtaaaaccacaggctaatggtgttttggatgaaaaatctcaaattcaggagccatgttgttcagacctcttcctgtttcctgacgagagtgggaatgtatcccaggagtccggccccacctatgcctcattctctcaccatttcatcagtgatgcaatgacaggtgtgcccactgagaatgatgacttttgcattctttttgcaccaaaagcagccatgcaggagaaggaagaagaaccagttataaaaatcatggttgatgatgcaattgtgataagagacaattatttcagtctgcccgttaataagaccgatacgagcaaagcccccttacactttcccattcctgtgattcgctatgtggtgaaggaggtctctcttgtctggcatctttatggaggaaaggattttggaacagtccctcccacttctccggctaaaagttatattagtccccacagttcgccttctcacacacccacgagacatggacgtaatacagtatgtgggggaaaaggaaggaaccatgactttttaatggaaatacagctaagcaaggtgaagtttcagcatgaagtctacccgccatgcaaacctgattgtgattccagcctctcagaacacccagtctcccggcaggtgttcattgttcaggatcttgagattcgagatcgtttggcaacatcacaaatgaataaatttttatacctgtattgcagtaaagaaatgcctcgaaaagctcactccaacatgttgacagtgaaagccttacacgtgtgtccagaatctggcaggtccccacaggagtgctgcttgagagtgtcgctgatgccgctccgcctcaatattgaccaggatgctttgttcttcctgaaggatttcttcacaagtctttctgcagaagtagagcttcaaatgactccagatccagaagttaaaaagtctcctggagctgatgtcacctgcagtttgccaaggcatttgagtacctcaaaggagccaaatctggttatttctttctctgggccaaaacagccttcccaaaatgatagtgccaattcagtggaagtggttaatggcatggaagagaagaacttctctgctgaagaagcatcttttagggatcagcctgtgttttttagagaatttagattcacgtcagaagttcccattcgacttgattatcatggcaaacatgtatcaatggatcagggtacgctagctgggattttgattggtctggctcagttaaactgctctgaactaaagctcaagaggctttcctatcgacatggtttactaggcgttgacaaattattctcatatgcaatcactgagtggcttaatgacattaagaagaaccagctaccaggaatcctgggaggtgttggacctatgcattcactagtacaattagtacaaggcctaaaggacttggtctggctcccaatagagcagtaccggaaggatggccgcattgtcagagggtttcagagaggcgctgcttcctctggtacctcgacagcgatggctgctctagaactcacaaacagaatggttcaaaccatacaggcagctgcagagactgcttatgatatggtgtctcctggtaccctttctatcgagcccaagaagaccaaaaggtttcctcatcaccggttagcccaccagccagtagacctgagggaaggtgtggccaaggcctacagtgttgtgaaagagggaatcacagacacggctcagaccatttatgaaactgcggctcgagaacacgagagcagaggggtgactggtgccgtgggcgaggttctgcgccagattcctccggcagtggtgaaacctctgattgttgccacagaagcaacgtcaaacgtgctgggtggcatgagaaaccaaattaggccagatgtccggcaagacgagtcacagaaatggcgccacggggatgactgatggcttggaactgacagtgtgaagataaggagagtggaaccaggagctcagagtcctgacagcagcttcagaggaagctcgtttaattttattgtgctcatctcaggaacaaaagcattttttagttaaataatttaacatcaaaacaacatgcaaccaaaaacttctgacatttatagttgatacttgcctatagaaatgtttggtggctggtgtcaaaggtccttaaagcatttgctgccaagttagtggaaggctcacttttgttaagatgactgtaattctccttgttaccgacgagagatcattggaagctgccttctaacactttgtgtagctctgtggagttggattttcttaaggtttaaaaagaatcacagcttcggaacttttaactgaaaatgagagacagaagccacaggggaagcaaagcaaataggattttcaatataaatatcagtgtggaaaaataacctattctgttgaatttagtgttcatgcacttgagaacaacattatttccatttactccgaaaatccttctgtgggggtttgagaaagtgaatgttgcagacatgttctgttgtgttgcactttatcctgtgtttatgtgtatgtgtttttagattaattcaagttgtgtgctatatttcttgtataatttacaaagttacacaaaatataaagagcagtaaacttgtctgaaagtttttggcaaaggaaggtaacttcaatgtaatagcttcctttaagagtacaggaaaatgcattctgtaatgaagtggggcccatgtaattgtttatattttcagttttaagcaggtatagtgcaggcttgttaggaatgtgtggaagggaagattggaagtgatttttcctcttttaaaagtaaacaaaattcttcaaatatgccctagttaactatttcagcataccatttttacttggttaacagtgtacattttgataacctatcaggaatgaataaagtatttttatttaaaggtg

SEQ ID NO: 56987 - DNA, 3927 bp, Homo Sapiens
agcagcgagtccttgcctcccggcggctcaggacgagggcagatctcgttctggggcaagccgttgacactcgctccctgccaccgcccgggctccgtgccgccaagttttcattttccaccttctctgcctccagtcccccagcccctggccgagagaagggtcttaccggccgggattgctggaaacaccaagaggtggtttttgttttttaaaacttctgtttcttgggagggggtgtggcggggcaggatgagcaactccgttcctctgctctgtttctggagcctctgctattgctttgctgcggggagccccgtaccttttggtccagagggacggctggaagataagctccacaaacccaaagctacacagactgaggtcaaaccatctgtgaggtttaacctccgcacctccaaggacccagagcatgaaggatgctacctctccgtcggccacagccagcccttagaagactgcagtttcaacatgacagctaaaacctttttcatcattcacggatggacgatgagcggtatctttgaaaactggctgcacaaactcgtgtcagccctgcacacaagagagaaagacgccaatgtagttgtggttgactggctccccctggcccaccagctttacacggatgcggtcaataataccagggtggtgggacacagcattgccaggatgctcgactggctgcaggagaaggacgatttttctctcgggaatgtccacttgatcggctacagcctcggagcgcacgtggccgggtatgcaggcaacttcgtgaaaggaacggtgggccgaatcacaggtttggatcctgccgggcccatgtttgaaggggccgacatccacaagaggctctctccggacgatgcagattttgtggatgtcctccacacctacacgcgttccttcggcttgagcattggtattcagatgcctgtgggccacattgacatctaccccaatgggggtgacttccagccaggctgtggactcaacgatgtcttgggatcaattgcatatggaacaatcacagaggtggtaaaatgtgagcatgagcgagccgtccacctctttgttgactctctggtgaatcaggacaagccgagttttgccttccagtgcactgactccaatcgcttcaaaaaggggatctgtctgagctgccgcaagaaccgttgtaatagcattggctacaatgccaagaaaatgaggaacaagaggaacagcaaaatgtacctaaaaacccgggcaggcatgcctttcagagtttaccattatcagatgaaaatccatgtcttcagttacaagaacatgggagaaattgagcccaccttttacgtcaccctttatggcactaatgcagattcccagactctgccactggaaatagtggagcggatcgagcagaatgccaccaacaccttcctggtctacaccgaggaggacttgggagacctcttgaagatccagctcacctgggagggggcctctcagtcttggtacaacctgtggaaggagtttcgcagctacctgtctcaaccccgcaaccccggacgggagctgaatatcaggcgcatccgggtgaagtctggggaaacccagcggaaactgacattttgtacagaagaccctgagaacaccagcatatccccaggccgggagctctggtttcgcaagtgtcgggatggctggaggatgaaaaacgaaaccagtcccactgtggagcttccctgagggtgcccgggcaagtcttgccagcaaggcagcaagacttcctgctatccaagcccatggaggaaagttactgctgaggacccacccaatggaaggattcttctcagccttgaccctggagcactgggaacaactggtctcctgtgatggctgggactcctcgcgggaggggactgcgctgctatagctcttgctgcctctcttgaatagctctaactccaaacctctgtccacacctccagagcaccaagtccagatttgtgtgtaagcagctgggtgcctggggcctctcgtgcacactggattggtttctcagttgctgggcgagcctgtactctgcctgacgaggaacgctggctccgaagaggccctgtgtagaaggctgtcagctgctcagcctgctttgagcctcagtgagaagtccttccgacaggagctgactcatgtcaggatggcaggcctggtatcttgctcgggccctagctgttggggttctcatgggttgcactgaccatactgcttacgtcttagccattccgtcctgctccccagctcactctctgaagcacacatcattggctttcctatttttctgttcattttttaattgagcaaatgtctattgaacacttaaaattaattagaatgtggtaatggacatattactgagcctctccatttggaacccagtggagttgggatttctagaccctctttctgtttggatggtgtatgtgtatatgcatggggaaaggcacctggggcctgggggaggctataggatataagcattagggaccctgaggctttaagtggtttctatttcttcttagttattatgtgccaccttcttagttattatgtgccacctcccctatgagtgacgtgtttgatcactagcagaatagcaagcagagtatcattcatgctggggccagaatgatggccggttgccagatataactgctttggagcaaatctcttctgtttagagagatagaagttatgacatatgtaatacacatctgtgtacacagaaaccggcacctgccagacagagctggttctaagatttaatacagtgctttttttcctctttgaaatattttactttaataccagtgccttttcttgttgaacttcttggaaaagccaccaattctagatcttgatttgaattaatacacacaatatctgagacacttacacttttcaaaagatttgtgtatgcattgcctaattagagtagggggagaagggcaactattattatccctattttacaaaactgaggcttagtgaggttcagccacatgcctagacttatatactagttagtggtgcagccagggagaggactcagatttcctggaggcaaagtctatctctgaaactccatgaagacttttgcagccagttcccaccaatatgccccagacgtgagacaaacaaggacttttttttttatatagagccatccataaaatcctaagcccttttattaatgtataaccaggagaacatctgtgccaacggttggactttttatggctgagattcgggaggaagtgtgacaccaagcaggagaggaagaatgattttctttgtacttaggttttctaaggacattgttttaatctgtatcgtgccaaagttgtatcactgttaaacttctgaagacataaccagttgagtcttatttcaagatatgttctcaagccaattgtgtgcttctcttgtttctgtgattgctttctagccaaagcgaagcttgtacaggttgagtatcccttatccaaaatgcttggaaccagaagtgtttcaaattttagattattttcagattttggaatgtttgcatatacataatgagatattttgggaataggacccgagcctaaacacaaaattcattgatgtgtcagttacaccttatccacatagcctgagggtaattttatacgatattttaaatagttgtgtacatgaagcatggtttgtggtaacttatgtgaggggttttcccattttttgtcttgttggtgctcaaaaagttttggattttggagcatttcggattttggatttttggattagggttgctcaacccatattattggctgtacatcctggtcacttctgacttctgtttttactaatggaagctttgca

SEQ ID NO: 56988 - DNA, 6317 bp, Homo Sapiens; identical to SEQ ID NO: 29895

SEQ ID NO: 56989 - DNA, 3454 bp, Homo Sapiens
gaattcggcacgagcttgcgcgcgccccaccgaccaaaatggcggctgccgttggtgcggggtgcggtttgtagtgctgttgccctactcatccctttgcaaaatgtgaaagaagaagcggctggtggaggcgggccataggcaatgagtcggcgaaggaaacatgatgacagccctagcccgaagaaaacgccgcacaaaacagtggcggcggaggaatgcggctcggtggtcgagccagggaggaggcggctgagatcggcccgcggttcgtggccctgcggggctagagaggggcctcccgggccagtgcggcagcgagagcagcctccgaccgccgccctgtgcagtaaaagtaaccccgaggaaaggtatgaaacaccaaagagagcgctgaaaatggactcactgtcatcttccttcagttctcctaatgatccagatggacagaatgatatcttttgggatcagaattctccattgacaaagcagttaggtaaaggaagaaaaaaacagatttacaccacagatagtgatgagatttcacatattgttaatcgtattgctcctcaggatgaaaaaccaacaacaaattctatgctggacatgtggattggtgaaactgctattccttgtactcccagtgtagcaaaaggaaaatcaagagcaaaaatcagctgcacaaagttaaaaacacaaagtcaagaagaagaacttatgaaactggctaaacaatttgataaaaatatggaagagctagatgtgattcaagagcaaaacaagaggaattatgattttacccagatgatttcagaaacagagattttaagtaattataaagataatatacagatgtggtcattacataatatagttcccgaaatagataatgctacaaaaaagccaatcaaaggaaacaccaagatatctgtggcaaataatcaaaatagcagtcagaagccatttgaccaaattgctgaagcagcctttaatgctatttttgatggttctactcagaaatgtagcggacagttaagccaagaactgccagaggctttttggagcaccagtaatactacctttgtaaagacaaatgctttgaaagaggagaaaatcattactaatgaaactctggtcattgaaaaactgtcaaataaaaccccacgatcactttcttctcaagtagatacacccataatgacaaaatcatgtgtgacttcctgtactaaggagccagaaacttctaataagtacattgatgcatttactacaagtgattttgaggatgattgggaaaacttactaggtagtgaaccttttgctatgcaaaatatcgacatgcctgaactctttccttctaaaacagcccatgttactgatcaaaaggaaatttgtacctttaatagtaaaactgttaaaaatacgtcaagagcaaatacaagtccagatgccaggttaggagattcaaaagtattacaagatctttcttcaaagacatatgacagagaattaatagatgcagaatatagattttcaccaaattcaaataaatcaaacaaattatccactggaaataaaatgaaatttgagaactcttccaataaaattgttattcaagacgaaattcaaaattgtatagttacatctaatctgacaaaaataaaggaagatattcttactaactctactgaagcttctgaaaggaagtcagctttgaacacaaggtattctaatgaacagaaaaataagtgcattttaaatcagtctattaaagcccctgttaatactgatctttttggctctgcaaatctaggcagtaaaaccagtgttagtaacccaaatcagactagtgcatcaaaagtaggttctttctttgatgattggaatgatccctcatttgccaatgaaattattaaagcatgtcatcaattagataatacctgggaagcagatgatgtagatgatgatttgttgtaccaagcatgtgatgatattgaaagactaactcagcaacaagacattagaaaggacagtaagacatcagaaagtatatgtgagatcaataataattccgaacatggagccaaactaactcagcaacaagacattagaaaggacagtaagacatcagaaagtatatgtgagatcaataataattccgaacatggagccaaaaacatgtttgctatatctaaacaaggaagtaatttggtacaatcaaagcatttgaatccaggcagcatttcagtgcagacatctttgacaaatagctcacaaatagataagccaatgaagatggagaaaggggaaatgtatggaaattctccaagatttttaggtgccacaaatttgactatgtattctaagatctcaaactgtcagataaataatctgcatgtgtcttatactaacactgatgttccaatacaagtgaatagttccaaattggttcttccaggaagttcaagtttgaatgtaacttcagatcatatgaatacagaaattactacttataagaagaaattgagtactaatcagccatgccataagactgtaacagatgaagctcagagcaaccttaacacaacagttggattttcaaagtttacatttacaaggatgaaaaattctcagattctttctcagtttaatcaaaattgtataactggaagtatgtctgataccaaaattacacagggtgtggagaaaaagaaaggtgtcaacccattactggaggaagctgttggacagcaatctttggtgaaactttctgaatctttgaaacaatcttcaaaagaggaagaagagaaaaatagaaagtgttctcctgaagaaattcagagaaaaagacaagaagcactggttcggagaatggctaaagcacgagcctcatctgtaaatgcagctcccacttcatttctttaatgaaatattagttggaagacttcacgaagactgctgataactatctgtgattgataggaaattttttttcttgatttctctgtgagaaatgtaatgctgacttttataaagcctggacttctactttatttaataaatcaatgtttgcaatggtaaatgaaacatttccttggacatgtatttgaaagtcattaaatacaaaagttttggaaattcaggaaagttagcaattatgtacggatattatacagaggaaagtagttatatttttaaatgctattattgcagaggatcatcaaaaaagaggtaatctacgttatttcctattctaatgtcttttcctaataaaaaacttcaactttctaagttagtagagactgtttttgtagttttactttcattaactgttgcttaaggtttttatacacttccagattttaattaatactttcatatttctaggaacatggttgatatgaaataaaggactttttatttgtaaggaaaaaaaaaaaaaaaaaaactcgag

SEQ ID NO: 56990 - DNA, 1196 bp, Homo Sapiens; identical to SEQ ID NO: 23992
